United States Patent Application Publication US 2005/0208558 A1 - sequence listing, part 35

SEQ ID NO: 38872 - DNA, 2468 bp, DROSOPHILA
taattactcaaacatcggcttgaattctcgagaatttcccaagaaataagctccgtgactcagttctcgttaatctgcataaagactatagtaagtttcttctcagtctaccccgctttcaaagttcttccgttggaataaatcatctgcaatataatataataaggtgatcccaacgaaccaaaatacacaaatgtgtaaaaggttgtaggcattattaatgcgaatttctaagaaaatactacgagtgtagagcgaagaattgacaagatgtgtgagatggaatgatttgaatgctgatttaacagccaggaaaggtgactcacgaattgagcgttgaataataaacgaaaataatgaatgaagccaaaaaaaagagagagaaatatatctaagcatgagagaaaaacgactgataagatgtatctgtaaacatcgttgtgtttcgtgctcattcacactcgttgcgaaatagcttaagcggtaagctgctgttaatattcttctctctttccctttaacataattgctattctgttataaaagcctaagctcgacttgacggcagttcagtcaaaaaattgatcagtacgcgtaaagaggtgccatcattgtgagtcttcacgcaaataagaattatacactttaattcgccaaatacagttttgcaaaaactaaattaaaaactatttttaaagaaatatttctttatttgcattttgcatgttgctgataaattaaaaattaaccaattcctaacccaatagattggaaagaagtcatcaaacattaatttcaacgttttattattgtttatttcgcacacacgcacacatatgcaccactaaactcacaacaaatcgatgcacagtccacaacaccaacaaacacaagttatacaacaaatcttcacaccagcgcacccatagactccgaattcgaagcttccgatatcagtgaggatatagtggaaactcaaccggaagagcaaaagaacaccatggatcagctgcagcaaatgatggaacccctgcgagaggagatcagacatgaggaagatttggagcaggaacacgaggacaaggagtacttggagaggaaagagaagaaggagcgtgaagaattcgattcctcagacgatgaagacggcgaggctacaactcctgttgtgatgagcgaaaccttcaatgatgagtgggccgaattcgatcaggatcaggatcgagagcacgatcggaatgaggatcaggatcatgatttggactttgaaaacgatctaaacaacgaaatcgatatcgaggagaactttgtgcccattgacctatccaacgatatagccgtcaacgatttggctgccgcagatcccaattttcccatcaatgaagatgccgagttcattgtgcacccagctgtaatcagaactatgcctatgttcgagaagctttctttaggagagcctgcgaaatgaggtttctaagtctctcccactagtctaggcattttcttttagtcttaactcaatagcttgtaaacataaaacgaggatatctctgagagatccaaagaaatcggcgctcatttcatccgtaatttatcctatttattttcacagacaacgagtattatgtatgcaaggtgacattgaaaattatttattgttaaaataaaagaaatcaaaaataagtgtattaatataaataagtcttcgataattggcttaatttataatgaagtgcaataaaatatatgcgatgtctttgataaaactgactattatagaaatgaacgtgattaatatgaaaaatttagctgaagagattattccatcttgatggggtcttgattcaatccgggggcaatttaattgattgaccaattttgcccagagcttataaagctttaaaaaaaagtgcagcatattttcaggcttttcagtggtttaaattgaatacgggcataaaatgcttgataggcattatatgcctcattagttttgcctgcattaaataaaaaacactagttaattattttttccatactatgcatcggggtaattaattgtggtcaacttatggttaacttaattgcctgttattcttttgtcaaataaaatcgccggtcagaagagcttattaattgctgaattatagtctcggaaaattatccgattgttcatgtatacggaaaagaactgaaagtatctgaaatatatagcaaatcatggtattaccactctttactcaatgttccattaaattcaattcttgaacaaaaattcttataacaaaaggaataaagggtatatagtttgccattgtactttgaaagtgtcagtagttattgaaaataattgcacgaatgaatcgaaattgaagcgtaaattgtacagaatttacttttaaatctcgattgggatggacgtctactgtttgggtagcaggcccattgaatgcataagtggcagacat

SEQ ID NO: 38873 - DNA, 468 bp, DROSOPHILA
atggatcagctgcagcaaatgatggaacccctgcgagaggagatcagacatgaggaagatttggagcaggaacacgaggacaaggagtacttggagaggaaagagaagaaggagcgtgaagaattcgattcctcagacgatgaagacggcgaggctacaactcctgttgtgatgagcgaaaccttcaatgatgagtgggccgaattcgatcaggatcaggatcgagagcacgatcggaatgaggatcaggatcatgatttggactttgaaaacgatctaaacaacgaaatcgatatcgaggagaactttgtgcccattgacctatccaacgatatagccgtcaacgatttggctgccgcagatcccaattttcccatcaatgaagatgccgagttcattgtgcacccagctgtaatcagaactatgcctatgttcgagaagctttctttaggagagcctgcgaaatga

SEQ ID NO: 38874 - protein, 155 aa, DROSOPHILA
MDQLQQMMEPLREEIRHEEDLEQEHEDKEYLERKEKKEREEFDSSDDEDGEATTPVVMSETFNDEWAEFDQDQDREHDRNEDQDHDLDFENDLNNEIDIEENFVPIDLSNDIAVNDLAAADPNFPINEDAEFIVHPAVIRTMPMFEKLSLGEPAK

SEQ ID NO: 38875 - DNA, 3270 bp, DROSOPHILA
tagcgtggattaaacaagaaaattatcatccaaaatgaaaagggattaaaaccaaatatgatactccaactccaagtgccgaaaactagctgtctacagggcaaacaccaatggacagacaaatcagatagacggacggacaggacagactaatgtcacatcccccgaacacagtaattctgttgaaaagtatttccctttatgatttttgtattcaattcagagaaccatcttcatgcgtttcatgtttagttcttctcctatgagttttacgacttaagcctctttttaagctaactattaatttattaattagtttgtaagcgcaaaaataattaaaatacatctaaacaaaataactgcaaacaacctatattaaaataaaggataatataaaactatattgaaaaccaaaatattcttgtcttgtactttatcaaaaacgttctgcaattttgggaatggaaaatttattatggaatcaaatgaatactttaaaacttcgcaattttcaaggtataactattgcacatatataatttttctgtgggaatcaatgaaattaagcaatactaatcaacactaacaaaaaaggtaaaacaaaaatgttctaatagtaattcgaaaagttcacgtcttgactttatgtatgctttaaatcaaatttcgccgaaaagtatgcactgttattttattttcgtaaccatgcgagatgtaaaattgacttattttgacaatttaaactaagcccttttgttaggctactcaaataccacaaaactttttttcgcatttgatttttgcgtgcaatttgattgtgctaaacagaaagctgcgatccatgattgtggcacatgtttaaacaattaaatatctaaaagaaaaatctttcagtttcattttattttgtatttatttgtaattacacttatttttgtgcaaattgtaaaaaaagttcctgatcaaattgaagtggttgtggttctacgcatactttacatcaatatgatttgggagggtgacgaatgccacgcagctttgtgtcgatctttttgattgcgatttgcttgtttagctgatttactcgcagcttggaccaaatcataaaatttcccaagctaagtaaagacgccacatgcttagcagctgcctccggatcacttgttggattcgagttggaccacatattcataaacatggtgtcggattgaatgggcgtacaattgatcaccggaaaactggtgttggccgaaatcacgttggccaaactatttaatcgctcgtcgacggtcacgaataccagattattaatcaccgcctcgaatgtccggagaatttggagcgcttcttcgggattttcgctaaacagaacacactcggagcaccactttcatgcctagtgatccaatgcaggtggcgatctgttcgccatgttccacatccatttcactactcactaggattaccaccagatggtcctggggcggcgcaatgctcgatagctgctctattacccaagaataattgcgcttgactgtattcaaatcgctatcggttactgtatccaaatttatatacacggttttgtccaccattagccgtttgtcgcccgccggccaaatgcgccacgtatccgagtcaattatgtccgccagcaatatgttgccatcttcgtccacaccgaattcaaccttcatgtccaccaaggcacagttctttgttttccatgctctttcgagaacttcgaataccactagtgaagtgcgtcgcattatttgaacttcgtctgcgccaattattaggccattgcactcaaaattcgaggagagaatttgctcatcgcaccacaggggatcgtgactagaatcgtccttgaagcaagtctcttgctttggtggtgcaaatcgatatccttcgggcacttccggatttaatttgataaaagatccggtggccaaacgacgcgtcacccactctatgtgcaccatctggcattttcgtgctataaaagcgttatcgccacactgatccacgtaagcggttcggattcccgcctcattgagtagcctaaaaaccagtccatttgtggtatttgagatagccgccttgccttgaagctcatgggccatgagtccatcaaaagctgtaatgcgatccttgctcaacagcagacataatcctggatgatccggtaggtcgtacaccttcttggtcttgccttcgatcaggatcttgcccaattggtagcctccaatggttgtgattgacatggttggcaaataaaaactgaatctaaattcactttaagagctactattataaacgaacttaagcaatttaatcacatttataaggtcataaaactaatcgtgtgataatcgagcgcttgataatcataaacgagcaacataagtttcttttatttctaatcagtataatcttgaaaattataaaagccaaaaatattggaaaattctatttcagagatattaacgtttatacagaggggccaataggctgacttcaggccaaactaacaaacgtggcttatgattgtgaaattatgaaaatatatacttaataatcctatacttacttgttcactaaagaacatacataattaggttagatattctatgataccgatttgtatttttttatttataagtaaccgcaaaacgtataaaaagcgagtgattatgagtgtggtattccataggcatggagaacgatacaagaaagttggagcgcttagtggtcttcgactgcgacattggaacggacgacgcctgggctttggctctcctactgcgtggagaacaattgtccttggcgagtgggaggcggtacaagctgattgcgattacttgtgtacagggcaatacggatgtggtgaatggagcccagaacgccctaaaaatacttcgattattggaaaggcgtgatgtaagtttctagcaaataaaatttttaaattagggcacgactattttggccaaagatctttagagcttatattgattttccactactttatgcgtatcgcaggtgccagttttcaggggctgtgccaatcccattgtaactcggacatggttggacatttcccgcttccacggcactgacggccttaatgacattggcggctacccagatgtgagtgatctgcaggagcaactgcagcaggagcacgccgtgaatgccatgtatcggctagtgtgtcaatatccaaaacaagttgactttctactttgcgggccactaactaat

SEQ ID NO: 38876 - DNA, 1188 bp, DROSOPHILA
atgtcaatcacaaccattggaggctaccaattgggcaagatcctgatcgaaggcaagaccaagaaggtgtacgacctaccggatcatccaggattatgtctgctgttgagcaaggatcgcattacagcttttgatggactcatggcccatgagcttcaaggcaaggcggctatctcaaataccacaaatggactggtttttaggctactcaatgaggcgggaatccgaaccgcttacgtggatcagtgtggcgataacgcttttatagcacgaaaatgccagatggtgcacatagagtgggtgacgcgtcgtttggccaccggatcttttatcaaattaaatccggaagtgcccgaaggatatcgatttgcaccaccaaagcaagagacttgcttcaaggacgattctagtcacgatcccctgtggtgcgatgagcaaattctctcctcgaattttgagtgcaatggcctaataattggcgcagacgaagttcaaataatgcgacgcacttcactagtggtattcgaagttctcgaaagagcatggaaaacaaagaactgtgccttggtggacatgaaggttgaattcggtgtggacgaagatggcaacatattgctggcggacataattgactcggatacgtggcgcatttggccggcgggcgacaaacggctaatggtggacaaaaccgtgtatataaatttggatacagtaaccgatagcgatttgaatacagtcaagcgcaattattcttgggtaatagagcagctatcgagcattgcgccgccccaggaccatctggtggtaatcctatgtgttctgtttagcgaaaatcccgaagaagcgctccaaattctccggacattcgaggcggtgattaataatctggtattcgtgaccgtcgacgagcgattaaatagtttggccaacgtgatttcggccaacaccagttttccggtgatcaattgtacgcccattcaatccgacaccatgtttatgaatatgtggtccaactcgaatccaacaagtgatccggaggcagctgctaagcatgtggcgtctttacttagcttgggaaattttatgatttggtccaagctgcgagtaaatcagctaaacaagcaaatcgcaatcaaaaagatcgacacaaagctgcgtggcattcgtcaccctcccaaatcatattga

SEQ ID NO: 38877 - protein, 395 aa, DROSOPHILA
MSITTIGGYQLGKILIEGKTKKVYDLPDHPGLCLLLSKDRITAFDGLMAHELQGKAAISNTTNGLVFRLLNEAGIRTAYVDQCGDNAFIARKCQMVHIEWVTRRLATGSFIKLNPEVPEGYRFAPPKQETCFKDDSSHDPLWCDEQILSSNFECNGLIIGADEVQIMRRTSLVVFEVLERAWKTKNCALVDMKVEFGVDEDGNILLADIIDSDTWRIWPAGDKRLMVDKTVYINLDTVTDSDLNTVKRNYSWVIEQLSSIAPPQDHLVVILCVLFSENPEEALQILRTFEAVINNLVFVTVDERLNSLANVISANTSFPVINCTPIQSDTMFMNMWSNSNPTSDPEAAAKHVASLLSLGNFMIWSKLRVNQLNKQIAIKKIDTKLRGIRHPPKSY

SEQ ID NO: 38878 - DNA, 2216 bp, DROSOPHILA
gtggtcgtcgtggcggaggaggaggcggtggttccggcgggcgtcgtcggtcacgttctcgctccccaatgcgccgtcgttcgcgcagtccgcgtcgccgatcatactcccgttcccgctcgcctggtagccactcgccggaacgccgatccaaattttcacgcagtccagtacgcggcgacagccgcaatggaatcggaagcggatctggaggactggccccagccgcgtctcgtagtcgcagtcgctcctagatatcgacgtcacgttccatttagtgggagtgcgaggtgagttcatatcgtgtaacgcttcagaaaaagctttatataaggttaaacataccttacgttaaatagggattattttaaaactagttgttctttgctttcagatatgactcgctgactagggccaatgctgtatcctgttccggatctatggctccatctgtgtcatgctgtacccgaacagcaggtatagaaaccattatacaatcttacacttaacacaactatttatagcgaactattttaagtttcggcagagtaaataagtagagatcaggcatgattatgttccgagtgagatccccgcaacctgggcgatccctcgatgtcggttcttgcacataggctttcatatactagagcgtagtagaaatccttgaacgtaatcagaaacagaacaaaataaactcaaattaacacggcttcaattcaatacctaaatatcaaatgacagacaggacaggaggagaatgagaggtggatgagtgataggaatactctaggattctgtttgtttcgttgcgattcgattcgattgcgtttgtgttgctcgtttccgttctttgtaccttttaacgacaaacttattaacaagcttctcccacacgtttattatatatatgcaggcgaatggtgtgtggcagttgttgcggttcagataagattgtggttaaatcgctcgcgattaaggatcagcagcagcgcatcatctaagctacaactccttcctcacgtaggcggacaccgcgtggctcctgattgttgctactgctgctgctgctgcagatgctgatgctgatgctgctgctgtcgcatgatgctgttgctggtgccgctgatgctgcagttgcagttgccgtagccgtagcagcttcctgtttcctgttagacgctggcgctgccaaagctgctccagattcactcatagtttcccgtttcccgtcacttcttctctcgcctcgtctcgtctcgtctcaactcgcgatttgttgctggttggcgttgttggtgttttcctgtatcttggtgggcgtcccttttgagtttaggcgaaaagtcatcatttgcagcagaggccacatcgacgatgcgatggatgctagagtctggattgcatactgactcgaccgaaatgtgggattccctaacgatctggtacattcggtaagtgagagagctaaccctttgaatttgcagcctaattaaacgcttcaataaagttttacttgattataacttaaccatctacatatgttattaattggttgaaatggggttttaaaacatatatgtatcttggaatattgtaaagaaagatctagtatcttcggatgcccagaacatccatccattatgtttcggtttctattgactcccgagaaacatggtagtcggggggtatattgacaaagcagttgccgggaaaccgaaggcaaaatcacatatacccaagtccttctgaatacgattcagaaacccttttacactttcatctaaattatattggtttctcctgcaaagatgattcagtacgatactgtgcagatcaagaatgtatcatggtaagctttagttatgcccgacttggctcaagatgactattgtgtgctctcaggcagccggaactgcatacggagggcacctatgtgtgctcttttccagagcccccgctgccggaggcccatctgaaaccgggcacctggcatggccatctggagccgtatcagcggctcttctatcatcaaacgatgaactcggtgcgctcgagcaagcggtaccgtgccaatccgaacatcccgaaggatacgctggacttttcgctgcagtcgcgctacgatcacacccgcgaagcatttccggacaaggtggactacgtgatgcagagggagacgtgccgcgccataagtagctggtcagctcctgggg

SEQ ID NO: 38879 - DNA, 216 bp, DROSOPHILA
atgagtgaatctggagcagctttggcagcgccagcgtctaacaggaaacaggaagctgctacggctacggcaactgcaactgcagcatcagcggcaccagcaacagcatcatgcgacagcagcagcatcagcatcagcatctgcagcagcagcagcagtagcaacaatcaggagccacgcggtgtccgcctacgtgaggaaggagttgtagcttag

SEQ ID NO: 38880 - protein, 71 aa, DROSOPHILA
MSESGAALAAPASNRKQEAATATATATAASAAPATASCDSSSISISICSSSSSSNNQEPRGVRLREEGVVA

SEQ ID NO: 38881 - DNA, 6638 bp, DROSOPHILA
tggtcgcgcacgacagtggagaaagtcggatagatagatagatagatggtagtaacgtttggcagaaaagagtccagtttctaggagtcctcttgaaattatcgtccttgggaacatgaagatgccacaatattataattacaatgtcctgtcaataatcattcgccattatcgctgatgactcgggctatgtgaaaattgccgccttgatggctctcgccaattaataacgttaatgcaatggcaattaccattagctacttgatggcagcctcgaccttccgcccactctgccacccaatatacgctcctcatccccctccccccctctattccttactcccttggccaatgcacattgtcacttattttaattaaatatcgctgaggggaagtgggccgccgatggattcaacattcggtgggaattttttataatttccggacaaaggaagcgcacaaatagaaaatgtggcgcacgtccgagaaataaccatttgaaatgtgatagccaaagttgtcggcaggagatggtggcaggtgatgtcctgggaagctataggaaattgaaatgctccataacggcaaggtaatatgcaaagtgataagcagcgcggatgcgatgcgatgaagctggtggggcttcttttcgggaaaggacgacaaaaggggttacctacttcagcagctttcatatcttgggaaaatacctaaatacaattattaagtgactttaataccataaaaacgtatccataatatgcaaaactagactgcatagtttgcatataaaccatggtatactttgcagagcttagaaaaatggaaacgactatctgcattttccacgattttccgcgcagaattaccggctgcagcatcaaatcatttgagtgtaattagcagtcattagccagcaatgatgcaaaaagaaaaaaaaagaggcaggaattcggattcgaacacaagggggttttgtgggggaggggggggggtgtactcaccgatttgggccgccagttggtggtgcagcaacgggtggtgcgggggtaacaacaacaattgcaccaccctggtcgcctaatgaagttctggaattaatgctggaattcagctgcgttgacggtgctgctgcagcggcagctgctgcggttgctgcggtgcctggtgttgctgttgctgctgttgctgctgcagatattgctgcgattgccgttgctgctggcagtgctattgggctggaatttatttggttgtgcaagagtgtctcaaacaatgttgtcgacattttagccgctgttgctgccgttgttgtagataatgctgcgatgctgttgttgctgttgctgccactgccggtgggccgcaaatagggatgaaaacttttcgcagctcccgtgaaagttgttgtcgctgcaatggcacctgaagttgcgcccgagctcgttagattctctaaatactcgtacttgaccggcagtatttgcggatgttgctgctgctgctgctgctgctgctggctattgttgcctgtatttaaattgttattgctgtagaggctgtggttgttgctgctgctgttgctgttgctgctgctgccggcactcgaattgctgttgttgccattagcaacatgggcaacaggtgccgttgcaagcattgttgttgctgctgctgcggatgctactgctgttgcctctgatgttgctgctgctgctccagttgctgctgctgctgctggtgaattgccgcttagtttatccgcgtgcagactcaaggattgcaacatcatttattacacctctgctttgtttttattgccaactcctgcagctcctgtcgctaattacttttagtgccgcatttggcgtcgcttgctttttaatttgcttcgggttttagttttattaaaattgtatattattttgctgccggcaggagggtcctctttctgtgtttagttcagtcccccttttgtttatgccttctttatcacagtgtttttattttcgttttcacaattagcctctgcgtttacgctttttgttttttaacttttataaagggtggagctggagttttagctgtaattaaatagagaacaaagtggttgccgattaaaagacatgcacaagtcgttttattatgttttattattgagcaggggttcaaaagaatagaattacccatgcttgaagtgtaaaatattaacattgtttatgtaaaagcctttaaagttcgattaaagcccgatgcaattgatttcaattgtcacttgaagtggaaaaattgtgttaaaatttctggaaaatgaacagcactagctaatatttattaatattttaagtatccaaacggaaaaccgcagtcaaaatggccgctcttggtgtccacgccacgcccactctaactaatcccaccgcccatggagccaaactgcatagctaagcgcatttgaatggaaagcagcatattgactgacagactgaccacagtacttcggccactcgactgtctgcattcaagtgcccgctttgatgtgcacaccggagtacctcactacacacacacacacactggcattcagatgcacaccgatgcaagtacactgagaacaactaagacggaagttgaggaaattcaagtttttatgtgcgaaacacttgcatcttaatctaattttcattttaatgattggaacgatgtgaagcttaatttaactggagtgatttcaggctaaacatcgtgtgctcaactatttttctctgtgcagttgttggcatctgccgctaaacagataagcatgtcgagtgctcacatgctgaagagcgagggctcagttggccgcataatgttgaaggctccagctaattagttaaattgaaatcaaattatttgttgtcgcacttgactggccacaggcatgggcgccttaattaacgcgcctgcatatataccgattctgtagatatctgtggatatagactggttgtcgagtagttcggcggaaaagcatatatgtacacatgtacacatggtgcactggcaaggaaagctattacgcttggccttattgctttaaggctgcattaactgctgcattaaaggccaaatttaaacagtaaattggagcgatttcctagttatttacagtggtcagagaaagaaatgtatacttttgttgaaaaataataataataatatctaaaccactttgatacattaagaaacttgaatgggtaccatctgcagtagatactttgaacaacttaaggatgttaaagatgtatgttgattagctacaacaatcttgtattgaagattgcaatatccttattattcccttgtatccctcatcgaataacccgtcagttattcagtactgacaacttttaatgcagcatcctttttggcaaaaatattgcattcacttaaggcacacactttaaagtccacccacaccatagacgagctgctctcgttcaccggataatcgcgacagaattcgtcggtttttctattattttttaataaatttcaacgcttgcatattttggcgctcgtctatttacgttgcccgcttatttattttcgcagcgcgctcaggcgctttgttttatttttttggctccgtccgctcctcttggccgggctgtggcaactgtcgtcgtcatcatccgcatccgcatcgctgtcgtgccacggggcgcttgttgcatcccccacaatttgcccccgagctgaggcaagcgtgttaggaaggcagtcatcggttcgccagcggcgtgctcctgctcctgattctgcctcagccacgcccccaccgcccatcgcctggctcctgcggattcttgccacgcgcttatcccagcgccatcaaacgatgtcgacgacagcaacctcgacgccaacgtcgctggagtcagggtatgcgatatttgggggacattttggctgtattatcaaacttaccaaatgggatttaaaactttaaaggatcatgtaaagtaagtatatggaaatgttgtagtcaaacttaaaagttcgtaaagattaaagttgcagctgcttttaaagtcaaatgcgagaaaagaaatcatctcagaaacatacttcttatatattacttaattattattattcatacagggtatttgccggtcgagcccaggctacacacgattagcctgactgctgcattatgagcagttatcggcgctgttgcttctcgtagctttaacgcacatagagccaggggatatagccatacgtatatgtatatatcaggagatcggtgggggaggcaaccagctgtgccgccctccatgctgctgctgtcaccttgtaattttatttatctattgattattgagtatctcttttctatttatttgcttttgtttgcccacgcagcgttgacagagagctacccccaaaggcaggacccaacccccaaccaccgtgcctcaacctcaaaccccaaccccaaaccccaacccctgggcaccctttggcatttttattaaaccagattccaatccgtgtgggtgtgagtgagcccctggctgttttttaattaactttagtgacaatattttgcacagctgcctttgagctgggcaaaccatcaccataaccatccacatcccacccatgctccatccatcggaaccgagagataatcaaactttggccattgtatgcaaatgttggcaacggagtcttggtcgtgctcttggtccctgggacactttgaccccaattctcggtgttttctctgtcagcgtcttgccattgtgacagttgacatttcgtaaagatgtcacttgtccatggttgcattgtgaactgtagctatagctgcagctgtagtagtcggtacatgcactttatgtacgtatggcatggtagtgagtaccaacacatgtctcgttcacacatcctcatatggtcgattcacaatccgaccctcctagatttccccccattcacttgttgagcgagtttccttatcttatcttgagttttatacgtttgctttattgtggttttgctttttttttcccctgctctttggagacaatatggtgtacctttatatccgagtaactggagttggaagaccgtggatgaacaggtctttatctttagtgcagacaaacttcagatagtgtctaagtttctgctgaagtatgactaatccgttgaaaattgcggagagacaggtgaagataagcggattttatatatgaactagaactctgtatcacttctgggattaagagttgagccaatatttgcactacattatagtttaactacgcacttttctaaatatgttataactaatatgtgtaaaaaccacccagttcacaaaacgatactttaaaatgtgtcacgagtttgttttcctttgagcgttgaatacttacatcgaaataaaaaattgttttaagttcctggcagatacatttgattttgagccagtttctatttcgaatttgatcacaccttatgccacaatggccttatctgggtcagatatcaagggcgtttaactgcagataccaggtaaatcaatcaggtaaatcactcaaaagcactcgcgatctgcactgatcgaattcaacgaaggagacaaccgcacgtaaacgccaacggagtacaactaacgtagccgaaattccgattccgatttcataattctcagccacaaaacgcagcgcctctcgcgcggaaaagtgttatctgcagtctgataagagcttatcgcataattgcccgctgattgccgtcaggtaagtacatttcactctgcctttctctctcacgctgcactgttttctctggaacaacatttgctccgaccggagcgacgtactcctgctaccgagtcgagttacctatcgccgcgaatagtacaggttgtcgagctctttaattgactatcttatcgtgtgcatcgacgactgtgaggtaggggaagtgccatctgacggatgaccgggcttaatcagtgcaaacatttggccaacactggctaccaaaatccaaaatgcatggcgatgacaacaaatccgagtgcgaaaccgaatcgagtccccgggaaaatatcacaaaggagtgcaggcggcagtcgctgcaattactttcgaactctcgacttcgcgctccatatatccgcactataatgctcataaatataaactaaactcatgcgagtggccgctctgaatttatatgtacggatatatcctcgcaccgggtccgtctccccgtctgtccgtttttccgtccgtgtgtctgcagggccattacacaaataccagtgctgcctgggggaaaacggagaaaatggagaccaatgagcttgccacgtagccaaagccaaagccaaagtatcgatgagtttcgagtgggtgacttgtggggtcgtgtgaccggacagccgttctcaaccgtggccataacatcgacgtcgactctctcgccggtcggtcggtcggtcggtctatatacccaccatatatactatatatcctatatagaagcggtaaataaccgatacctgtcggtgaaggaaagctcggttttgtgggtttgtttgtcattgtgccatcaaattataataagcgact

SEQ ID NO: 38882 - DNA, 1290 bp, DROSOPHILA
tctccttcgttgaattcgatcagtgcagatcgcgagtgcttttgagtgatttacctgattgatttacctggtatctgcagttaaacgcccttgatatctgacccagataaggccattgtggcataaggtgtgatcaaattcgaaatagaaactggctcaaaatcaaatgtatctgccaggaacttaaaacaattttttatttcgatctaaaactccagctccaccctttataaaagttaaaaaacaaaaagcgtaaacgcagaggctaattgtgaaaacgaaaataaaaacactgtgataaagaaggcataaacaaaagggggactgaactaaacacagaaagaggaccctcctgccggcagcaaaataatatacaattttaataaaactaaaacccgaagcaaattaaaaagcaagcgacgccaaatgcggcactaaaagtaattagcgacaggagctgcaggagttggcaataaaaacaaagcagaggtgtaataaatgatgttgcaatccttgagtctgcacgcggataaactaagcggcaattcaccagcagcagcagcagcaactggagcagcagcagcaacatcagaggcaacagcagtagcatccgcagcagcagcaacaacaatgcttgcaacggcacctgttgcccatgttgctaatggcaacaacagcaattcgagtgccggcagcagcagcaacagcaacagcagcagcaacaaccacagcctctacagcaataacaatttaaatacaggcaacaatagccagcagcagcagcagcagcagcagcaacatccgcaaatactgccggtcaagtacgagtatttagagaatctaacgagctcgggcgcaacttcaggtgccattgcagcgacaacaactttcacgggagctgcgaaaagttttcatccctatttgcggcccaccggcagtggcagcaacagcaacaacagcatcgcagcattatctacaacaacggcagcaacagcggctaaaatgtcgacaacattgtttgagacactcttgcacaaccaaataaattccagcccaatagcactgccagcagcaacggcaatcgcagcaatatctgcagcagcaacagcagcaacagcaacaccaggcaccgcagcaaccgcagcagctgccgctgcagcagcaccgtcaacgcagctgaattccagcattaattccagaacttcattaggcgaccagggtggtgcaattgttgttgttacccccgcaccacccgttgctgcaccaccaactggcggcccaaatcggtga

SEQ ID NO: 38883 - protein, 263 aa, DROSOPHILA
MMLQSLSLHADKLSGNSPAAAAATGAAAATSEATAVASAAAATTMLATAPVAHVANGNNSNSSAGSSSNSNSSSNNHSLYSNNNLNTGNNSQQQQQQQQQHPQILPVKYEYLENLTSSGATSGAIAATTTFTGAAKSFHPYLRPTGSGSNSNNSIAALSTTTAATAAKMSTTLFETLLHNQINSSPIALPAATAIAAISAAATAATATPGTAATAAAAAAAAPSTQLNSSINSRTSLGDQGGAIVVVTPAPPVAAPPTGGPNR

SEQ ID NO: 38884 - DNA, 2752 bp, DROSOPHILA
tattatactttaaatacaatatacagcaatttcgattaaaatttgtgtggatttgaaaggtgatttcataccctatataattatcaatgcaaaatcatggtttatatatatacacacatacacaaaacagacttacatattacatgaatacatatatttatgactatatttgctgtttaattgttataagcaaaaattcgtacatatttacaatttaatagtaaatatttagaatttctgcacttgcagtcgttatattttacaattattttcgggtgtgttggtgaggaaagatttcggaagatgagaaaatatggaaaatactgttttaggatagggtgatcgagaggaactatagaaaggatattaaaatgtcagtctaccagaatgtacagcaaagcagataaaataagataaaggagggcagttaagcaaagcagataaaataagataaaggagggcagttatttaggatccttgaggtattttctttagctatggggtgtgttattcatttctatatggttttcatttttatttcaagccacagacatggcacaacaatttattatgttttttttttatgttttaaggaatttttctccgtgtatggtttccatagttttggctaaacatttaacaacagcaacaaatataaaaacaacaagaaataatcgttaacaagtgcaagatgatactgaaatgaaaagagaagaaaaagaatcaatgaataattcagtttacaattggtttaatattatactatgttattatgtaactatattaaatcagaatataaagtgggttgcaattcttattccagtataattacattgcttgcttaaatgtatttcatatttttctaaagtttattttgtatcaaagaattatcttgatctggagtattcttaaaaatacttaaaaaacaaaaagtaaatgttattaccttgctctgtgcctgcacagatgcaacagatgctagacccactgttcacgcccttcacaccacctgcacggtggcaaaggcactaaaggtgaccttcttggggaactccggtccgggggagccacgcgtcttgatcaccggcttgagaggctggcggggcttcagggagagcagtccggcggaggcggccagttccctgaggcgctgggagaagccgctgcctgagtgaccggaagtggtggccgcgttgtggtgctccagtccagcgcagtccagaacatccaggccgttgttcgagcgataaacctgggcggtggccgtgggataaaccgccaggttggtgccacccacgcctcctgacgctgaggttgatgaggtcgcagttgcattggcggctgctgccggagttatgtatctgaaatgcaaattaaagttcaaaattagactttttcagagtaaagcaaatttcaggcacttagactaatctgcattatcatacaagagaatttgcatgataacgaacgaccgctaaaaatgccaactcaagtgtgccaacagaatatattcccctattgttatcaccacctggattggatggaagatgttgattggcaagggctgggcgctgatattactcagcacgctaattgatttatttttcttatagctgaaactagccgtacacgtgccgggtgtgaagagattaccccatatacagaggtgtgtcccattaggtcgcacacaactgcgaactctttggaaggatgatgcccagatctgggatcccagtggttggcaacagccattttgcgctatcaaatcgcagcaatttattcatgatccatcagcgtttatttgtgtgccaagtgggctttgttggtttggggctgctcttggtgcaacgctaaagacgctaatcaatttgtttatgagacaagctcgctttgggctactttagtttatttatatatacatatatctatatatttataaggctcacattatttgtgctgtcgtgcaaaaatatatatgcaaatgagtttacactcagcagcctcgatttttttcgagataattgttcagcggcgaactgaaatggttgggtaaataaattgtgatgaaaaatgaatgccagatgagacatcaatacgccagtaaggagatcccagtgctcaaacactgagaggggtatatccactgtaagccgaaattggagccgaaacccaaaaaatgggtaacttccacttgtgattgaagtggcgtggttcatctggttttgaagggatctctgtaattgggttcatgagaagcaaatatttacacaattgtataacaaatttattggttatttttccacacactaaagacgcacgaacgatcccatgaatcagcaacgaaagttatttggttaaagtgttatttcagcatggaaatggaaaaattgttttttccctttaatttaagaaacaaataggtatgaggaaagacatttttaaataaaggccatgaaccaaatctaaatgattttaacagtctttcatttagaacaaacccttttttggtaagagtatttattttgcaggcattaagatataattgccgcttgctttttggcttaatgactgttggcttggatatttactggcctttgtacgatagattcggcattcggcattgttgagttaattgtggcaattattttggcaatataattcgcttgcttgatgtcaatctcaggcacgcttgctcttacagtgcatttggagtgcaacttctgtacttagagcgtaactagtccgaattagc

SEQ ID NO: 38885 - DNA, 414 bp, DROSOPHILA
atggctgttgccaaccactgggatcccagatctgggcatcatccttccaaagaatacataactccggcagcagccgccaatgcaactgcgacctcatcaacctcagcgtcaggaggcgtgggtggcaccaacctggcggtttatcccacggccaccgcccaggtttatcgctcgaacaacggcctggatgttctggactgcgctggactggagcaccacaacgcggccaccacttccggtcactcaggcagcggcttctcccagcgcctcagggaactggccgcctccgccggactgctctccctgaagccccgccagcctctcaagccggtgatcaagacgcgtggctcccccggaccggagttccccaagaaggtcacctttagtgcctttgccaccgtgcaggtggtgtga

SEQ ID NO: 38886 - protein, 137 aa, DROSOPHILA
MAVANHWDPRSGHHPSKEYITPAAAANATATSSTSASGGVGGTNLAVYPTATAQVYRSNNGLDVLDCAGLEHHNAATTSGHSGSGFSQRLRELAASAGLLSLKPRQPLKPVIKTRGSPGPEFPKKVTFSAFATVQVV

SEQ ID NO: 38887 - DNA, 2132 bp, DROSOPHILA
ctaaggtcagatgattcgctgcgaacgtgtcaaacttctgggcaaaactgttgtgccctcgtcgagggtaaaggggtcaaaaaaaaataaaatggtattgtaaataagagcagagccagccggaggcagaggggtgctgcaatggaggaggcgaggattgccggttacaactaatcagttggtccccttgtagaggtatgttgcgcaggcgcagtgtaacagctgtcactattatttttattttccatgcttgtgctgctcttgttgtttttcttttgaggccgggatcgggctgcctggggcatgcatttgcaggatgcgtcgcgcgtgtcaagtaaatccttaaagatcttggtaaacatccttgcccgaaagcggcgaaactgtgcgaaatcaatacagattatgtgcgagaccgggataaggcgacagttggccgcctacctaaaaaaaaaataatggggagggatgccttgatggatgcaatgtgcaattacatgcatggaaacggaaaatcggaaatcagagcgggttagagttgaggtgcggatcagagccaggtagaaaaccggacggcccgtgtgtgaaaatcatcggagcggaattaagtccctccccgaaaagccgtgggattaattagcatttggtttcgggacaacattttaactccgatcccccgtttgtccgtagtaaaattttttaatttatacatttggccgacagcaacgtgtcaagtgaatgtcaaacaaatctgtgaaaacatttttgtggaatcatcatcgcagtagggaaaattcaaattgatttgtaagctttagatgcagctaggagaacgaggagataaccagttcctgtgaaccgtgtgacatttgccggggtacagaaatacagaaataaccatccgacgatccttgtccactggcggacttacaagtttgtcttttgatgtttgtccgcaagtctgtccgccgagtttgtttcgccttatttcgtttcggggttaacttgttccctggctttgtttgcccggttgtttgtggtccttcaaagttgttggctgtcgacttgtccacggttcagtggactcgggtgccttgggacgagtgaaccctttgcggactcggttcaccatgggttaagtgcagatcgaagtgaggaaattttatttgcatacaatttagcttaaataatttgtttacacacacgatttgtccggggcactacaaataggaacatgagataatctcagtctttgatcgctgatttgaggaaatgggttttcctatgatttacataaattggtgttacgaatatactaaatgagctaatgcctttttttcttaacaattcggttttgttatattctatcattttgtgtaatacttaaattgtcacttaccaattactcaataattaaaaacagcgatctgcaaagaaaataatgagaagtgagctgttaaattattaagtatggctaaaataagaagaagtatataagtatatacgttttttgtgtattttctctggtacctacacacatctaaaatcagtttaaagaacccctagcaacttgttgagtcttcataaaaatcttctaaccatgtgtttgtggatgcattgtcaggttcattctacatcaatctacgagaatgcgaggctgtgaaaacacatccctcctttggccagggcccctacctaacctaaatcaacaaatcggtctaaagctatctgctccgatttagagcaaaaaacctggaaaggttcgaaggcaaacacaaatgaacaaacagcgcgcacaggcaatgccaacaaagttgtcaaatcaaacagagaacttgaggagcagaaacgagatccaagctctgtcagatcccgatttggatcgccttggttttggtgttaaaaatatgagaaacatttataactttttgctgaagagttcttctcctcgctggctggcatttaaagaactttagcgatttatgcgtctgtcagcggaggcaggcgaaacctgatttgctgctgacgaccaagaacgggggctaaggccaggaggcccagccaaagtcgcaagagtttaaagggcccgagcgagtgtaggtaggaaataaaaccagaccccggtccaaaaa

SEQ ID NO: 38888 - DNA, 132 bp, DROSOPHILA
atggtgaaccgagtccgcaaagggttcactcgtcccaaggcacccgagtccactgaaccgtggacaagtcgacagccaacaactttgaaggaccacaaacaaccgggcaaacaaagccagggaacaagttaa

SEQ ID NO: 38889 - protein, 43 aa, DROSOPHILA
MVNRVRKGFTRPKAPESTEPWTSRQPTTLKDHKQPGKQSQGTS

SEQ ID NO: 38890 - DNA, 2949 bp, DROSOPHILA
gcctggaagtgaaactaaagctcgggagttcggaaaactcaactaaactaagtagctaggtaacttgttttgttaaataactgaccgttggtcaacttggttgcaaatgcaaccgctaaactgaagaattgccaaatattatcatacgttgttgctctcgcgttgcatgactggctgccgcctctaagtggatttaaaagttgttcgcacccccaagtttgtgtcttgttgaagtctttcgtttaccactgttaccatgcttccatactaacgcacgattttgtcatgtttgtagttttctttttacgctatctatttgctgcagtactcagcccagtaatagtcggtgagcttaagttaaaggggtcaagtgcatgcggcgaacaaaaagattacaaaacgaactacatgaagatgaggctgtttgaatagcttgcgatgagaaagaagtgtcttttattttcggtgctaggagaagtctttacgatggcaattataataataagtctttaagtttcatgcaaatataaaattcgtatgataactgtacaactactatcttggaaaaattacaactctatacaaaagtatttaacaattactaaatcaaatacatttttcgtagtaatgaagattcaacaactaaccgatggctaacatatactttcagcgatacatttttttgcttaattttgtatgcctatctaatgcctttcatattcctaacttattgaaatttacctgaaatcaaggaacttaaaaagcaccataaactacttataaatcaataaaagaaaaaataactaactaactaataacaactcagtagacgatcaactgtatgcaaaagacaaggacactttaaacaacaaacaccggttgctcttcacgcccacaaaatcagtttactcaaaacaataaagacaataaaaacataacgtacatttacctttgaaattaacagaagacaaacagttgctgttaaactgaaaccacgagcatgtcgcaacagtcgctctcaaactgtgctcgccttctggtttacctggcggggatttcgctctttgccaaccacttggcaaacgcgtccagccaaatcgacgtggatacggatctgaagcacttgctgggtcgttgccactggtcggacgaggatttcaacgagtgcatgcggcaggtgtttaacgacctaagggcctacttcacaacaggtgagtgagatgtggattacgggcgagcaatcatggagcaactctttcaggtgtgcccgactacaacatcaagccctttgacccgcaccactgtagctacgttgagctgcgacgaggtgaatcacagggtctgggcagctttcgtctgatattgcgcaatgtatccgagtacggatgggcgcgatccgaggtgaccaagttccatgccgatccagaggaccagcgcatcgtctacactcagtatttccccgacaaaagtctggagggcgagtacgagttcgccgccaagatgctgggtactgagatgaacagaaaaggccactggaacctcaccctctacgattacaggtgggcaccgagttgcatggaaatatgtatttcccaagctgtgttgcaaacaccagtattgttgatagcttttggcttacatgacaacctatcgctcactttatttacttcctcagtcaaaccaccagcgttaggcgcatcggcggtccgggctcactcatcaaggtccatgtggaggtggaccgcatcggcggaatggagctgcacattgagaacttgctgcagggacagcccctcaaccaactggccgatggagtcatcaacagcatgtggcagctgggattgcccttcatcaagccgatgattaacgagttggttagcacggcatttacggatatattcaacgagtccttccggcactttccgctcgagaagttcctcgccacgtgacctcatctagttaaccatactgtatctctgtatctcttttgtagtatttttaatggaacttataacaaaggctagttaattaaacacttagaccacatccgccaaagcactcggaattgcttcgatctggggctgcgccacggacggttgcagggacatctgagccagggatcgggcaaagagcttgcttagcgagatgatcacgtaggaggagctctgcaactgctgatccaccgtttcgtataggagttgataggcctgctccagctccggtgtgagggtggcttgataatatggacaaaatataatttcaatatgaaatgctgtaaaacttaatgataccaatcttaagggaaatatatgtattaggtgtcagaactaatatataaactacaacaatttttaagaattcaaggatacaagcataaagaactactgaaatccgtcgagatcacgggaactataaaatatttcgactgatttttcctttcatgtgtcttgttatttagtgtcgatatttctctctcgtactccacattcttcattttgttcttatacacaaactattgttttagtttttgatactgcttataactacattgtatttacttacgtttttgctgcagcgtttgcttgccgaggtcgaacatgaatcgcaggtagcacagctgattgtacaggtcccgctccgtatactgacgcagcaggctgccgctcctgcacttttggcacagcgggcggtgggatttcttcctcaaggagtgtgtgcgggtgttgaagttgcaatccgggtgatcgcagaccagccaatttttatagaaccgttgcacatactgccgcatggaaagctgcagctgattgcgcacgcttgccaggtactgaatcggtgccgtttggcactcggacttagcgcattgctggagtacggctatgtgggagttgcttggacccggtcggtacgcagacgccatcagctgctccgtcttacaggtaacgcact

SEQ ID NO: 38891 - DNA, 783 bp, DROSOPHILA
atgtcgcaacagtcgctctcaaactgtgctcgccttctggtttacctggcggggatttcgctctttgccaaccacttggcaaacgcgtccagccaaatcgacgtggatacggatctgaagcacttgctgggtcgttgccactggtcggacgaggatttcaacgagtgcatgcggcaggtgtttaacgacctaagggcctacttcacaacaggtgtgcccgactacaacatcaagccctttgacccgcaccactgtagctacgttgagctgcgacgaggtgaatcacagggtctgggcagctttcgtctgatattgcgcaatgtatccgagtacggatgggcgcgatccgaggtgaccaagttccatgccgatccagaggaccagcgcatcgtctacactcagtatttccccgacaaaagtctggagggcgagtacgagttcgccgccaagatgctgggtactgagatgaacagaaaaggccactggaacctcaccctctacgattacagtcaaaccaccagcgttaggcgcatcggcggtccgggctcactcatcaaggtccatgtggaggtggaccgcatcggcggaatggagctgcacattgagaacttgctgcagggacagcccctcaaccaactggccgatggagtcatcaacagcatgtggcagctgggattgcccttcatcaagccgatgattaacgagttggttagcacggcatttacggatatattcaacgagtccttccggcactttccgctcgagaagttcctcgccacgtga

SEQ ID NO: 38892 - protein, 260 aa, DROSOPHILA
MSQQSLSNCARLLVYLAGISLFANHLANASSQIDVDTDLKHLLGRCHWSDEDFNECMRQVFNDLRAYFTTGVPDYNIKPFDPHHCSYVELRRGESQGLGSFRLILRNVSEYGWARSEVTKFHADPEDQRIVYTQYFPDKSLEGEYEFAAKMLGTEMNRKGHWNLTLYDYSQTTSVRRIGGPGSLIKVHVEVDRIGGMELHIENLLQGQPLNQLADGVINSMWQLGLPFIKPMINELVSTAFTDIFNESFRHFPLEKFLAT

SEQ ID NO: 38893 - DNA, 3145 bp, DROSOPHILA
ccgaaaataactcgtcgtcggggacctttgacttcatttgcagctctttacttggccatgttcccaaaggcctggcccctggcactaaagttgctctgggtggcgattcggcggccaattaaaatcccaatcagggctctactgtaatacattgtgcgtcgaatttagttgttcaaattaattatggtacacgggaaataaaaatgagttcgtagagcgtagaaaaattaatatttctattaataaaatgctcaaataattcactgagtcttaaagtccgctaaattcaaacgaaaagtataaactggcttttctgtacatttaagcacctttttaagtgactatataataatataatacctgtgtatccgccttgtttcacgttaggtctagtttttgaatttcttttggatttcttccagtacattttaccatgtgctccatccatccaattcccatcgccgtctgggggcggtactttctttttatgagcgctctgctgccgtcgaataagtgaagcgcgaactaattgaaatttgttgcgctgacatgttctacaagatctgcttgcagatgggcaacggatagagatgctgcccttgtcgatcgtctccagctcattaggctcttcccgtcgtagttattgtctaattttaattaatttatcacaagcataaagtggcgcaactcctgacatttccccagcgttgcccccgcaacaaatcactcacacgcctcgttgaccaagtagaaacttgcgaggggacataaatttccacccgggattcttggcatagccccacaatcaaacggaatttacgacggcttctcgtctagtcttttattttgacatgctgagaacaaacaggcaaacttgcaacagctcatttgattgggtcgtttggatgccacagcaggtaccgagccataaccaaactgaaactatataatataacataaaaaaaatctgaaaatacgccgacttatggaacgacccatatcaatatgtgaacttccacaggttcttccatgtctcgcgcttgtacacattcttgtacgtctgcacggacacctggaactcggggccaaacaaggtgttggccaaaacattctccacagccaaatttcgattggtaaccgcgtgaacaatgacaagcggattgtgtacctaaaaatgtacaaaagcatagttagctcaattaaatatataagaattacaaagttagtaccttttaaatagtttggtaaaatgatgatcataataatcgaagaagagttattttataacttaataaatagattctttgtcgactgttttctaatttgtaaaattataaaatgtaaatgttttatttattataaataacaggagagaatgctataatcaggacagaaggacaggcggacatggctggatcgatttcaatctagcttacacttttaatgtacacgtattgcaaaactacatgaaattaacttactggtatggtcttgccttcgctttcgaatcgaagatcgggatccttgtgggcgcagaaaaagtgagtgtgcgaagtgggcacacgggcagaggggccacaattctgtgggaaacaaaataagacacagaaatcattttaaaggattaaaagctgtgcaaaccttatgggacactaagccgagtggaagtgtaacctcgccgtttttggttgtaaagaacgccttctccacgggaagcgagaggttcagcctcttgggaccgctgaaaacatacataggctcatcagcaggctccagggcttgcaggcggaacttctcgccgtaggccagatactgaccggtacggtcatcctcgttcggactgacgattctgaagctgttgcgcaacgcgggacgcggcgaaggtgccaccgtaagatcacacatctcgttgatggtcttgcagttgcgatgcagtccctcctgagtaattaccaccgaaagcaccaggttctgatccgaaacctgttggcggcagacaccgatcttcacgggccggatctggaccaccacgccgaaggccagaacatcctgcggcggacccagcactgttccctggtagaagcggtcgtagacggcacgggtcctgtccagcagcaggttaccgctctcccgacgcttcttcatttcactcatacgcatctgaccacacatagggaaaccatttacagtactaatcgaaggaatcatacaattgagtggcaaacaagctctcaggatactagaaaatatcgatagcgtgcactagtgcacgaccactcacctcctccgacaaggcagtttccagccagttacccactttcaccccaggaccatacattgctctgtagttatttgggatgttgggagcatatccagttacctaatcagtccgtccagtgtcgccggtggtgtttgcttgtcgtgtgctctggtttcctagtgacaacccggcaaccacctactacgatatgttccctcaaaagatcaaagatagtttcctgctacgagagccacacacatagccttacccaccggcgactaaccgagcataaaatttgcatgcgccgctttggtggcggcttcatctttgatcctgtcaaagaggcgaaaataaattgctcaattatgaaatattaactgcacacgaggcggccgaggagccgacgagtctcgggcgcaagttaattactcatttgttgattgtcgactgtggttaatgaagtatccaactaattacatgtcgggacgggccgagagtgcgcatgtcatcaggcgttctccgaggaattcccgttcatattgaaaaatgccgctgcggaaattgaaaatgccgcgggcatctttggtccgcttttccgccagctgccgaggagccaacgacttggagcccacaatttattacctttccccttgacatcttgacacaatgtcgccatcccactcggcaccccatctccaatatagtggctcgagtttcgagtagtttccgtggggctctgaaattacccgcattcatcttttgacagtggaaactcatcgcactggcgtctaattagattatttgtcagttctcctgctgaatggttagttcagtcagctcatccccaaatcttcaggattccttctccaatggcccaacaccagc

SEQ ID NO: 38894 - DNA, 774 bp, DROSOPHILA
atgaagaagcgtcgggagagcggtaacctgctgctggacaggacccgtgccgtctacgaccgcttctaccagggaacagtgctgggtccgccgcaggatgttctggccttcggcgtggtggtccagatccggcccgtgaagatcggtgtctgccgccaacaggtttcggatcagaacctggtgctttcggtggtaattactcaggagggactgcatcgcaactgcaagaccatcaacgagatgtgtgatcttacggtggcaccttcgccgcgtcccgcgttgcgcaacagcttcagaatcgtcagtccgaacgaggatgaccgtaccggtcagtatctggcctacggcgagaagttccgcctgcaagccctggagcctgctgatgagcctatgtatgttttcagcggtcccaagaggctgaacctctcgcttcccgtggagaaggcgttctttacaaccaaaaacggcgaggttacacttccactcggcttagtgtcccataagaattgtggcccctctgcccgtgtgcccacttcgcacactcactttttctgcgcccacaaggatcccgatcttcgattcgaaagcgaaggcaagaccataccagtacacaatccgcttgtcattgttcacgcggttaccaatcgaaatttggctgtggagaatgttttggccaacaccttgtttggccccgagttccaggtgtccgtgcagacgtacaagaatgtgtacaagcgcgagacatggaagaacctgtggaagttcacatattga

SEQ ID NO: 38895 - protein, 257 aa, DROSOPHILA
MKKRRESGNLLLDRTRAVYDRFYQGTVLGPPQDVLAFGVVVQIRPVKIGVCRQQVSDQNLVLSVVITQEGLHRNCKTINEMCDLTVAPSPRPALRNSFRIVSPNEDDRTGQYLAYGEKFRLQALEPADEPMYVFSGPKRLNLSLPVEKAFFTTKNGEVTLPLGLVSHKNCGPSARVPTSHTHFFCAHKDPDLRFESEGKTIPVHNPLVIVHAVTNRNLAVENVLANTLFGPEFQVSVQTYKNVYKRETWKNLWKFTY

SEQ ID NO: 38896 - DNA, 2670 bp, DROSOPHILA
gatatgatccaaactctgacaaccaccagataatgaagagatatatgatttatgcagcacagctaagaagtttgaaataaatgcagtactcataaatagtttcccccttttggatgaatgaacaaaaccacaattttctggcgttaattgaaatgattgcaccttaacccgcgtcgaacgttaaaccgattaaaataattgcatcccactgccacagcggaaaaatgcaaaatttatagagcacttcgaacggtaattcgaataaatcaatcgaaatagccgcaaactcaaatgatgcatgaataaaatccaaaaccgctcggcgtgccaaacaatatttgcagatgcgaatcacctcgaggtcaaagtgcacgcatatgtcgatgtctgtgtgtgtgtgtgtgtgtgctcttttcactttggcctatgacctaggtaggccagaccagaaaccgccatgccacttgaaagcaaattaaatagaaaattgagtttttcggaaagtcatcccgaaaatggttgtgaaattttatacataattgaatttctggtcaagcactagcactctctcacactaacgtacacacacacacgcgccgagaatctctgcatacaattaccaaaacctaaacacatagacagctgaggtcaggtcagcgagggattgctgcagggggctgggcggggcgtggcctgtggccatagctatagcaccacacgccaaacaatcggaaaccgaatgtcatcttcaatttcaaattcaattataaaacaaattggtttgagagcaaataagtactcgcacaagcagataaattcgccagttggaggtgggtggttggtttatggtggtcgagatggcggggactcatcctcgaggcgacatcaaacggcaaatccattcatccactttgcaattgtgtccggtgaaataaatgtaatgaaatgttaacaaatgacaacaggctggcaaacaagtagcgaaaaccacaagggtggctcatcctcgaggacttccgccctggacgtcctgaacgtcctgaacgtcctttacatcctcgccgcccaacggcaaacggccaacgtatcgaattagttcgatgagatttattggctcaagtcccacttgaccagcggccagacaattatggattagagccatttgttttggctgcgccgggattggatgtttcacatggtcacatgacagcgatgatgtgccgaccatgattatgcggcataatgtggcaccgattttcgacgcctttgattgcggcatctcgatttcctaaaaggtatccgattacctccggcccacgtccacgtccacgtccgcatccacgttctcgaccaccccatcagcaagtccaccccccgttggccctcgagctgtgtccttggacaacccacgcatgtcatcgccaggaacggccctcgtcactggtccttgggggaaatttgtcagagcatcagcagcgttaaggtgccaattaagggctttttagtatcaattacaaaatcgcacgtttccacaccttcatcaatgtgtggggcgatttccttgggggtccttcaatgggggagtgctcgtatttcgttgtggccaccgacatgttggtcagcatgcggatgagctccacctccgaaatgtccacatccccacattccatctcccagctgccaactccttgcgaaattgttttgtggcattgtctttatcgtcctgtttgctggttcactgttttttctgctctgctttcctgcttgtcactcggtctttgacagcgtcattttgccagtgatttattgtcctgtcgctggtaaattgggtttgtcattaaagttgctggatttggcaatggcataatcgagagattaccaactcctgccatggcaagcaatttgcggatgttcgatttgatttcctttctcagttcttaagtggaagccagaggaaagtgggaaaattgattggaactgcagcaaaggatttatctgttagcagtggtcatgatctggaacaggttaacaaagtattatatgttggtcagaagatgacttttattaccaccattcaacatttttacatcattcttagttcattaattatctagtcttatgtccaacgtttatccatttcaagtccttacgatgagtaacaacaaatcaagtcaattgctaactcttccttttgatgttttgatttgcgtctgtttatatgacttacgaacgaaattttagaaaaaatagaaaagctacgttataaagctgcaataggaacagtcagaaatttatgtaaagtatgtcgtattttatcattactataatactatattatcttcttttgatggctgtagaattatttttattcttggacttacttagatagtattttatgccataatacatatctttaaggtgtactgctaaagctacttggtagcctatttggtgactccgaccaaatgtagcaaaatttcttacttaggtaaacagtctgaaaatgtctaaaaagtgtacttaaattgacgctcgaccttttgtcacattttctcaggctgctacttagtcacactttcacacatgcgtctgcggtttgatccgccgctcatcttccccagctcccgactcggtcggattttgagtgggattgcgactccaggtggcact

SEQ ID NO: 38897 - DNA, 444 bp, DROSOPHILA
atggaatgtggggatgtggacatttcggaggtggagctcatccgcatgctgaccaacatgtcggtggccacaacgaaatacgagcactcccccattgaaggacccccaaggaaatcgccccacacattgatgaaggtgtggaaacgaccagtgacgagggccgttcctggcgatgacatgcgtgggttgtccaaggacacagctcgagggccaacggggggtggacttgctgatggggtggtcgagaacgtggatgcggacgtggacgtggacccaaaacaaatggctctaatccataattgtctggccgctggtcaagtgggacttgagccaataaatctcatcgaactaattcgatacgttggccgtttgccgttgggcggcgaggatgtaaaggacgttcaggacgttcaggacgtccagggcggaagtcctcgaggatga

SEQ ID NO: 38898 - protein, 147 aa, DROSOPHILA
MECGDVDISEVELIRMLTNMSVATTKYEHSPIEGPPRKSPHTLMKVWKRPVTRAVPGDDMRGLSKDTARGPTGGGLADGVVENVDADVDVDPKQMALIHNCLAAGQVGLEPINLIELIRYVGRLPLGGEDVKDVQDVQDVQGGSPRG

SEQ ID NO: 38899 - DNA, 2237 bp, DROSOPHILA
aaattagcttggggtgcctattggatacatgggtatacacccaaggacataacactagatgcgcatttacatacataggtatcgcgcttatttgcatataataaattggttcctaaaaatgcaaatcctattttattattttaacataccgttatccttttaaaactaaaataaaagtttaaggcatgcacttgataactttgtagcaaggtcttaactaatacacgcgatacctaaacacatacatgtcattagtctaaacgaactaaaataaattgctttacccttatatgtagatagagtataaataagatgggtacatcgagttgactttgaagcagaatggagcggggtgcattggctaatgctcgggatctttagacttaaggctagaggacagtggtttctcctttatttcagttttgggctggttgagtgtgtcgtggttgtgttgctggttcttgataatcagctccccagtcaccgagcacgtgataattcgagcagcgcagcgcatgtatcgattccgagcacaaagccaatacgttttggagccccgcgaattgttgcgataatacctggaatggtaaaattttatattatattatttataatattaataatacgacagactcactcgtagccgcccatcagcagtttgggctttcctttggtgcccttgacaatcattatacctcgcttgcgtattatatctataagtaaaagatcaaatgaatgttaggtaaagatttacaactttaggggtatttaatagtctacatatcttacacgcacttttatttctatttggtttttgcaactttactatgatattaaaaatccaattaatggaatacattcacagccctaaaataccactaaagttaagctccattgaaattttgttcagcacctgctaagctttaacttgattaataatgatttattgtataaaaatgctttaagatttattcaacaggtatttgtatgttttcttaggtcacaggtgcgagtgcttcgcatatttcagtcggtacacctccagtccattcttctgcacgtgggtggtggccctgaccttgcagttcgaacttcgatacctggcacaccgccagttgatgctgctcttcagcttccgatccatgacaaactcatgtctgtcgattaccagcttacgctttttcttccgggtgcaactaaaagtggccaaatgtgaggtacctgcaaaggaaagcataagtgttaatgatatatacacacaaagttaagtgagtattaaaaatataggattaggcttgaatggattatgttttacataagtttataattacatgataaaagttacaatacaattattacgcacactttcaggttgttttttagggttttaattgagaaaatcaaacgtactaaaaactttcgttcaacgttacagcaactcagttttaaattattttcgtagttgtatgcttataataactaagtctatgaaaatgaataaatatgtccatttatccattttcttatgtacataaacgagttgatcaaaattaattaataaatgttttcctttcacttaactacaattatggaaagcagagcactagcacagctctaaggtataggttttatttagggtttatcaaaactataagatatctcccttcagcattacaaaatcaaaactgtttggaattcataaccatagccaaaagatggttcacacattattcaattgcagcttcatgtactgctttcgctcctggtcgagtggtgaatgattgtgcgttttgatgtgcactatttttccgtttagcacatggagccgaccatggcacttggtctttgtggtgtactgtgtgcagcgccagtaggtttttccatttatgcacttctctcggatgaaggggaacttcttgtgcaacagcagcacgtggcccttctggctgacaacgtactcgaattgtttttctaaaaagagtggaaatgtaaaaggttagtatgggttacctaatgtagacacaagcaatggcaaatggcaaatggcaaatggcaaagaagctaataaaaaagttttgccaatcaatgtattttctttttatttataatgattgaatgctccactgtcgctcgtctctaaagtacaccttattccaactacagtatccctaaacgtcgtgagtaagttcattgagctcctcctcgtgcagatcgaagctgacgccgccagctccctc

SEQ ID NO: 38900 - DNA, 237 bp, DROSOPHILA
atgctttcctttgcaggtacctcacatttggccacttttagttgcacccggaagaaaaagcgtaagctggtaatcgacagacatgagtttgtcatggatcggaagctgaagagcagcatcaactggcggtgtgccaggtatcgaagttcgaactgcaaggtcagggccaccacccacgtgcagaagaatggactggaggtgtaccgactgaaatatgcgaagcactcgcacctgtga

SEQ ID NO: 38901 - protein, 78 aa, DROSOPHILA
MLSFAGTSHLATFSCTRKKKRKLVIDRHEFVMDRKLKSSINWRCARYRSSNCKVRATTHVQKNGLEVYRLKYAKHSHL

SEQ ID NO: 38902 - DNA, 2329 bp, DROSOPHILA
aagaggcaactttttgtagccactgtctgaatgcaaacgaatgcgttcaatagcagattaatatgcctcacttagggacacatttcaagtggcccgaaagctgaatcagctttcttgtcattccacacttcgcactctttgcttgaaactcgatttgtataaacaagacccacaaagtttacttaagaaattagcaggcccgtcattgtgtgcggtatcaatttgagagctggccatgcaacaaagggtcgttgaaccaataaagaatgtatctgtttataaaacagtttttcgtggccttgtaaagctccaattcccatactcaatcacttcatacggtttttataaagaatgaaatccagtcgaacaaggaattttaaattctttttacgtagtattgacttgcacggaataggggatttttgaaaagtagcatagatgataggtaatggatcaaaaaagttgattcattattgttatttaatacctaaaagagaatttttgatagagtcccacaaaatacaccttagaattctaatttaaaaaaaatacctgggagtattaaactagaaagttgcaactctgagacattaattcttatacgctaaataaataataaactgtaaaaaagctaaagaaaaattagcttggggtgcctattggatacatgggtatacacccaaggacataacactagatgcgcatttacatacataggtatcgcgcttatttgcatataataaattggttcctaaaaatgcaaatcctattttattattttaacataccgttatccttttaaaactaaaataaaagtttaaggcatgcacttgataactttgtagcaaggtcttaactaatacacgcgatacctaaacacatacatgtcattagtctaaacgaactaaaataaattgctttacccttatatgtagatagagtataaataagatgggtacatcgagttgactttgaagcagaatggagcggggtgcattggctaatgctcgggatctttagacttaaggctagaggacagtggtttctcctttatttcagttttgggctggttgagtgtgtcgtggttgtgttgctggttcttgataatcagctccccagtcaccgagcacgtgataattcgagcagcgcagcgcatgtatcgattccgagcacaaagccaatacgttttggagccccgcgaattgttgcgataatacctggaatggtaaaattttatattatattatttataatattaataatacgacagactcactcgtagccgcccatcagcagtttgggctttcctttggtgcccttgacaatcattatacctcgcttgcgtattatatctataagtaaaagatcaaatgaatgttaggtaaagatttacaactttaggggtatttaatagtctacatatcttacacgcacttttatttctatttggtttttgcaactttactatgatattaaaaatccaattaatggaatacattcacagccctaaaataccactaaagttaagctccattgaaattttgttcagcacctgctaagctttaacttgattaataatgatttattgtataaaaatgctttaagatttattcaacaggtatttgtatgttttcttaggtcacaggtgcgagtgcttcgcatatttcagtcggtacacctccagtccattcttctgcacgtgggtggtggccctgaccttgcagttcgaacttcgatacctggcacaccgccagttgatgctgctcttcagcttccgatccatgacaaactcatgtctgtcgattaccagcttacgctttttcttccgggtgcaactaaaagtggccaaatgtgaggtacctgcaaaggaaagcataagtgttaatgatatatacacacaaagttaagtgagtattaaaaatataggattaggcttgaatggattatgttttacataagtttataattacatgataaaagttacaatacaattattacgcacactttcaggttgttttttagggttttaattgagaaaatcaaacgtactaaaaactttcgttcaacgttacagcaactcagttttaaattattttcgtagttgtatgcttataataactaagtctatgaaaatgaataaatatgtccatttatccattttcttatgtacataaacgagttgatcaaaattaattaataaatgttttcctttcacttaactacaattatggaaagcagagcactagcacagctctaaggtataggttttatttagggtttatcaaaactataagatatctcccttcagcattacaaaatcaaaactgtt

SEQ ID NO: 38903 - DNA, 270 bp, DROSOPHILA
atgattgtcaagggcaccaaaggaaagcccaaactgctgatgggcggctacgagtattatcgcaacaattcgcggggctccaaaacgtattggctttgtgctcggaatcgatacatgcgctgcgctgctcgaattatcacgtgctcggtgactggggagctgattatcaagaaccagcaacacaaccacgacacactcaaccagcccaaaactgaaataaaggagaaaccactgtcctctagccttaagtctaaagatcccgagcattag

SEQ ID NO: 38904 - protein, 89 aa, DROSOPHILA
MIVKGTKGKPKLLMGGYEYYRNNSRGSKTYWLCARNRYMRCAARIITCSVTGELIIKNQQHNHDTLNQPKTEIKEKPLSSSLKSKDPEH

SEQ ID NO: 38905 - DNA, 2663 bp, DROSOPHILA
ctgttgaagatttcattcccgactctcgatttacgaatttgacaaccaactggtgatttacttattcaacggacaaactcaatatacactcccaaaaaaaaaatgtgtacaaaaaacactatacaattttaataattttttattactttgggagaaataatactgctatcaaagaaacttcagtggtgctttttatttatatacttttagtggttaggtctttagcttttattaattttcagaggaaacgctttttttttattggtgctagtatttttcgccacagtgtatgactgcaatttttaatttaatacatcgcaatttgaaaaagaattgcgcgctaatctctgctatgtttttagtattttcgcagcctattttgaagggatgtgtatcgataatatcacagaatactttattatcgactacaatcgaatatgtcggtgtagaaatagcttaagatattgacagtaaaaaaaatgtaaaatatgaaaaactttctttgtatggcatactggtatactgtacgaaacggcgcgcctttcaaatgaaatgaccagtgacatgtgaaggtattgccatggataaatacatttgatgtttatctaaccccactgttgaaaatatgttattactagtcagaatcgttcgtttcactagcggcttacatgtacatagatgaaatgaatggaaagtacaattataattatatatcattaattaggaacgtgcaaacattatgatggctaatatagtgtgactatacatttaaagatcagattaatgaaaaaaacccatatcttccttgtagattcatatcatacgcgtgtcaaataataattattggcatttttatatatttcacgtgtgtcgcttgagtgctatttaaggttaagcgagacgcaaaatcaaattactaaaaaagtgaaatatggggtgcgaaacttcagtattatgcacgttgctgattttcttccaaattattggtcggtcatttgaaatgagccacgattttgtgcccattaaagatgatttactaagtaagtgcgaggataagccagaaatgggctatttggatgcattcgtggatttatccaacttcagtcgcaaacgaggtcctggtggagttaatatatcaggaaacataacaacaatatgggatgtggatccatcggatgtcgtcgaggtgagaggctttaatgcatttaaataaataaacttcctccccaactaactgattttcagattgatgttagcatactgaagtttgaaggagataagtggataccaacaataattaaagggaatgttaaggacttttgcaagtccttttacgacaagaacactctttattactcctattcgacaaaacacgtggttaacaagaaggaagcgaaggaaaaatgcattaccactccaggagtaaagatatacaccacttaatccactataactcaatccatttacatacatttaaattccttttttctaggcaattttgctgtgggagccctatctcctgaaaatatcattcagctatgcagttcccctgaatgtggggcggcacaaggccgttcttatatttactgccattgacaaagccggagttaagcgtgatagggacatttgcatggaaatcgtcggtgacattgtaaatgcctaatcgtcatggacctatttctctgaattcgtttaaacctaataatgattatgattttattgtttctcaacaaaggttttggtggagggttaatttttctgcaacaacaaattacttttgttaatttattaataaacaaaaaattaaagaaatgcttaattcctttgttcttgtgatgtgattagacaaatgttctaattacggaaaaggtacattttaaaaatgctctgatctttctgaagatgaaaacttttcgtcaagaataggttgtattattaatattatcctacatataccttattgaaattaaaagaaatcggtaaataatagcctcaccactaggtggagctcgagtgctatctctaaagcagttctcttgctgcttgccgaagcagttgatgcgctgcttgtcgaagcagttgatgcactgcttgcacattgcgctcgcacagtcatcaactgactaccgggtatatcctcttgtattgtccacctccatattcctcttgctagtagtagaatagggtatattacattcgttgtaaaaggtaaagggagcgtttccaacacattgaacttgttcttggtcgtaattactccccgaatcaatctggccatgaccatctggccgtattatgaatccgtcaatattgtactgatataactacacatatagctacgataccgttttacgtaatacatctaatctgaatcagaatttagatagattacttaatgataaacttacatttttaaaaacacgcgagattgctgatagactagatcgcaatctcaaacaactttaaactgaaatcgatcttataaagattcatatcattagcgtgagatagcccaacttcgatatatcggattatataattgccacagcttgtctattaaagcggtagagtctcaattgcaacgagcatttcaaaaatagcgaaacatggaccggcaacaagttacactgctgaatatccttatatccctaacattgcaaata

SEQ ID NO: 38906 - DNA, 534 bp, DROSOPHILA
atgagccacgattttgtgcccattaaagatgatttactaagtaagtgcgaggataagccagaaatgggctatttggatgcattcgtggatttatccaacttcagtcgcaaacgaggtcctggtggagttaatatatcaggaaacataacaacaatatgggatgtggatccatcggatgtcgtcgagattgatgttagcatactgaagtttgaaggagataagtggataccaacaataattaaagggaatgttaaggacttttgcaagtccttttacgacaagaacactctttattactcctattcgacaaaacacgtggttaacaagaaggaagcgaaggaaaaatgcattaccactccaggagcaattttgctgtgggagccctatctcctgaaaatatcattcagctatgcagttcccctgaatgtggggcggcacaaggccgttcttatatttactgccattgacaaagccggagttaagcgtgatagggacatttgcatggaaatcgtcggtgacattgtaaatgcctaa

SEQ ID NO: 38907 - protein, 177 aa, DROSOPHILA
MSHDFVPIKDDLLSKCEDKPEMGYLDAFVDLSNFSRKRGPGGVNISGNITTIWDVDPSDVVEIDVSILKFEGDKWIPTIIKGNVKDFCKSFYDKNTLYYSYSTKHVVNKKEAKEKCITTPGAILLWEPYLLKISFSYAVPLNVGRHKAVLIFTAIDKAGVKRDRDICMEIVGDIVNA

SEQ ID NO: 38908 - DNA, 2745 bp, DROSOPHILA
accaaaacgaaccaaacagcgagtgtcgtcctccgtattatgcaaaatttctgcgacagagttccacactgaaatttaatttcaagagagcgaactcaaaagacaatgaaacgataatttataaatgctccgatgatcgtggcttagtgaacaaaagcagcactcatttcgccatgcccgtaatgaccaaagggagaaagggtccaggttccaggatccaggttccagaaatgaagaaaaccgagctccgaaaaccgagtgccgaaaacccattggctgaatggagcgcgccagagcagcaagtggcgaccccaacctaccagaatcccaacgaaatgcagtcgttgtggcaaccagttgagttgcaactgccactgccaatgccattgctaaatggtgggtttttggctttggcattgggcagtggaatcgcatcgaatcgaatcgttttggttttcagcatgatttctcaattgattgcaagtggcgttggagtttttgggctcggttttggtttcgtagctggagatgggagccatgtcatgcctaatgcttattaccaacactcggacgcttggcaatttatgtagatgcaagtggagatggagacgcagctgcggtgcggattcagctgccaaagccgcttatgctggatgcttcttggccaactgcccatcgggcgggcaatcgatgtgttgtttctataattttaattggagctcctgcgcccgctcgcaacatcgagatcccagcatcggtccgaggagggctaggaatttttggcaatttccaaaacaaatattgctcgaaaggatctgcttcggcatgcatgaagtggtggcttcgtactcaggtgaccgaccggctgggccacctaccaaaatagtttagagcattaaattgctttcagcactgccaactgacacacagtgcatggtggactttagatatatgcacatacatccaagtatatacatatatgtattttgggggaggaaggatggagcatggagcacaaactgtgagcactgctccgtaaaaatgttatgtaattaaaatgccttgcagatattttgctcaaacattttgcggctgcttttcgcttttgtgtgccaaaatattcctttccaaatattttgagctcccccttttatgagcagccggcgctcgcagccccaactttctcaatggaatgccccaaattctggcaagctttcaccactttccttcatcttggtgcatgcagcttgtacatggcgaaaaaagtgcagtcaccgtatatacaccgtatacacctttattacccaattaaatcattcactatgtgtagcaacatgcattgtcctcgaataatctcaagtgtaattgagtttcggaaataataataaacaagactacactgagtattaaaatacatattaaagtatataaagatacttttacaagtatgaatccatttgtagaccacgttaacacttgatgtcttatttatctttcgcagacgtcacaaatctggactacgtaaaggtgaatgccgaggcgggcaagaacgtgaccattccgtgtccgggggtcaacgagcactcgctggtggacacgctcgtgtggaagacggcgtccacgacaatcgcacagtttgccaaccggatacccctgctccacagtccgagggtgagtaaaaggatataatagactaagaaaatatcaggataaatatataactacacatataggatgcgtactgaatctgcataccttaaacgcttgtcaaatcgaatttattcattaaagcggctggattcattgccctttttgcaattttcgcccagaaatggccctccagtgtcatatcagaattcatttcaacacttaggagcagcaaaggagctggtcacctccttggaaggacgaacatccctgatatataggacccttcgttcagggtgcaaaaacgaagctgttaaaataattgatggccggttgccgggcggctgtttgaactttgccatccgccaaccgtcgacgtcggcgatgagtacaagaaagtgcagcgaaagtcccgacaactaagtggccatcaatggtggcaagatcgggtacgaaagcggggcagatcggggaagaccccgggtcacccaagtgcagtgcagccggcgcggctaatatattttaaatgtttgatagttgcactaaaacaaaagcgacatggctgcgaaaaaaaaagtgttcaagtgcctgccagatggcagaaaaaggagggccaaaagtgattgcaatggccttaaacgcactcggggggccattgaggcggcgcaaacagaatgatgaagttgccccttcgttgggagcaagatgatggagaatgctgggatgtctgcactgtgggaaaaagttgagagggaaagttgagatttcagaaaagaaattgtatcaaaatttaaacagagcttagaaacatcaatctgaagtgatattttttcattaactggtacctgatttctaccagtgcattgccaagctccacccagggctgcagaagaggggcacagccagctatgtgttaaatggcggactgggacacttgagctgcaggcagccaaagttggtcccaatccggcttcggcgcccggctcgcatttcttggacggaagtttgctgcaagtgcggcgtctgcttcttggccaggctattatgtgtattaaaagtttttcaccttggcacagtggctgcttcattttattacag

SEQ ID NO: 38909 - DNA, 234 bp, DROSOPHILA
atggagcatggagcacaaactcaacatgcattgtcctcgaataatctcaagtacgtcacaaatctggactacgtaaaggtgaatgccgaggcgggcaagaacgtgaccattccgtgtccgggggtcaacgagcactcgctggtggacacgctcgtgtggaagacggcgtccacgacaatcgcacagtttgccaaccggatacccctgctccacagtccgagggatgcgtactga

SEQ ID NO: 38910 - protein, 77 aa, DROSOPHILA
MEHGAQTQHALSSNNLKYVTNLDYVKVNAEAGKNVTIPCPGVNEHSLVDTLVWKTASTTIAQFANRIPLLHSPRDAY

SEQ ID NO: 38911 - DNA, 4054 bp, DROSOPHILA
atgactttgccgctgcacagtgaagaaaattagtccttgaaattttcaacataattggattccagatatgaaagttagagaaccctaagcgattgcagttgttttgaaaatatataaataaaatattttaaaatatatttcattttgcttaattttctatgcctatttttctttcatttctcgcagtgtatgccgttcggttgggtgcgaaattccatttatgccgcacgcacaatggaatgcgacccaagctgccgaagctgcaacacatgcggttacaaattagtcaatagttgtgtatagctgtgtccccgtcttccgagctcattaaggtcctttcggtcctcctgcagggctgtgcgcttgtgtgtgtgtgtgtatttgtgtgcgtgtcctgcggtcgacggccaagttgccaatttgtataaattaggcctgcggcatgcataaattaaccaacggcacttttcatctggccaaatcgcaaatctaagcagcggaaaaacgagaagttttcaatttgctgagcaaactttggacgcggcatcaatgtcaagcccaaagacacaaaatatcttttaatttatttataaattcattgagctatgcgaagaatttcgcccatctttcggtcctggcaaaatgccagctaatccaaagccaggcgcacctgctacactcagaaaaaggcagggaaataaattaaatacttgaaactacttaagacatacggaactagacattacttataatttctatagaagcaaggtagacgaatttcgttttccggtacttctttccctttgaagtactagtttttgtccgtgtatctgcgcgacacacgcatcatttaacctgcaagtaattcccgtagacaaggccaaaaggaagatggttgcgagtagaaaagccgtccatagaaaatgtaggcgcagatgccggaaacccacgcccactctaccaaacaaaaaaaaaaaacaggccgtggcacttgcaacttatgttgcgtgacagtgacaacttgacaatgccacagacaacgttccgctttacatgacaggtcagagagttttcggttgaaacttttgcgcggcgtttttaatttcgaatttttgagcattccgccgagcaactttttgcagccagccaaagtttctggcctatcctgggctcattctttaaccgacttaatctcttacagctcccacgggcaagcccataccgacgacggcccacaacacgtcctccacctcggtgtacatctcgtggaaggcaccgccgccggataccatactgggcgaattccttggctaccgcatcacatatcgacctcgcgatcgggaccccaacgataccaaggaaatctatatacgcgacaacaccgtggaggtgagttatttagttgtacgggccaaagataattgaatttcacgttttctgacacctcgccatattgcaaatgcaagcgcggaatcgaagtgcactgagaaaaatgaatttcgaatataaattaaagttttaggttgaacgtactatgatgagtacttttaagcatgcactcatcagcttatttagaatgtgcttaagtgcctttgaaatataattgctcttcgtaagcgagcgtttttgtttgcagtgcatgaatagaggggcaacatttcgttcgtgttccgcctgcagcgtcattcaatttcgctttggtttcgtttcgtgtctgttcgctttgccacgtgcatatcgttttctttgcgacaagaactgccgggttttcattcggtcttcgaatgaaagccggggttttggcttaaagttggcctaaaatgtgtgtgccttcagcctgtcattcggcggcttaaagtcacatcagcggcgtattaaaaagtaatttacacctggcgaaaggtgaaacatttcccacacacctcgactgcgagcgggcatacaagtgttttccgtttgcccatctgtcaaggtgttaccatatctcgtcgtgggagcccgctatcagtggcaatttgttagcgattagttctcagctggggctagtctgttcctgtctctagcccaaggaccccaaacagtgggtgtgtctacccagctccacgggccacatagttgggcacgcaagttggctaatgaactaggcaattggggaaaatggtgggaaaatggtgggaaaatgtgggcgataacagaacaaatagcttgggaatacctttcaatgagaggcatgtttggccgctttatttcagtttgataaattatactttagctatctgtcaatttgtaaggatatttgctttaaatggcagcaaacttgaaatcatgattagaaaaattattagttaaaggcaaaagtactttttaagctacttaaactcgagtgcttagtgctcttctcgaagaattgccgccacctcaactatttcttgcctttcgtttagatgttctaaattttaacgatttctactgccatcacctggctttggatggagtttattccaccccagggtgcaatccgaatcgctggccattccggaggctcttcaagcgaagcactaaagtcgagcactgggaatgcatttccgaatttgcagctgcattccggatgcacttgccagctagctgcaaggggattggcttaaatatgcagaaattattagcgataatgctcacgtacgacactcggcgcggcggactttccaaaaaatagaagaatcacacacggctgcttggaggatggaggtggcctacgaaaggggcggggagggggttcgcttgattgccacaagcgtggcacgcttttgtgctcgagtgcatattttgtccttatctggacgcagctacccgtctcactctgcaagtcctttccatttttctctcttttgcatgtcgctggcatgttgaaatattatccttgcaggcagaaacgtgcgactttagttggacttcttcttttttcgcagcggtaaaaacacgcagaaaaaaattcaaattccaatttctgagaagacttctcttgatgtgaccaaaaatattcatggcacaatttagcgagtaatcatagtcattatagctttcttctaatcgtccgaaataaatcatttctcgaacgaatagcgccacattttatctccgcgtgcatgtattttttttgtgctcaagtcactttggtggacttcaggacatggctttgtgttattcccatatcgcagcatcagcattcaggatcctgcggcttctgtcgacctgccacgcccctatctcgccgccgcctcccatggccagcggcattcacatcgagctgtcacgtgtgaggtggaaagcgagggggcgttggattttccagcgctcgcccgcagggctaaatttgccaattttctaattaaaatttctgcgccgtaaagcataaatttcgcaactttcacgcagataaaagccggcaaagtcgagtcacccgaaacctcaaaggaagttgctccgcaaaaaagtacagaaaaaataaaaaaaaaaaatataacaaaaatggaggcgaaaaagcgtagtccgacactgatattgttgatgaacaagtgggaaaaaatactctgcagataaaagagcaaattcagttgggaaaaattgtgaggtttttgttagaggcattgcgatttgtttgacaggcgaaattttcgatctgtttgtagttctaaatttcatccttctaccagctagatgctcacttcgtttccagttctctagcactaattaacgcagagaatatttagatgcttataccccactgcttcacactttgccaacttatgcaatatggcaggaagttggcaactttatcaattacattatatcaattacgcggcccgccctctggcgtttccaactttcagctgaccataaaaataaaagcagttgtaaattttcggcctcatttactggcgacttaataaaatggcattatatgaccgcccaccatatacaaacactaaatccgagcgcttagttttatgcacgcagttcttagcacagtggcggttaaagttatactgccagtcgg

SEQ ID NO: 38912 - DNA, 312 bp, DROSOPHILA
atgttgcgtgacactcccacgggcaagcccataccgacgacggcccacaacacgtcctccacctcggtgtacatctcgtggaaggcaccgccgccggataccatactgggcgaattccttggctaccgcatcacatatcgacctcgcgatcgggaccccaacgataccaaggaaatctatatacgcgacaacaccgtggagttggacttcttcttttttcgcagcggtaaaaacacgcagaaaaaaattcaaattccaatttctgagaagacttctcttgatgtgaccaaaaatattcatggcacaatttag

SEQ ID NO: 38913 - protein, 103 aa, DROSOPHILA
MLRDTPTGKPIPTTAHNTSSTSVYISWKAPPPDTILGEFLGYRITYRPRDRDPNDTKEIYIRDNTVELDFFFFRSGKNTQKKIQIPISEKTSLDVTKNIHGTI

SEQ ID NO: 38914 - DNA, 2527 bp, DROSOPHILA
cagtggcggttaaagttatactgccagtcggcatataaactatttcggtattctaagaagtatcttgaagtagaaggtaaaagatacgaactgtttagaaacatttgcaaacatacattgttaattgtctaagaactataatcttgaccgcagctgtggataagatatcacacttttggcggaaataactgcgactgtggctggcgccgtctgaaaagccgaaagcagccacttaagctgttggcatggcagtcaatccgctgctaagcacatgcctagagttcgcacagtcgagaacccgttggttttgcggtgggaccgcagacgggctcgcacacacacacacacacacacacacatgcacaccagcaggcaaattcgggcagtcggcgctctaatgtatgctacataattttgttgcccaaggcaactgaccatttgcgagcacatagattcgcattcacatgtgcgctgctttgggccattgcgagccactctaagtctgcggcttgttttatggtttggcactgcttttgacctttggttaaaaccttaatcagccgccgttcgcgaaattcacatacaaagccaccggaacggactccattatggcaaagtccttggcatgcacgcacagaaaagttcgagaatatgaggactttaaaagtatatgtccttggtgttggtaatcaagtcgaggagtgtcataaatactcatttgatttgaatgcgtgtacttcctttgaatttctcagtaagagacaagttattacacaagcctttttcccattcatgtcttctttttcgcactgtgtacgctgtgactgtatgtgtagtggcaattaaggcaaagactactgctcgttgcccaagcaactcaatttccttttgcaccgacatcgcagcactgcaaatcaattttaagtgctgcaattttcatatttgccaacggcaacgcacaaaagtatgcaacgcgcaatttccgctccaagcatgcacaatgctgatgggcaaatggatgagaggggagttggcgggggttgtgcgattgggtggtgctgcagtgggtggcgttgctgctgctgctgctgctgctgcagagaagcacttgctgcaagtgccccactttattttgttaagcgccttcgatggccaacaaacgaaaagtcctttggtgtgtgtgcagccaaaaacaaaataacatcgaaatgggttcttaattggaaatttttccatagatttaatacgaaaatttgaagttatggcatagaaagaattaataatcggaattcaaaaagaattccttcgcccttttagtaacttatagtataactaaagtaattatatatgagcttctacacaaactaataatttaaatgaaaattcccccatctcttgcagagccatgaaattcaaaacctacagacgtacacgcagtacaaggtgacagtgcaggtgttcaatcccgagggtctgggaccggagaccaccatcctggtgatgaccgacgaaggaggtgagtggtagagtggcaggcagcacccttttgcggggcagaatgcaatgcaaattccccagatctcgaacaatatcaatgatgcatgccgcacagtgacctcgctggggaattcggcatgtcaggcatgcaaacgatggccacaagtcaataagtcgatcgccccaactatttttcacatatctgggacccgcaaaattccaaatattacggcttattgacatgccagacaagtgaccaatccgaccccgaaaatgccagaaaaaatgggggggttatatggtgtgtatatcgcatatcaaatgcagtacaagatgcagatgcagcagcttcagaaataaattcgcctttgtgtgcacttttagtttttcagttccctgcaacatttccatggtttcacagatgcgagtggagggcaaagcagagcagcaactttgagattcgctcaaccacaaaatgcctctgccatgcaatgaagcaaacaaataaaagtttaactccggccagaggctaaggaaaatatgttgcaatttttcatatttttcccaccctttttgcccggatgaggaaaaagcatccagcttcttgcccggcatctcgaaatccgctacagaccgcagttcggtgtgcgaactggtattgaaatggtagaacactcggccaagcaaatagaaatagaaaataaatattgcttacttaaactttcgccaaatgctgctcagtcagcaacaaaaactgcccaggcatgtcctttctacttttttacttcggttcggttctttcccctttttcgtaccccctacttgtggggtattttggggtatactgctttaagaagccaatgaaatctttgagttactactaaaaatatagttccaaggaatgaaacatgctgtcataagtaacttgcttgccttcctagaaaaaatctagaaatacatcacaaataagaaataacaatcaagctggtttcgtagatacaaagaggggtatcaaaatcgttgctgtatc

SEQ ID NO: 38915 - DNA, 300 bp, DROSOPHILA
atgctgatgggcaaatggatgagaggggagttggcgggggttgtgcgattgggtggtgctgcagtgggtggcgttgctgctgctgctgctgctgctgcagagaagcacttgctgcaagtgccccactttattttgttaagcgccttcgatggccaacaaacgaaaagtcctttgagccatgaaattcaaaacctacagacgtacacgcagtacaaggtgacagtgcaggtgttcaatcccgagggtctgggaccggagaccaccatcctggtgatgaccgacgaaggaggtgagtggtag

SEQ ID NO: 38916 - protein, 99 aa, DROSOPHILA
MLMGKWMRGELAGVVRLGGAAVGGVAAAAAAAAEKHLLQVPHFILLSAFDGQQTKSPLSHEIQNLQTYTQYKVTVQVFNPEGLGPETTILVMTDEGGEW

SEQ ID NO: 38917 - DNA, 2348 bp, DROSOPHILA
acttttcgagcgctctaattgctcatctaattgtaattatgcccaattcgttcaagatgattgcttaaacgcaattgtgggtttcgttttacatttcctcaaatggagaaagaacattattactagctgttcaaatttaacagcaattttgagtttgtaacgaagcttttttctaagaagttactaacaattgttagcttatctgattagtttaaaaaactcctttttttgacgatagtgagcatctcttgaaatttaaaatcgataactttgcaacaacaacaactctttgggcgtcccttaacacacacacacactgtcgcacctgcccaaacacacacacatagaacaggttgcaacgcgcactgtaccagatataaacaaactataatgtttgcagctaccactttcgatgtccctttaagcagctgaatttcggttgcgcaaagcgtttagttgttcgctaatgctgtttctatatcacatttctcacagaattcagggataaacaggaaaactgcactgctgacacatacacgcacacaggcgcactgcaggcacacctacgtttatcgatatcgataggcgggcgaccgaagaagcgaccgaacggttgagcggcgaagaaacgactgaacgaccgtcgtttcgccactgcgttctgatcagaacgggccgctagtgctaacgcttttagccgtctggcaacgccgatcaccaaaattcaaatgggatttccgttacaagtgatctgtgtttaaaattttatttttgattattacaagttttatttaaactaaagcgcagtaactagacagtatttcatgactatgtgtttgagttatgttagaagtaaatttcccgagaactgggcctaatcaattttcctaataacttggagcgcatttgccaactaagcgaattccctgcacccactgtgagcgtataaaatcgctgtttgccggggtgaaaagcattagttctcccagtaaatccaatcatggcatccccagtagtcagcctgcttctcgtcgggatctgcgccctggcctttgtccatgtggctcggtcggaatgctgcacctcccgggagctggtggaattcaagatggacagaggcgactgcgaggctgtgcgtgcaatcgaaaactatcccaacggctgcgaagtgacgatctgcgccgatggtgttgcccagttgggcgcctactgcggccagggatcgtgcaacatcttcggctgcaactgcgacggcggctgtctgagcggcgattggtcacaggaatttgtgaggaggaaccagcagtacggaatccagatcatcaaagtcaccaggctgccattttaaccccttgcatcacataaacaataaagagaagctttaattgcatccagaaattactaattaattatgtgtattttattttatatatgcatgaaattgataaggttcccactttctaatcaaatgtaaacagttcaatctgattactaggaactattcttatttttaatcttgaattccattaattacgctattaactaaaactattatactaaaaaaaaaacaactatcatcaaaatctgagatgatatgggctaatttttgaataaaatccagtgctcaaatcataagaagtgattttttgtagtttctagcatttgtaatatctgtttcccaacgatcgaccacgccccctgggcaaccgcccctctgttggccgctcgccatgggaaaagcaaatgacgcctgcactcgcagagatcgccccgaataacccctccatatccacagatccacagatccccagatgcccatgtagccatgtactccgcatgtagtacgatcaactagccgagtgaattttggcataaaccattttccgcggacgcctgattttctcagttttctcagagttgtggagccgtcgagaacgcggagcattcgcccatgtaaagccgcagaatccgtcgattttcgccggaatttatcaatccgatttgccagtaatttgcaacagaataagtgaatttgccaagtgaatttccctagttttttttttcaacttgcaacgaaagtgctaaagttacgaaactgcactttccacgttgcacttgcaaccccaacagttttttccaccagatccaccagctgagggaaaactattaataaaccgggcgaaggatgaaacaaattcagatgtgacgcccatcctcgtcgaaaatcaaaagtcgcaagtgaacaatgtgtgtgtgttcactgagtttgcataattgtgaatttgctattttaatcgcctgcgggcatcaattaattaattaattaaaagctttccttctcgcactcg

SEQ ID NO: 38918 - DNA, 348 bp, DROSOPHILA
atggcatccccagtagtcagcctgcttctcgtcgggatctgcgccctggcctttgtccatgtggctcggtcggaatgctgcacctcccgggagctggtggaattcaagatggacagaggcgactgcgaggctgtgcgtgcaatcgaaaactatcccaacggctgcgaagtgacgatctgcgccgatggtgttgcccagttgggcgcctactgcggccagggatcgtgcaacatcttcggctgcaactgcgacggcggctgtctgagcggcgattggtcacaggaatttgtgaggaggaaccagcagtacggaatccagatcatcaaagtcaccaggctgccattttaa

SEQ ID NO: 38919 - protein, 115 aa, DROSOPHILA
MASPVVSLLLVGICALAFVHVARSECCTSRELVEFKMDRGDCEAVRAIENYPNGCEVTICADGVAQLGAYCGQGSCNIFGCNCDGGCLSGDWSQEFVRRNQQYGIQIIKVTRLPF

SEQ ID NO: 38920 - DNA, 5618 bp, DROSOPHILA
taaggtagaaactttagtttttcaaaaacaggggcctgggaattttagatatccccccaaaacccctcgaaaagcaacaactgcgctgccaactgtgtcagttgagtgtgtttgtatgtgtgtgtgtgtgtgttggccatgccaaccagcggcgaggtcgcaacaacaacgcttttggttggctattccattagcccaaaagccgagagccccaagcgctcacgcacacagcaagccgctgagcagttgagcagctgaagagcggcataaaaaataattgtgaaacaaaggcaacaaagaaaatgaaagaaaccccaaacaaccaccagaacagcaccacaccaccgaagcaccaccaccaccaccaccaccaccactaccatggcaattccctttgagaaccaaccagtgcggagtgctctcccgccacattactcatacgccgcgtcgccgcctcgagtgcacaattttgtatacagtaccaaattagatttgaaacttttttcttaattgccaaccctccgccgtcgcagccggcgtcgccgttggcgcaggcagcgacgccgacgcaggcagctgcggcgcacaaaggtggttgcaacactctcggaatcggggatatatcccctatatccagtttgcatgtacatgcccacgagcgtatccgcgcactttcaaccctcgtcagccgcttttgtattggtaaatgttgccgcttgccgccattgctgaacgtccgacgtcgagcgtcgtgcgctgcggccttttggccaaaagttgaatcagttgcaatcgagggctcactgtgtcatgtcgttagcgcgcgtggattgaattcgagaactatgcggatataaatagttaaacaataaaacaatcaaactacaagctaacaacaaacaattaaatactaatcaaataagctaaagtgaagtgtgtgctcagaagtttttgacctaacaactaaatccacatcgaggtttctgatcttcacgtcgaaatgagtctaccgtcgggtgtggacatgcagaatctgatgtcccagcatccggtcttgggagcactgccacctgctttcttcttgcgagccgcctcggaacgctaccaaaggacgcccaagtgcgcccgctgcaggaaccacggagtggtaggtccctcggtcatataccatccggcatctggagattttctttacccactggatcccctttccatttcgaaccttttgcaggtcagcgccttgaagggacacaaacgctactgccgctggcgggattgcgtctgcgccaaatgcactctaatcgcggaacgccaaagggttatggctgctcaggtgggtttctactttaatatagaaggaattacgtggaaagaattggaataaatgttatagaatgaagaagattgctgaattcatctatatagttcagttaaagagaacctatgtatgcttaaaagcaggtttttttttatagtatagcatggaaatcaagtactacttcaaaattgcaaaactcctctgttgacttcagttaaaaatcatagtaatattaatgcatctccctgttacacgccactgatcaaagatccgctttccgcccatgccctccttgttgcaggtggcccttcgacgccaacaggcccaagaagagaacgaggcccgcgagctgggcctgctctacacttcggttcctggccagcagaatggcagcgacagtgctacgcccactccgcacagccccaaccacagcggcagcggcggctcgggcagcggaggatcgggccagaacggcgtcttccacggcgggattccctcgccacccagcgacggcttcgaggccagctccactcccaatcatcaccagcagtcgcagcagcagcagcaggcgcaccaccaacagcaccttagccacccacaccagcagtcccagcggttcaatggcaatgaatccgacacggatggacgcacccgttccgagcacctcagcgtcggtttctcgcccaccagaaccgagctggatgagagtcctggtgagtgaagtaaagaatactgcacacagctaacaccgggagaatatgtgactgtgtgacttgggaaatgaagtaacatcaaatatcacagcacatatcttataaattgagatctattctaaaaccaagaaaacagttttccttgaagttcttcaaatgtttactgcttatgaaatagcattacttccattacactccatttcgaaggacacactgacttattttgcgcagtgcagccgcttaagaagccattcacgcctggccatctcaagaagaggtcttgagagtcttgggggagggcaggttaaaagcgcgttaagaaaaatttgttttcgattgttcagaaatcagcggtgcataaagtgccacactcgcggttgcatgtgcatttggctgcgtgtatgcaagtggcgaagtggtgctagtgagcggggcataggtgttgttttgacaaagacttagccagccaagctgcagtcgtgcactttgccaagcggcgcgtgaaaaggtcctggggttgcagccaggccaggacatcaaggggcgcaaattgcaacaatcgagttaaagtcctcgttaggaggaaaacacttgatttaacgtggtgctcatttcagggaaggttttaaaggcaaataacttgaaatttccgacaaaaatgttccattacatcatataatatcaaatggcaaactctgaaatgctggtcgtctcaaaacacttgtgtgctagaattttactctttttcccacaaaaaaaccctctcaatagctgaacaataaaagttattgtaacattatccaacattatttgttattatccgaaataagccaatcaattccaaccagatcatctcagattgccctgccatcgcaactcaaaccactggcccattaaacgccaaacagttgcaagtctgtcgagaatttgaaaggaccttcgaccccgcctgcttattaggactatcggctgtgcagatgggggttattacccataaggtaaccccatgccaagggttctggcaggccagaaacgtgagataccccccctgactcagctcacttgtctttatttgtttgccctttcggaggaagtggttttttccagctcgagaaagaaaaacacagcaggattctcacgcgaatcaatcgggaaaacctgtctatttaagtaccggactctattatttgccatgaaatccaagacgatttcacgcttgaatttttattttcgactaaagagtgcggcattcgagttgggtattggtatccacgcaccctcgacttaattaaatttttactgcggcttcgtcaactgcaaaattaaacagactcgcacaaaaatatcatatagcttgtttcatttgtggaaaaaaacagcaggttgtccctcgttggcatgtcaacatcgcatcctgaactccctgctccttccaccgcctttgtttgcgatgcccctgattaaattccttcccatctctacacttgatacttttatttgctctaagctgccaagtggaaactgtgcggttttccactggctacctgaatcgcttcgtcgatggaaatcgatacctgcgattttgggaaaaacaattgctcaataggaagtacacactctcgtaggagaactattacaagatactactcttaatgcatttacatatcaactggcgactaatctgtatataccttcattgtattccttgcttgcagtgtccaagcgcggagcagccctgtcgaacgagaccgaccaggacacgggctccgagtccggatcgccgagtagtccccggcccaaggtcgccggactgttcaatctgaccgccagcttgtcgcccgcccgcactggaccgcccagctcgccggaatcggatctggacgtggattcggcgccggatgaggccacgccggagaatctcagtctcaagaaggaggacagccagtcgccgcccaacacgcccgccgagaatcttcatctgctgcgatccttcagcagcagtcatgcccagggcttcctgccatatcaccacacgcagttcctggccgccgccggcctgcccgcccaccaccacccagcggcacactcgccgcaccaccagcagcagcaacagcagcagcagcagcagcagaaccacctgccacagcaccaccagcaacagcagcagcagcagcaacagcagcagagatcgcccatcgacgtcctgatgagggtgttccccaaccgacggcgcagcgatgtggagcagctgatgcagcggttccgtggcgacgtgctccaggccatggagtgcatgctggctggcgaggatttgggacagactccgccgcaggtgccgccatcgccgccctttcccatgaagtccgccttctccccgctggtgccgccctcggttttcggctcccccacccatcgctaccatcccttcatgcaggcgcacgccaagcgattcctgactgctccctacgccggaaccggctaccttccgggagtgctcagtgcggcggatatcgagcaatccgagtccaacggagcgggcggcatagggttggatcgcaccagcaatgctggcgactcccaggattgaggcatcgaggtggaggccagcggcgcatccgtcttcaggcctttcgaataaggttcccacccctgctacactgcggaaaaatgtgaacactttacgagtcaagaacacaattcttaacttcaatgagttttagagctctcgtttgtttttataatattttcagtcagctgaaaccatagaagtttttcattgcagaaagaactttcttgatttttgagcaactgtttctcgcagtgcacgtcccgcaactaagtgtaaattacatttgccctcgactcttagcacaagtattgtaacatagagaccgtataagtaaataatacgtttaatgaattaaaacttaagaaaaaccatacactcgatcccagttataagaagtatttgtttagctgaaattaacattatgacgatgatgagattattgtgtaagcgattgttgattgcaaccaactaattgagatatccgtgtgtaccatatgaatatgagcatatatataattatattaaacatcatattatgtcttagataaagtacatttcaaacactgtgttaaagtatttaataaatctacaaataattcaataaaataatgaagaaattaattcgatgctatttttttgtcggggaatattggtgtttttttttcctacatgcatagatagatagataagatacatcttcagtctgcaaatgtactgatgaatgtgctgaatagcccaattatagtgtaattattttgatgaatgcataatgcattccaattaaatcgtttgggcctacgctaaatgcctgactaatcagatcaataaataaggatatttaatacaaaacttccattgttcggaaatcccttagtccgggtcatagctgggtaaataaacaattttcacagcacgtaatgtatattcgtgagaagtcgaccggataacaatgggccgcccacaagcaccccaaagaaattgaaatacaaataggaaactactgcgattatagaggcca

SEQ ID NO: 38921 - DNA, 1533 bp, DROSOPHILA
atgagtctaccgtcgggtgtggacatgcagaatctgatgtcccagcatccggtcttgggagcactgccacctgctttcttcttgcgagccgcctcggaacgctaccaaaggacgcccaagtgcgcccgctgcaggaaccacggagtggtcagcgccttgaagggacacaaacgctactgccgctggcgggattgcgtctgcgccaaatgcactctaatcgcggaacgccaaagggttatggctgctcaggtggcccttcgacgccaacaggcccaagaagagaacgaggcccgcgagctgggcctgctctacacttcggttcctggccagcagaatggcagcgacagtgctacgcccactccgcacagccccaaccacagcggcagcggcggctcgggcagcggaggatcgggccagaacggcgtcttccacggcgggattccctcgccacccagcgacggcttcgaggccagctccactcccaatcatcaccagcagtcgcagcagcagcagcaggcgcaccaccaacagcaccttagccacccacaccagcagtcccagcggttcaatggcaatgaatccgacacggatggacgcacccgttccgagcacctcagcgtcggtttctcgcccaccagaaccgagctggatgagagtcctgtgtccaagcgcggagcagccctgtcgaacgagaccgaccaggacacgggctccgagtccggatcgccgagtagtccccggcccaaggtcgccggactgttcaatctgaccgccagcttgtcgcccgcccgcactggaccgcccagctcgccggaatcggatctggacgtggattcggcgccggatgaggccacgccggagaatctcagtctcaagaaggaggacagccagtcgccgcccaacacgcccgccgagaatcttcatctgctgcgatccttcagcagcagtcatgcccagggcttcctgccatatcaccacacgcagttcctggccgccgccggcctgcccgcccaccaccacccagcggcacactcgccgcaccaccagcagcagcaacagcagcagcagcagcagcagaaccacctgccacagcaccaccagcaacagcagcagcagcagcaacagcagcagagatcgcccatcgacgtcctgatgagggtgttccccaaccgacggcgcagcgatgtggagcagctgatgcagcggttccgtggcgacgtgctccaggccatggagtgcatgctggctggcgaggatttgggacagactccgccgcaggtgccgccatcgccgccctttcccatgaagtccgccttctccccgctggtgccgccctcggttttcggctcccccacccatcgctaccatcccttcatgcaggcgcacgccaagcgattcctgactgctccctacgccggaaccggctaccttccgggagtgctcagtgcggcggatatcgagcaatccgagtccaacggagcgggcggcatagggttggatcgcaccagcaatgctggcgactcccaggattga

SEQ ID NO: 38922 - protein, 510 aa, DROSOPHILA
MSLPSGVDMQNLMSQHPVLGALPPAFFLRAASERYQRTPKCARCRNHGVVSALKGHKRYCRWRDCVCAKCTLIAERQRVMAAQVALRRQQAQEENEARELGLLYTSVPGQQNGSDSATPTPHSPNHSGSGGSGSGGSGQNGVFHGGIPSPPSDGFEASSTPNHHQQSQQQQQAHHQQHLSHPHQQSQRFNGNESDTDGRTRSEHLSVGFSPTRTELDESPVSKRGAALSNETDQDTGSESGSPSSPRPKVAGLFNLTASLSPARTGPPSSPESDLDVDSAPDEATPENLSLKKEDSQSPPNTPAENLHLLRSFSSSHAQGFLPYHHTQFLAAAGLPAHHHPAAHSPHHQQQQQQQQQQQNHLPQHHQQQQQQQQQQQRSPIDVLMRVFPNRRRSDVEQLMQRFRGDVLQAMECMLAGEDLGQTPPQVPPSPPFPMKSAFSPLVPPSVFGSPTHRYHPFMQAHAKRFLTAPYAGTGYLPGVLSAADIEQSESNGAGGIGLDRTSNAGDSQD

SEQ ID NO: 38923 - DNA, 2437 bp, DROSOPHILA
agctttgtcaaatgcggctgacatgggacgggttgagtggtgcggaaagatctattgcagcgtgaaaacgccactgcgagttgtttaatgaagtatcacagtcggcggagaaagtcgaaggcccttcgatatcccattcccgatctccgatttgcggttagcgatttgcgatttgcgatttcgcagcgcggaaaacaatgcccatggaggcagtcaaaggaaaggtggaagaaacacacggccacaaaggggaattcacgtgtgattggaatatccggcaatcgtccttcagtcgggcgcagagtgggcgggtcgtggattctggatcctgagtcctgggaacttgtcgccctgcgcagtcagccgcgcacttataattgctgttgcagtttagtcgatttctttgtggatggagaagtgcatcgattaaatcaggcaaatggagaatgtgtaaggatatgggatgtatgctaaagtaaacagatttagttaagtaacatggcatactaatttcattatgaagtatattctagactctagttccacttaagacaactggatgcacaatgaattactttcagtactttttattcttatatccgtcaaaaggaaaaacaccagacaccgttcattaaatatgatttccatcttaatcgcactgttcaccgatacgtgacactcgataccaactgcctagtcactcagtcaccattcatgaacttgaactcgcatcccagtacaggtgtactcgaagtatggatcattttaagatacagcatcgttttagagatttttaaagactccgattgcgtcacaccagatgttcccgcgctgacagcaattataccggccggtagacgcattttccatgaattctaggctagtgccaatgtcgcttctagaactggtttccctagtcttcccagagcgttatgtgtataaatgagccgtgctcgccagaactgtggccatttacaaacataaagctgtcgcaaacgcaatgaatcacttgagactggagatcatctgctggagctgcctgcttattgcgatggctgttagcacggaagctgcttctgtttggaaactacccaccgcgcagatggtctacgaggatctagagaagtgtcgccaagaaagccaagaagaggatgctgctaccctgaggtgtttggttaagaaactgggtctttggacggatgagagtggctacaatgccaggcggatagcaaagatctttgccggacacaaccagatggaggagctgatgctggtggtggagcactgcaaccggatggagcaggacacgagccacctggacgactgggccttcctggcctacaggtgcgccacttccgggcagtttggccattgggtcaaggacttcatgagtcaaaaggaagtggaacgatgaaatacaattgtgatagaaaataaacccaaggagtgtgcaatttctaaggggtaatacaggacttcagaccataaaaaagattgataattgagttaatgagcaatggtgagaatctaagttagctagctgcactactggattttggtaatccccattgtttattaattacaacaatatgcttattttcggcatctgccaccgaggtagggtcctaagtttagccggcaccacttctcacctgttcaaatatgcaatcagtaggttactgaaaaggcagcctaaactactcacgatccttctgactttggatccactccgtatcatttcgatcctgggataaggccaatcccaggagggaagccaatacgaccaagaggagaaatagcggagtcttcatgacggattggcaacgattgtgttgtaccgatatgaaacattttcccttctctatatatatccaactagctaattgactggaatatgccgtggcatgcccaggcaatcaatatgtaatatctatgtaaatcgcgaagggagcagctatattccattcctattagtaaacttcgtgtcatctcaactgctaatagtcatttaggataaaacatttctttattcgtattcatggtacagctatttttattgcttaatatgttttgaaacaaagctagttaagaaaagaaagtaaaaaaagataatttttatataattgtgttatttcttttacaagtcattttccgattttccgtcttcatataatcggtttttttggcataaaaaataaagtaatgtaccgaaatggaaatctcctgcatcattaaactcgtagcaaaatttagaatcgatttgattttgcgtctgacttttttaatttttactcatttttcgcaaaaaatcacgatgtaaccccttttaaaaaatgcaaaaaattgcaaaattttaaaattttaaaaaacattttaaaagggatatatatggttagctgtggtaattagctgcttaataaagtctgttttataattg

SEQ ID NO: 38924 - DNA, 437 bp, DROSOPHILA
atgaatcacttgagactggagatcatctgctggagctgcctgcttattgcgatggctgttagcacggaagctgcttctgtttggaaactacccaccgcgcagatggtctacgaggatctagagaagtgtcgccaagaaagccaagaagaggatgctgctaccctgaggtgtttggttaagaaactgggtctttggacggatgagagtggctacaatgccaggcggatagcaaagatctttgccggacacaaccagatggaggagctgatgctggtggtggagcactgcaaccggatggagcaggacacgagccacctggacgactgggccttcctggcctacaggtgcgccacttccgggcagtttggccattgggtcaaggacttcatgagtcaaaaggaagtggaacgatgaaatacaattgtgatagaaaataa

SEQ ID NO: 38925 - protein, 137 aa, DROSOPHILA
MNHLRLEIICWSCLLIAMAVSTEAASVWKLPTAQMVYEDLEKCRQESQEEDAATLRCLVKKLGLWTDESGYNARRIAKIFAGHNQMEELMLVVEHCNRMEQDTSHLDDWAFLAYRCATSGQFGHWVKDFMSQKEVER

SEQ ID NO: 38926 - DNA, 3221 bp, DROSOPHILA
tgctgccagatgcccacgagatcgaaaacgaaaacgaaatcgaaactagaaactagaaaataaaaggaaaaggaaaagcgtcgaaaattgctccctcgaagcgagtgaaaagatcacggccattgggagtgggagtgggtgagatgtggaggaaagtcaaagtgaaatgcttggaaagcaaaccaaattgccagtcagtcacttagtcagtcagtcagtctcttggaccacaaactcacaaacaacaatagcaataggcgatccaaggaggagggcggcccagccacacccgacttggatgtctgggtaatccaatagcggcaattagagtgccgcccccggggatccggagatcgggggatcgagatcagaaacgcggtcacagttccgcagatcgccccagtgcatttccatgctccagtaccagctgcagtgccattaccatcaaacctcctccatgggcaactcgtctaaccggacctagactccatctctccgaggaaatgcctttgccatagctccacttgaacccatgcactggcaaaagaattggttctcaatagaagatggaatgtagaaatgaagtatgccttaaccttttcaagtgaacgatgtacacgttctgaatagacttttttcgctcagtgtaagaggtagcagcgccgtccggttcgatcggctactccgtaatccaattaaaggaacaatctacatttcaattcaaaactaatgaagtgtagagaattcgcaacaaaggctgacatgtgttgattgtttcgacgactgcagtgctggtatttgaaagtcgtgggtttcttctgactccatatagtccatacagacacgtaatacctggctttttaaagccattactaacaagcttccctgtagagcacccagagttccagctgcacaacttccgtccagcacaagcacacattgtgcgtagtccaaacaattcattgattgattgtcgatatggcgatcaattagacagattatggttttcattgatcgccatccagcagcagtagtgacaaacccagggacagctgtcaatggtcacttgtatctacttctatatgcacaatatataaacgccgacttcgatttcgatttctattctcggcagcacaccattttgattctcctactgctactgggacttgttctgtggaccgattcctcgctggccgcccgtcgcctgaggaagaagcccaaggtctacaacgctctcatcaccaccgacgacaacctgacctccagccgcgcctatccggtcatccagcccaccattcacgagccgggctacgccccctttggaccctacaatccctacggattctacagtccgccgattgtgagattcggccaaccgattgtcccgggattgacgccaaatgagagggtgagcttatgggtttcattaagttgctaacactgataaacttagcgaaatatttcgcaagattaaattactgctagctataataagacaatgattaatttaataataggtatcataaaaagctcactctagaaatctctgactagagcaatgaaccgcactcaaaaaagaaatatagtagtttaaactattgaaaccttaatattacagctcccttaccctctgccatctgccgcccagtatcccgctggctatgctccatatgaaccccaacaaccggtggaggcgccagtggagcagcagccgcagtcggcgtcgccacccggaaccgtggagcgccaggagatgcccaaggagcagatgccagtgccgttgaatcagcagggattgccgcccgtgctgataccactgccctcccagttcagaggccaacccatgcacctgccaccgtatccttacagccagtatccagtgatctatgaccaagcgggcttcataaggcagaactacttgccgccgtacgactactatcccagccagggttatcccctgcgggcagccactttgccgcgcgcggagcaggaacagccactgaatcccgtccagagtccaccttcgccacagccacttcccctggagaatctggagccggcgcagcccagtttcgaggacattcgcaacggttcggagagcaaaaacagcgcggtgccggatgttccacctccgccaataccctccggacccaagcgtccacggcccgcggaaccggaaccggaaccggaagcggaacgcaaaccggaaacggacaactgattgcgggctgaccaaaattccacacacgtatttattaccatttcgcttaggcataatatcgattcgattgtacaatgtcgccttaacccgtaagctaaagtaagagttcattcagagataacgaataaaaaacataaaatcgcactggcggtgattgaacttggatggatgttccccagttccccagggaaaccaggggacgatttcgctttcgtcggggaattgggagccgtttatctcagctctgatgggactataaaggcagtcgagttgccgggaaaagttacagttaacatcgaaaggggaactcagaatgaagctggccctgctcctgatcctctgctgttgcctcatcggaatgggtgagctacaactttggtctttggatacccaatgaataacaatatccaatatgcagcgattggtgactcggttttggtgaccaagccgccgttcattcgcagtcgctatagcttgcgttggaggaagacaaccactgtggcgcctgaagtggtcactggatccagtggatcaaccgttaacacggtcaccaccaccgaccatcccaagctggccacttccaccgccagttcggattacgactattacggaaatggggagacggagaatgtggtgcacaagtaatagtcatattccagccatatgactatatattaacacttgatataatcagagcgactttaatgtcataacaatgtaagagaaggccatttaataaataaactgtatgtcaaatctctagaaatcaataagaaatccaataagaaatctaaattcaaattacgcggcattagactttataacagttatgttgctagcagacgttgtcaaaacaagttggcagtttttacagctccatgttaactcaatgttagctaacatacgacacaagtcagctgttccgcgccgacagcaacagcaacaaaaacagcagctaagaacaaacgagttttggatcgaaaatgttgttaacaattaa

SEQ ID NO: 38927 - DNA, 1011 bp, DROSOPHILA
atggttttcattgatcgccatccagcagcagtagtgacaaacccagggacagctgtcaatggtcacttgtatctacttctatatgcacaatatataaacgccgacttcgatttcgatttctattctcggcagcacaccattttgattctcctactgctactgggacttgttctgtggaccgattcctcgctggccgcccgtcgcctgaggaagaagcccaaggtctacaacgctctcatcaccaccgacgacaacctgacctccagccgcgcctatccggtcatccagcccaccattcacgagccgggctacgccccctttggaccctacaatccctacggattctacagtccgccgattgtgagattcggccaaccgattgtcccgggattgacgccaaatgagaggctcccttaccctctgccatctgccgcccagtatcccgctggctatgctccatatgaaccccaacaaccggtggaggcgccagtggagcagcagccgcagtcggcgtcgccacccggaaccgtggagcgccaggagatgcccaaggagcagatgccagtgccgttgaatcagcagggattgccgcccgtgctgataccactgccctcccagttcagaggccaacccatgcacctgccaccgtatccttacagccagtatccagtgatctatgaccaagcgggcttcataaggcagaactacttgccgccgtacgactactatcccagccagggttatcccctgcgggcagccactttgccgcgcgcggagcaggaacagccactgaatcccgtccagagtccaccttcgccacagccacttcccctggagaatctggagccggcgcagcccagtttcgaggacattcgcaacggttcggagagcaaaaacagcgcggtgccggatgttccacctccgccaataccctccggacccaagcgtccacggcccgcggaaccggaaccggaaccggaagcggaacgcaaaccggaaacggacaactga

SEQ ID NO: 38928 - protein, 336 aa, DROSOPHILA
MVFIDRHPAAVVTNPGTAVNGHLYLLLYAQYINADFDFDFYSRQHTILILLLLLGLVLWTDSSLAARRLRKKPKVYNALITTDDNLTSSRAYPVIQPTIHEPGYAPFGPYNPYGFYSPPIVRFGQPIVPGLTPNERLPYPLPSAAQYPAGYAPYEPQQPVEAPVEQQPQSASPPGTVERQEMPKEQMPVPLNQQGLPPVLIPLPSQFRGQPMHLPPYPYSQYPVIYDQAGFIRQNYLPPYDYYPSQGYPLRAATLPRAEQEQPLNPVQSPPSPQPLPLENLEPAQPSFEDIRNGSESKNSAVPDVPPPPIPSGPKRPRPAEPEPEPEAERKPETDN

SEQ ID NO: 38929 - DNA, 2633 bp, DROSOPHILA
tttgagttttaatacactttctgccgcgctgccgtgtggacgtcttgcctccccagtcagtcggttcggtcctggctctgaaaaaccaaataattcgaattgaacaacgcgagttggtgaatgcgaacgtgctgtgaaagatttaattcgaaaaataacaaaagcaaatggatgtctggctagcgaaaagctagtacttacgtatgtacatatgtgtgtctaaaaagaacatgcagtgtctggttttttcgattccgtcgcctgtttatggctaaatcacgtaatttaatccgtgtttgtttgcccgattcggtgtttgtttacgcctcgtttaccgttacccggccacttggcccgcacgtgctgatcgccaatcgcatatcgaaaattgccaatcgatcggagtggccatccgaggacaatcgatcgcgaacctaataaagcgctgttcaaaaatatgcaaagtgatgtagcggttgactcatcagcgtgaaattgccaggaactcagtcgcaagcagcaaaactttctgtgtaaatatctttggagttttcgggaactaaaaccaaaagtcactagagtcaataaggaaaagtatttaatactactataaaatacagccaaacttgtaaacttgtaaacttagtatgcaaataattgagaaacctaaaaatatatatatggtgaaacattttttacaaatattttgagactaactagtgaatttctaacgtaaagtgcctgcattaagccttaataatacttaacaaaccccctcaatccaaaccaattgccaaaaattacatatagccaaacaaaagcgtgttactaagtttcgtacaattaaaatacatgtagtaagtgcggcaaacaaaacacaagcagagataaatcaagccaaaaataagttcgcaaaaaataacaagagtaagaaacaaacaaaggagagcaggaaattgcagcatcttgtgataaacgctgacaatttgttgcccgttgaatgattgcactaaaggccaccgagatgcagcacaacaacaacgcattgcagcagcagcagcaactgcagcatcaactgctgcagcaacatcagcagcagcatcagcagcagctgcagcagcagctcaattcgcccgataataattatatttgggcaaccacgcacaatgcgaatatcagcagaaacaacgcaatgttgcagctgcagcagcaacaactgcgtgccccctggataaccgattgcaacaagcagcaccacattaacaacaataacagcatgaatgtcaattacaatcagcaattgacgcaacagccgcagcagcagcagcagcaaacgcagtacatgcaacacaattacaacaactacacgcaacagcagcagcagcagcatctagtgcccgcaacaacatcccaatccaacagccacttctaccagtgcaaccagcagcagcagcagcagcaattcctggcgcccaccaccacaacagcagcagtggtagtagcagcggcgcatcagcagcaccagacgcaacagcagcatcagtcgcagcagcagcaacagcatcagcgacaggattatgcatcccttcaaatgggcagacaagtgagtggactagttaagtgcgtacgataaaagggactattgcttgtctgtcattcgagggtatccgatattcgaggtagtcgaaggaagtagttttatatacgaaactctttcctaatagatgctcagtagtcttcgacttccctgtgcgttagtaatcggatttgcgctcagtgtaacatacagttacacaagtgcacaaggcggcattatgattggccatctccctcatcccagagctcatgatttgtggatgcttttgttttgcggtttggtgggcggcgcttcgccccaagttgaagtgttgctcgcttttgtttccgttggattttcgcttgtttttttaattgcgcgctagttgtgtgcgatagttggaaattcagagcttggaaaaccaaaaaagccaaaatggcggccagggggcgtatacttgatcttgagctttcgttgcgcatacgacatgtggagcgcagcgttcccccaaaattaggcgcgcatacttactttatctgaagtaaatatttaatgctcgctgtggcgtgggaaagccactccccaaaaacacacacacaaaacgaggggataaataaataaaacaaacaataaaaaatacatttcgcgtaatttaatttgtttcaactgcgaacaaaaacaaactggatctccgcatatatgtacgtatatgtaagctgaaaatatatatagaggcgatttaaataaatttaaattaaggcggcagacagttacagatttaagcgatcacaaaagggtttatttaacctctcgaaagtgatgttgacctgtgctcaccccattacagcaaaatcacgttggtgacatttaattttagccctcctgagcttaaagtgtatttcaagcagctaaaatcagatcaattattacaattatgtggctaaagtcacgcaggcacatcgcaaatgcttaatgattaatatccatttccgaagtcgaattcagattcacactttatttttaggcaaatcattcttagaaatacctttattgttag

SEQ ID NO: 38930 - DNA, 633 bp, DROSOPHILA
atgattgcactaaaggccaccgagatgcagcacaacaacaacgcattgcagcagcagcagcaactgcagcatcaactgctgcagcaacatcagcagcagcatcagcagcagctgcagcagcagctcaattcgcccgataataattatatttgggcaaccacgcacaatgcgaatatcagcagaaacaacgcaatgttgcagctgcagcagcaacaactgcgtgccccctggataaccgattgcaacaagcagcaccacattaacaacaataacagcatgaatgtcaattacaatcagcaattgacgcaacagccgcagcagcagcagcagcaaacgcagtacatgcaacacaattacaacaactacacgcaacagcagcagcagcagcatctagtgcccgcaacaacatcccaatccaacagccacttctaccagtgcaaccagcagcagcagcagcagcaattcctggcgcccaccaccacaacagcagcagtggtagtagcagcggcgcatcagcagcaccagacgcaacagcagcatcagtcgcagcagcagcaacagcatcagcgacaggattatgcatcccttcaaatgggcagacaagtgagtggactagttaagtgcgtacgataa

SEQ ID NO: 38931 - protein, 210 aa, DROSOPHILA
MIALKATEMQHNNNALQQQQQLQHQLLQQHQQQHQQQLQQQLNSPDNNYIWATTHNANISRNNAMLQLQQQQLRAPWITDCNKQHHINNNNSMNVNYNQQLTQQPQQQQQQTQYMQHNYNNYTQQQQQQHLVPATTSQSNSHFYQCNQQQQQQQFLAPTTTTAAVVVAAAHQQHQTQQQHQSQQQQQHQRQDYASLQMGRQVSGLVKCVR

SEQ ID NO: 38932 - DNA, 22413 bp, DROSOPHILA
tttatgcccatgtatccgtgggtaaaaaccccgatgagtcatcgccgtcatccatttcagagtggcgatgcgtgccgcgccactttggcatacataacacacaaatcggattcaaaagcaacaaaatccaacatgtgcccgctctcttgagtgtttgctttttggttggggagggaggaggggagatatgtatcgagagagaatggagaaaccaaaacaaaaacgtatcttcaagtggaaaatgtcaacaaacgagctgcgcgccaaattgccactttgagtgcatacacattgagttgagtggaaagtgaatcgcactcgaaatcgagccactatctatcggaattaaaaatcgcatgcgataaccgcacgacagccaatttgtatctgtatctgtgagattgttgcctctctcgcgctctctcattggctctcccccttttgccgcatcattctgacagttattgtgtggtctccgcttcacacccacattcgccagggccgcgagaatcatgcggagcatacgaaaatcgctcagctgggattttccatgtggttttgtgcggttttatggacttttcggactaccgattgtttttcattgcttttgcgctggtcaaggagatattttgggatgtgtgaaattccgtgacggctaacggaagtgtggaattacttaaaaagtcaaggtgcaaattggcattattaaaacgaaattaagtcaagggagttgcatgtgaaatgaattcaatgaagcaggaagttaacatatctaaggaataacaaaaaaatgtaataaaataaaagattggataaaagcttaaattaagacaataacatataatcaattagtattattagataaaagtgggcaaaatattgaaaatcttttaatccatacctttcaacaacttatcaatgatactattctagttataaagagtaagactttaaatatctctggcaactggttccgattatttcaatatcttctgcatccctggcatctacgcaacttgaatttccaggcttgccgcttgtgtgcgtgtatctgtgtgggccgctcgcagctcgcgagcgtgtgtgtgcgtgtgtatgcgaggcaatggccaagacgtcacccgtctgttcgctgcagtgggaaagagagaggagtggatagcgggagagacagaggcagaggcagcggaatggagcgagcggtcggtctttgccgtcgccagttgccagttgttcagttatttttcgctttttgttaaggcaacttattgaaacgcgactgcagcaaacggcagcggaaagccacgcggccgtctccctctcactctcgttctcgctcgcgccactctctctgtctctctctctcacccccgttaatcggccgcagtccatcagtgccacccaacctcccccgcccctacgccccacgcccactagtgctctcccgctcgcgcgcgccgcgagccacgttggttggagcgagacaaagattccccgccccccaaaggaaatccagccaacttgttgttgttacacttgattgtttaacactttcacaagtgcaaagccagaacattcccaacaaaccgtcaaaaaactgtgtgatatctgcaatacagcaacgcttttttcccgcagagcggtagaaatccgtggataattacgaaatattcaacctaaagtcgttcaaagttcgataaacaacggtgtgtggagcggggcgtggttcgcccgactttaatctacagaattgactggaaaaggccaaaaaggcgaaaagagagtgtgtgtgtgtgtgctcgtgtgctggtgtttgattgtgtgtgtgagtgccagctgcacatgtaagttttgtttataatcgccaactggagagcagcaacaatgaaagtcaaagtggagcgcacaacgaaaaagcccgccatcagaaagcccgaggatccagatccggcggaagaggacagggtcaagatggtgcaggatgacccagaggaccaggagaaccaggcggtggatgaggaggagctggactttctgcccgccgatctaagcgctgcgatatcgacggcgacaacgaaaatagcaacaccgacgcgcaatcttatcgtaagtgcgatactctatttgtgtaccctacatacgcgggagtattatcagtcggagaacgggttgactttacaactgttactttcttataggtcacatgcaccttggtagctcggtcatatgctaaaagaatctaaagaaacttgaccaataagcccaaaattattgtgctaccaatagcgaatggttgccttgaaattcccttgcagatagttgaatctagaaaataagatgattattcacttatgaattcgcacactgaaagggtattcgcgcttcgttgccatctggttttattgctattcactcggattaataaagaggaagtgggatagaagaggataggtacggtcgggcggtacaaactggtactgcatagaacgcaataattccgtactccccccggttttggatatgaatctcaacatatctcacagaaagcgtctgaatgctaaggctgactttgtctgtgaggcgaaaacatatagaaaacggcacacatacgggtctggaaacttgtttaaaaaatatattgaactttttgttttttgttgttgccttgtatactcgtctgcctttttttttattatgattattcgccgaattgtgtggtgcgcattttgttgtagctttccattgttattgttgccgctgtctcgttttggtttttatttcgtatttactttgtcgacatctttggaatttcaatttacacttttgttgttgtttcgcgctgtcactgtgccgctctctcacgcgcacaaggcagttaaatggcagagagagagagagagagagagagccagagagcgcgagcagctcacacagatacttttatcgcatgcgagagaggcagacgtgagtgggagagcgcgacgagtgcgagtgagtggcttattgtgcattccctcgttgcacttgattcgtagtcgcagccaaggttgccctctttgcatttgtttttctattgttccactatctctctgtttctatttcgtttggttttcggacattcccctcaccatccatcgccatcccctgtgtatcttgtatctgtcagatatttgcaccctgcatctgtttctttttttgtggcgtaggtgcggtctttattgctgcttgattctcgttcgcaacacgtgcatcgccaatttcatattgctgcactgtggccaataagccaagaaaccgctcggaggtcaaggctttcgcttccgtttctaattggattccacttgggactgcggcaagctatgaaatactggatagcatatctatctgaaatttgtatttgccgcattttggtgtgattttaaatttaactttgacgaagcttattgattttcaaagatatgtttttaaatgtctatgctaactgtctatatccttaggtggacatatatattttttattttattagcaataatgactgccactttcggctgcctttagaattcaaagggaaatcttgaatgcgaaaatagacttgtcttctgttcggcacgcaaatcccccggctaataccagacttgacaagcgaaatatatatatgtacatatatatctttccaccccgatttcccattcggctgacattcgaaattatgctgcagttgattttgccatagaattaaatccaatgccaaggtcaagtggcactcagatgctgcggctcacccccgttcttccccccccgaatacctcgaatcccccctcgaatctcgctggtattccacttagaatgtcaagcgactcacgcgtcgaaatgtttgagatgcaatgttgggtatggtgataggatggggatatggcgatcgggatggtgggcttggggttgtattttgcgattatatgtatactgaatatggtgctgtgcacttgaacaactcaaattgcctttttcgcattgcgctgcataaaacatgcagcgtgctacataaatattccatgcattaaaagcaaacgcattaaaagtcacgagcaaatcggctaacgagcagcgaactctcctcggagataacctttttacggatttttatgtttgcacactcggggtcaagagaatagggtttaattaattgcaaaacacaagctggagatcacatgagatcactataggtataggataggattaatcctagagattgtgttattaggtgatcacaaccactttctgccaataataattgcctacatttatatttgattcgttttagtattgatttaaaaaaaaagccctttcgttgcgacaccaactgtacagaacagaaccgcagattcgttttttttagcgctttataatcacgatcggatatccagcagaaattgccaatttaatgtgcgcatcaactaaaaataaataaatataaaattgccaatgcttcggccgccgcctttgttgccatcgacatcagcgtgctcacttagccagcaaataaataaataaatgcacacacatcacaacaaaacacaacaaaataaacaattaattattgttgttcttgtcttgttgtaatttcgtcttcggttcctacgttttttatggcgaatcttttacgacatttcgcctttgctgtcctcgcactcgttttctcatttcttatatcttatttgcttttattattatggctttcgattgttccaggaaaatttccggggatttcgaaaattcaaccgcgttgcttcacgcacgttcatagattaaaatccatataaatagattgtgtagatagcagaatgcacttgttacccaaaagcgatttctttgattaatttgtgggtttcgggggaaatgtgcaatgtgcaccttgccagaattgataagaaaaaaggtaaatataactcttagtgcccagtgaaaactgggaaatgatcaattggttttacttatcaactttatgtgttagctttccttcttcgaaataataacaattttatttaaaataatatagcttacgaatgctagctaactccagctgtaagaatagaaactttataacaagattatttataggatgagctggccattttttatcagatctttactaagacggcttagcttatctctggatctgtgttctttcgctagatttgctatttcaattagttaaaatcatcggtatgaaagatactttgtacatacatggctatctgcacttcaaagagcgtttagcttgtgcattttggcgctacgctaatgaaatcgtctcatgacgtcaatggcttgaacttagcataagttgaggcctttgaaaagaaaacaactttagagttgagaagccggttttcgggccgcgattcatttgagagccaaatttggtcaacacggttactccgcgccatgacgtcacaagtttgggggccagaggaaagcgatcgcttttccataccattagaaaataagaccgagagcattatgtcatcacccaatcgagcatttcgaactaacgagctggtaaaaaaaaaaaatatgtaagcagccaaaggaaaatgtcagaagttgcgtgttttcgcactagctttcgattttctcggaatcaaaatggggccgtcatgggtagcaaaagtgggagaaataaatacgtttatcaggaccgctgagaggggggtgggggttagatggggcactgatagggcttatctcctacatacatagacaccgcaaaaattcacaagagtcacgctttcatctgaaatttaaatagatatagtgaatacaaaccacaatctatcgtaaatgagcagtataatagaaatttattaattaatctgctgttttatgcaaatgtatttattcccttttatatttttgtgagtttactaaactctcgcaattagaatgtggctacttaatgctaagtgccaaagaataatacccactattcgactaattgagttatacgtcggcaaaacaactaattccaggcgaaatgccggcggaaatggcacatgccgccaaatgggattgggaaatgggtgtggattcggaattggaattggccggattgcccgccgcaattcgagcacatctggaatggagtggagtgtggcagaaagtgcactcgccagtgaaagatttacacgatcctgtgtgttcccccggcttaccaaatgcactttgtgccgcgtcatccagtgcggaattccaagaagaggcgcagcatcgggcgctggaatgccagggggtcggtcaggagggatcgtcgtcgtcgaagggactgcaccatcgccagcgggttcgatacgccatggcgttgaaaagtgcgaaacgaaaaagtgcgaggagaagataagtccggaggaaattatcgcgaactgacgcccgaccaacagcgtacaacactccccagattgtgtcaactccttgaagtgcaactgaaatatgggggtatgctggattcacgaacgaaattgacaaatgcatccattaagtcgttaaaatttacctgcctaatctggtgtttttcgatgtgattccatcttatccgagttcataggcttctggaatgttcgaatgattgtatatacgtcctatttactaactagaaagttagatgagaaatcgattgagacaaaatgactagtaaatatttgcatataatgtaatggctatcatttggctatcattatccttgtgtgcctgttaaatttcctatccgcgttttccgaggtatctcctcgtcgacctccttgtttcttatcgaatcccttatgttcggggggaatttcgcaatgctgcattgggatttccagcagcagcaccatagccatgccatagcctcgcatcgcctgatttggcctggcttttagcctggcttcctctcttttcgagctgagtggaccagttttggggagcactcattttgagctccactcgaagtgagtggaactcagagtgcgagtgaaacgggttctggtcgcttcggcattcggctggcaagtgggtgccaagtgtggagctgaatgccctaggccgtggcacgtccctctctcccacaccaagtgggccaaaatgaaaaacagcaaaacaaaacgcacgaattctggttaaaacggcgatgagtcatccgcactgcgaggtgatgtatgtgtgtgtgtgtgtgtgtgtagaatcggttgtagcccgtccattcataatcgcgtttgctgaatgaacgaacatctatatgggcacacacgaatcggcgtctttataaacaaatatatagtacagctgcggtcgcgatagtagaaaagcaattacggaatttcacaatagctgaatgcataataagttaatactagtgttacctgttgtacgccgtaattagccgtttaaatagttaatttttaattattttgtttaatattacgatgatatcacgacttctgattagggggaatattaaggctaaacttaaaggcaacactgcgtatgcttaatatgctaataaaaatgccaaaatgagaatttgtcactggaggtttctataaatatgccagtttatgtatgtatttcaaaacctatatctgtataaacaaagtatatttgggtttctatcgccaactgctgatggacacggactaatatttgccgcagacacccgacatgactaggcatttggcacctcgacgctggacaggattagggtgatgtcatcgggtttcccgccgccggagtatgaaacattgtgttgcctggccttgatggcgaatggtgattggaaactggcattcatggacagttccctggccttctccaccacccggctggcgcccacaagtagatcgtgctctccacgctcctttaggccattcaatatactgagcaacatgctctcgggcatgttatcgaacaagccatcggtggccaggagcaccaggtcaccgggtagtagggagtgcctcgtggacacggccatttccggcttgtcgcagtagtagctctccttccgatcctccggcggcactgtcagctgatagggcgtgttgaagtcgtgggtttgctccactgagcggtgcagcacccgtccatttcgcaccaccaagaagccgctgtcccccaaattggcggtgtacagggtgcagtccttccgatgcatcgtcgccaggcaggcagtgctgctacccacaacaggatgctcccggtgggacaactcctggaagccggcgatgagcatgttccggggactgcgtccatcgaaatccgatagctgcgtctgcccggaacagcagctcatcagctccttggcgaaacgacccgcatccacgcccaagtcccgccaaccgcccacgccgtcggccacgcccatcacctcggccagcggcgtggagctgacgaaccagctatcctcgccgaaacgctgattggaccgctctcccggaaatcgcggcttcttcgatcttccctgcaccaccgtgacgagatagggatcccgcgaggatttaccggattgaggcggacgctcgaagcggccggacagttgggtgaactggtggatctggtggaccgagaagcgtttcagcaggagcggccagtttctcaaacaggtgatcatttctcttcgctcttaggcactggaatttgaaaaaaactaagttttgggaaatttacttcaacgagttgggtttgaatattcactttacttatgtatgaaagttccaaaaatgtaacagctacagttaaacagcctgcttacatgtatattatatttcaataaatattttgctatagccacccatcgactagaataataccatgaaatcgtacactttccacgtaattggagcaaaagggcactttgtagttataaaaattattaatcacaacgcaattgccaacttgggtttctgtttacaccataaacattggttaatcgtaaggcccagatacgaaaaccatacactctagatgggctggcacggtctgtttttcctggcatttgtcataggtagatttgatttctttgttcaatcttatctggatggagcctacgacactctggactccgaatggaaatcggaatcgaacccccatcatcaccggaagttttgatcacgctacggaactgcaaatgttatcgccgtggattttcttatcggcccaaaggaaaacaatacgcaatgataactttattttaaacccctgatgtaaacgcctttcagatacggcgtcttatcatgttatacccaaacgcattcgttggaatcgctcattattcattatttgatttgtttttttttttcttcgttcgttgtgtttgccaaattgttaaattgtcggtaactctaaggtccgacttcctgtccaatgctcgatacgtgattctggccagcaagagctgatcagactactctatcagctctagcttccgagctggaagagctcggaattcgtatctgaaactggaagcggagacgtcagaaggtcttatcaccttagttcctttttttttgtgacgttatgaaaaaaaaaaatgcgaaaagtatttcctgcagcggctactgttccggaatatgttttatcgtggttaaaatgatattactagcaacaattattggacattatgctaccgaaatcggggttttacccagcattcaaatttgttctatcgctagtagagctctttaagcacaggaaactcagacaaaaacaacacacgattttgttttcatttcatgtgtagaaattttctgaatcactaagattcaggccaggcttaacttaaagcgaatcttgaattggaaaccgagcttctgattcatggcgataagggttgcgtatcaagcgaggctttagatttcgtgggttcctatagatttgggtcatttatgtagttcttggcctgatcctgcacactaattgactgtgaatttcgctctctcgttgcaggtaagtagagcagagaccacagagctaagtggagccacaaatgtccagtgtcacatgacccacatttgggtgcacaaccccttctcctgccccccctcatgccatttactttaccaaatggttttgatttcggtttggattctcattcctcatgtaagtggcggcacaaggtcagtgtggccttttttttttttacatggccgtcggccgttggggccccatcaatatttattgaaagctggcatatcaatagataaatgcctagaaacaacacctgcaacaacggagaatcgaattgaatggaatggaatggagcggagtggagccacctgagcctccggcggcgacatccgatccgcctggctatggcgacccatttcggaaagccattccccgataagaggagcaaagccacaaaggcgcaccattcatttgatggcgttgctgcattcggtgggtcggtggggtttaccgggcgctttaaatttagttgcttatgtcataactaaattgtctggccggggcgataagataaatgtggctatggcatcggcaatcgggtgcccaagaaacgggtaaacaaaaagcgtagtcaaagaaaaactgggcacgtgagagaccgaaaaccgcctctatcaactaaacaaaaaaaagcacaaaaaaaatatctcgaaaagtatccaaaagtcagcgagcagagcgggtttaacccacgagatacacgtatttatgtgagcactattcactttattttgcattttgtcgagcttgctcaggaaatgccagagcgaccgagctttcaactcactcattcgattcactcgctctctttgcgctctctgagtgcgataaaaaaaacactcattcgccatggcccgggtttttcgaataaaaggcgagccatcggcgatgacgcatttagtctaaacaagttggccgagccaaacgtttcgggaatagagtgatagtagtgatagttcgaatctgaagtcgtgcgaattacgtgaaaagttttgtagtgtgtgctaaatgcaaacagtgcgactctctcagcatgaaaattcaacaaaaacagagcgagaattctaggaaatattgaaaacagacagcccaaataacaaataattcgcacgatcgcgcgccactcgcggaacgcagatacagatacagatacaaatacatttagcctgcggtacagatactttatagtgccagtgcttcggtgtgcggaatacaaaggcgaatttcgccagaaatcgcttgagtcacttggcagactttgtgcggccatacgaatcaaaagcgaatcaaatatattcaaaacacctttggttattcaataaaaatcagtcaaaacggaagacctactgatctacgacaagatgacgctggacagctacaacatcttcaacgatgagtacttgttcaacatgccgctgtcgccgctgccaaaagtggtaagaaatgggcctacgtctatgccatttgagttagccagggtagcagggtcccgccctttttgggttaaattggttaaatgccagcgttatcggtgtttgccatgaaatttctagaattcctcagagtggactgatacacatatgtatgtacatatatgaacgagtgtgcattcaaatggctgttatcgtttgcgaattggtttcttggaagccggagatcccctttttctcaatgcctttccaaagccccatttttatgggcctgtatgctatagtttatattgtgtttgccctgcgataagaaatttcaacctattccgatacgctcgatcggccgatttgcgctcattattcgaaaaatgaattgttttattctttgctagcgataagggaattattgttggctgtggcaagtgtgtgtgttttttttatgatttatttttgggggctagtgcgggacatccatcattggtttcgtaattattgaaaatcattattttgccttcgagtgctatgtatgtacaaatgtgtgtttttattcgaaataattcagttcaaatcaacttagattgtgttatattcttttgggcaactcttgctcgcacccttgttaatttattaacttttgcgtgtgcggattcattaaatcgagcaagtgcaccctgctgcataaaaaaagcataaaaagttattgccaaaaatcaccctcgattgcgaggcacgttgcgatttcatgccaccattaacagttaacattttccggcttaaagtcggcttcttgcagttttgtctgctgtcttttggccatatctacccatttttagccatttttgcccactgcacacttcacagtcgagtgatccggtctgggttttgcgactgcgtctgggttttgggcttgggtttggttttctttttttttgggtctggcttggtttggtggaacatggaacagccggcgccatttgctgatatcgcacacgtgcgattttcgtgacaatttatcaagttttctgtgcatacaatattgtttttcactttccgccgcgaaagacggcaaaaaatgagggggggtggggggcttaatttgatggtagaaagtgaacagagggtccgattgagtgaccctttgactcgtggacctcaaacacactcgcgtgacacttgatactcgacttttacagctgtgtgtgtgtgtgtgtgtgtgtgttttttcattttaatcccatatatattttatttatatgtcttacaattggggcggttcaaagtgacggactgcaagtcaaaccacttgctcttagccccccaaatggttccattaaacagcacatgtagcgcccccacattattatccccaaagccgcagaaagagccaaagtccaactttcttttaattaaccgaatggccgccgtatatggtccgctcttgaagcaatgtttttgtgctttttcgaggggctttacgtggggggtttactttcgcaattgttttttttcggtggctcagttgtgggcgacttcgattggttttgagttggagtttttaggcattgagatgaatgaaatcacttgaaggcgctgctttcgagggcagacagtaactttcctttgtctagagctgcccaccagtccactggcacctagaactggcctaaaaacgcacatttttggccaaccaaccacacacacacatatgaacagcgatgatgtgaagttggagcgatcgtcatgcttgcggagcgtgcaactgctggagtgcattcaattaggttcgaattaagcattaaatgtgtctgcgcacttaattgcatttacagtcgatttaatgggctctcttctcggcgcaatcaaatgcatttggcattcggcgtcatctactttagctgccagcaaagtttgctgcagataatttgacagcgagcggttgtcctgtaattgaaggactctgttttttttccttgccttttatttcgagctgccatcgttggttttgcgttggcaaatgtcctggcgtttgatggctgcggtcacgtccttcttggaattggccaagcgttggaaatggaaatggaaaaatggaaaaggaaaacaccaatagcccgtcgaatggaaagtgaaaacaacttttactgctgtctgctggcttgcacttcgtcctgttcgtcctttttgtgctttttgcgctttttgctgggtgttgtcctttgtggcgcccgaaagtcgcgccgtttgtttgccatttcctcgaatgcatacttcgccataaattcaggggcttccccgcttctgcgtttgctgtcgcgccgaaatgcatttaaataaattattcccagaccattttgtcgcgtcattttattagctgcatgtgctgctagctagtggccactgtagttggccatatcggcttaattaagccatctcaacgagcgaagtgggctatcgattgataagtagtattcaaatacaaattacgactgggttcattgccctgcttaaaacgcagaacagaaaatattttcacccttttttcattctgaatatatatatatatatgtgtatatatctctggcaaatttatttcttgccttgtccacgccctcggaacaaaagtctgattaatttgacaccaaactccaagccggcggacttcgagtcctgcaaattaatttaactccgttgcctttgctttgcgctttttggcaaattttgaattatggccgaatgttaaactttaattcaatttcgggtcgtgtgggcgtttcgaaaatggacaaacgtcaagtgattttaatgacggcgctgctttctgttcatgcaaaaaatctacttaatatatatatatgaatatattgtatatctgtgtgtgtgtactttgcataaatgttgcttatataaagggggggctcctcggtgttttgttttgcgtgcctaaaaaaggccggccagccgtgtggatgcgactttttcgccggccgttgactctgggccactccaaaattctttgaagtcagggaagaaaccagaggggggggggtggtgaattggggactgggggaatggggctttatcagccgagcaacgaaaggcaactgagactgcagacagcagacaggcggcacttagcgaagtcaacactacacgacaatcggccatttcgcttgggcattgcggtcacgttctccttttgcctttgccagcaagctaaaaaacaaaaacaaaaaaataagcgaaaataaatgaaattaaataaaacagaaaatatgattgccgcccctccctgcgttaattgttttattcgcagaatttgcaattcgtacgagagtccgtcaaaggttcctatctgaaaattatgcttatcgtcaagggaagtgcgattgcacttacagagttgaaggtgcactgagaataaaattggtgttaaatgtgagcggaatgtattaactaagtagaaatggtaatatttgagttgcaaatggtatcataatttaagtttgcatctactaaacaaatttgccaattaacacttgcacgccatttctcgcagtgcattttgcaacatgccgcacatgaacttgtcaacttttcaagtctcttttgttttttttatttagtttcgctgtgacattgctgcaacttggagcaaacaatgctgagtagacaatttactcagtcttagccgattgaaaatcaaaattgtattatttagcccggataattatgcgcatttctaactaaacaagcggcgaccttcggcatgcaatttctgtattattatttctgtatttaacaagcttggcaacaaatgtatgccacagccacagcaagtaaagcgttgaaacaaaagcaaaatgcgcgcttggagttgccaactttaagttaacatttggccaaaacggcggcctatgctaacgcgctctgttagcctttgtttcggccgctccaaacgcttattagccgctttgatataaacaatgcaaattgtcgtcgctgttttcgtttttgccaacgcttgtttttgccttcgatgatgccaagttttttgtttttttttgtgccgtcattacgtcattgtcaggctaaaattggtctaaaaatagcccaacacgtcagctgaaagcagaaggcaaagtctcgggcccgagaatttcttagccactcaacttgttgcatcttcaccttcctcctctgcccagcgtttaaaaacatgtgaatgtgtttttgaactaattagagccaaggtcaaagttgatggtctaatcaaaatgatagcgcggatttacaggcaattgataagtttgagttttcagggaattcctttgggaagtggcaatttttaggttttgaaatatttttgtaagttgcagtcaccatacatttatttaggggccactttggtttggcttgaaccgcccgcaaatcaaatttgcagcagtcgcgtgtattagtcagcaatttgttgcttttcgctacgtcagtgttttactttttcttttttttttttactctccactgctggctgttcgatgttcgctgctcgtttcatttggttcataattgacccccagatgtgaactcggtgtccggagatatgactctgtccaacgttccgataggagaatcgagatcgccatccgagctggctggcaagcaatttagacaattcaattcgccgcgcttgattgccagcattctatatcatcacttgttttgcatacgtacattttccaaattgactgattcatcatcggctaaatgcggttcatgttcgcgagggacaagttcaaatggcaaaaaagtgggttaaaacgaaagtagccagccaaacaaaggtggccaaacagccaaggcggccgagttgaaagtaaatttcgcatacgaaattaaaaagtaaatatatcacaaagaataaaatcgattgtttgctgtcaataagggaacggcctttgggattgggaaacacggctgcgataagatcgtcaaataaataagcacacaagccgctcgaactcgctgcacggagagaaaagaaggcatactacttcaaaaatgtagccccagtgcaactggtatgtgtgtgtgtgtgtgttgctcttagcccacaacaaaagccagcaattagcgtattggccaacttgctggcgacggaaataaacgctcttggcgagacagggggtctgaactgaactgaactgaactgaaaacatagttaatgtggatgtgccacacgcacacacctgttcgtgggacatctgtcgaatcggacatgtgtatatatgtatgtagcttatgtttactcggaatcatcgcttttggccaaaacattgggcctgatttatgggcaactgaaaggcttttccgtggaagcgaagaatgagcctctggcaagttcggcaaatcggaagcagaagcatatacatatgtacataagccaccaccacattctactatagctaactaaatgtacatatttcgctttgaatgcggcaaaagcgagcgtggtcgtcgtgtgggcagccgctcaattaagagcagccagcgtttaggatcatttgatttcccagcggctgtcttctaatttgagcagccagctcgcacaacacacgcccagcagacagcagacagctctccggattcggatgcgggttcgggttctctagtagttctcaagatatataaatatatatatgatatgtatatatatacatatatatgcatacatctgcggcgatctctcgatcgcgatcgttgccaatttcgctcgccggagattctgatgcgattcagtcgcaaacgaacaacgaaccatcgaagtttagaaaatatctaacaattaaaagcgatcgcgcgcgcgcttttcctcgaatcgcatcgcatcgaatcgaaacgcgaaactcaaacaacgaaacgaaaataaatttggaaaactgcaattgtcgttgggttttcggtgcgcgtgcattgccaaaacgaatcaggagcaaaaaaaacgaatcagtcggctatatgtacatatatacatatagacgcaaaacaacgcacatttctcggctgcaagcgcgtggatcgaaatatatatgccatacgaatatacatatatatatatatatatatgtaaatatagccaaacccagaaataaaagcgcaaagggaggcataacactcgctgtgttgagaggcgttgcccatggccgaggaatttctgaatacaacaaatgcagcattaattgaactagctcaaggctccatgtccgtgtaaatctctataattatataataatcgaatttgcggctcacacagtggagcgacttaaactggacacgtgtcgctggattttgggcctcgcacacttacgataaactgcgtcgattatgagcgctttcgccgagcggaatgtgcgtttcaatcctttgcgaaatcagcaaacgcttatcgttaagcggctgagaccgccggagagccaaaacttcaagaactgagcaatcgaacaacgaacatatacgaaatctgctcacggctcgcagctagcaagaagtcaaatcaaacgaaccctttttctttattaggaaagagccaacgcagaaagcaaacgaaatacacaatacacacaaaaaaaagaagctatgaaacaaagccaaaaacgaacgaatttctaagcaactagaacaacactgcgacaacaaacagcataggagcatccaaacgaacggaattataaagacaagaaaggatcatcagcacattgttaggaaactttgggaacagagtcccaatttgtacatatactctagtttagctagtaactagattcttagattgttgaattgtttttgttgattttgaatacaattcgcatatatcattgttgtcccaattgttgtgttagcttagctaggctaagaaccccaacgaatactagtcagccgcccaactgtgcgtatacgcaacgcgagtgcgtatacttaatatttaggtttagatcgataagcagcgaacaaatgatgaaaaatctcaacggtaggacgcacaatgcgtgctaccatccctactaccaccaatcgctgcattttgctcagcagcagcagcagcagcagcagcatcatctgcagcaacagcagcaacatatgcagcagcagcagcagcaacagcaagcgccgcagcaacagttgcgtcatcagcaacggcaactgcccacgcagccagcctaccagcaatcgcaatcggttgcccacaatgcttttccactgcgcagcagcagcaacaattatggccatgttgctagcagcgcctacgctgccagcagcggcagtcacaacagcaacaatgcggctgccatggccgccgtctgccaaatgcagaattttttcaaccagcaacagcagcagcagcagcaactggagttcaacaacaattgcatgcccattaattactaccagcagcagcagcagcaacattacccttccgagtcccagtcctccgcctccggctggaatcccgaaacccctgggcaggcgcaactcgccttgacggccacaacatgcaacaccactgcagctgcaacatgcaacaccactgcagctgcaacaacgagcacaactgcaacatctgctgccgctggcagcgacaacaaccacagcgacaactttgcaatggacgccagtgagatagccactttcctcgccaacgagcttttcctacagcaggtaccacagatcgatcgatgatgatgcctccgattctggtcgagattgggatagatttgggcgcgaaacaattggcaagcggcatgcgtacttaatcatcgccgaaaatagaacaaatgcggaacaacaaaggggtgggcaaatataaacaaagtgatggattggccgcctctctttcggtttcttcatctctcttcgcctctttttttttcgttttttgtttggccaaaaacacgttcgctaattcgctagaaatgtacggataagcaagaggtcttacagacttagcaatagcttttgatgttgactgatatctgaactcgacccaaattactcatgtgataagaataaattcccaaacatccttaagctattcgcgggcaacactgcgtatgcgtgatatatgtatactgatatggcattgtagagggtttcgtgcttgtcatgagctttaatgagcgttaatagtaatccatcttctcagatacttgcactcatagatgtctttactaatcatgcaccttttctgctcttgcagctcggcaactttgagaccggccagagtgttctcacactgacgacgcccacgttgacgccgaccaccacgcgcaacatcgaggacacactgggccacttgctctcggacacgcagaccgatcgtgtggctggttgcgcgggatttgcagtgccaaaggtgctacccaatgccattgatgtcctgggcatgggtattcccaccggtgtttcgtcgctcccacttcagcagacattcgatttgagcctggggcagggcagcgagtccgaggactccaacgcttcgtacaacgatacgcagatgaacgaggagcaggacacgaccgatacttgtaagtgaagctggcacgaattgctccgaatgtctactaactcccttttatttcatacgcctgcagcaagtgcccatacggacagcacctcgtaccaagctggccacatcatggcgggcagcgtgaacggcggcggtgtcaacaacttctccaatgtcctggccgccgtgagctctagccgcggatcggcgtcggtgggcagcagcaacgcgaatacctcaaatacgccggctcgtcgtggcggtggcagacgccccaaccggtcgacgaacatgaccccggaggaggagcagaagcgggccgtgcgccgggagcggaacaaacaggcggcggcccgttgccgcaagaggcgcgtggaccagaccaacgagctcaccgaggaggtggagcagctggagaagcggggcgagagcatgcgcaaggagatcgaggtgctgacgaatagcaagaatcagctggagtaccttctggccacccaccgggccacctgccaaaagattcgctccgacatgctgagcgtggtcacctgcaacggtctgattgccccggccggactcctgagtgcagggagcagcggcagcggcgcgagcagccatcacaaccacaacagcaacgacagcagcaacggcacgattacgggcatggacgccacgctgaactccaccgggaggagcaattcacccttggatctcaagccggcggcgaacatcgatagcctgctgatgcacatcaaggacgagccactcgatggcgccatcgactcaggatccagcctggaccaggacggtccgccgcccagcaagcgcatcaccttgccgcccatgtccacgatgccgcacgttcacttgtccacgatattaacgcccaccggcgcctcgtcgggatctctgcagacgccgatcacgagcacggcgcccggcggattcggcagcgccttcccggtgacctccaacggcagcagcatcaacaacatcaacagcatcggcaacaacatgaactctcccacgctgaatgcgcataacaaggtgcctaaggagcggcccaatacgctggctttccagcgtcctctgggccagatgcacctcaccatggccaacaacaaggcgggtgggcccacgcagatccagggcgtgcccatccagacgccctcgaccggcaccttcaacttcgactccctgatggacggcggcactgggctaacgcccgtctccggacccctcgtaccgaacagctcctccacgaacaagcacccgctggagctgcccacgcccaccgccgagccgtccaagctggtcagcttataaccggaccggatctgggacggggatgggggccgagtcaggattaagttaagttttatatagttggcaggcaaacaacggaaggaaaccgcgaagcacttttctagttgtaggagatgttttcatttttgtaatatgctgtaatatgcgtaaacgtgacgaatgtgttgtttcgttaactctaatgtttttgtattattatctttattatggttaatttatgatttcgctatgtcttttacatacgccgaggagctatgtacatatgttatgtacttgtaatttgtgcaattttcaaacctcttcattgcgcgttgtatattttcaaaaaatataagaacgcgaacgcgaacgcgaacgaccgacgatgcatgatgagaatgataaggataatgatgataatagggcgtgtagatttgcaggatgcgttgtgatatttattataaaacgaatacaaaagatgcgaggatgaaacaaagtagaaagcaaacaggagcgtctaatgaaaggaactaagccggttttaaaattgtacatttaaacgaatcgtaaagcgtaaatatactataaaacaaaacaaagtgaatatatattcagcatacaaactaaatacaatgccttgagagagaattaagaaatgcaaacctttatatatagagatctacatacatatatgtatgcatgtacatttaaagctaaacaataatggcgttgaagcgagttttatattgagcaaaagcaaatgtgaaatgagataaatatacttattgtgtactctgtaagctgcagtagaaaccaaaatatatttttactaaacgcaacattgcgctattttcaaataccatttataagaaatgacaaaagcaaagcaattatttaatatgtaattatgtattatgtatacctatatctacctacccacaaccttaaatcaaaaaacccaaaacgattcaacaaaagctgatcaggtaaagcaactctcgccagtttccacactaaattctcagaatattcaaaattttaatctatacaaaaccaaaccgattgatagcaaataaatgcacttataagggcagaaaaacaccaaaatttaaaaatgaaatggaa

SEQ ID NO: 38933 - DNA, 2161 bp, DROSOPHILA
ctggcatctacgcaacttgaatttccaggcttgccgcttgttgcaaagccagaacattcccaacaaaccgtcaaaaaactgtgtgatatctgcaatacagcaacgcttttttcccgcagagcggtagaaatccgtggataattacgaaatattcaacctaaagtcgttcaaagttcgataaacaacggtgtgtggagcggggcgtggttcgcccgactttaatctacagaattgactggaaaaggccaaaaaggcgaaaagagagtgtgtgtgtgtgtgctcgtgtgctggtgtttgattgtgtgtgtgagtgccagctgcacatgtaagttttgtttataatcgccaactggagagcagcaacaatgaaagtcaaagtggagcgcacaacgaaaaagcccgccatcagaaagcccgaggatccagatccggcggaagaggacagggtcaagatggtgcaggatgacccagaggaccaggagaaccaggcgctcggcaactttgagaccggccagagtgttctcacactgacgacgcccacgttgacgccgaccaccacgcgcaacatcgaggacacactgggccacttgctctcggacacgcagaccgatcgtgtggctggttgcgcgggatttgcagtgccaaaggtgctacccaatgccattgatgtcctgggcatgggtattcccaccggtgtttcgtcgctcccacttcagcagacattcgatttgagcctggggcagggcagcgagtccgaggactccaacgcttcgtacaacgatacgcagatgaacgaggagcaggacacgaccgatacttcaagtgcccatacggacagcacctcgtaccaagctggccacatcatggcgggcagcgtgaacggcggcggtgtcaacaacttctccaatgtcctggccgccgtgagctctagccgcggatcggcgtcggtgggcagcagcaacgcgaatacctcaaatacgccggctcgtcgtggcggtggcagacgccccaaccggtcgacgaacatgaccccggaggaggagcagaagcgggccgtgcgccgggagcggaacaaacaggcggcggcccgttgccgcaagaggcgcgtggaccagaccaacgagctcaccgaggaggtggagcagctggagaagcggggcgagagcatgcgcaaggagatcgaggtgctgacgaatagcaagaatcagctggagtaccttctggccacccaccgggccacctgccaaaagattcgctccgacatgctgagcgtggtcacctgcaacggtctgattgccccggccggactcctgagtgcagggagcagcggcagcggcgcgagcagccatcacaaccacaacagcaacgacagcagcaacggcacgattacgggcatggacgccacgctgaactccaccgggaggagcaattcacccttggatctcaagccggcggcgaacatcgatagcctgctgatgcacatcaaggacgagccactcgatggcgccatcgactcaggatccagcctggaccaggacggtccgccgcccagcaagcgcatcaccttgccgcccatgtccacgatgccgcacgttcacttgtccacgatattaacgcccaccggcgcctcgtcgggatctctgcagacgccgatcacgagcacggcgcccggcggattcggcagcgccttcccggtgacctccaacggcagcagcatcaacaacatcaacagcatcggcaacaacatgaactctcccacgctgaatgcgcataacaaggtgcctaaggagcggcccaatacgctggctttccagcgtcctctgggccagatgcacctcaccatggccaacaacaaggcgggtgggcccacgcagatccagggcgtgcccatccagacgccctcgaccggcaccttcaacttcgactccctgatggacggcggcactgggctaacgcccgtctccggacccctcgtaccgaacagctcctccacgaacaagcacccgctggagctgcccacgcccaccgccgagccgtccaagctggtcagcttataaccggaccggatctgggacggggatgggggccgagtcaggattaagttaagttttatatagttggcaggcaaacaacggaaggaaaccgcgaagcacttttctag

SEQ ID NO: 38934 - protein, 563 aa, DROSOPHILA
MKVKVERTTKKPAIRKPEDPDPAEEDRVKMVQDDPEDQENQALGNFETGQSVLTLTTPTLTPTTTRNIEDTLGHLLSDTQTDRVAGCAGFAVPKVLPNAIDVLGMGIPTGVSSLPLQQTFDLSLGQGSESEDSNASYNDTQMNEEQDTTDTSSAHTDSTSYQAGHIMAGSVNGGGVNNFSNVLAAVSSSRGSASVGSSNANTSNTPARRGGGRRPNRSTNMTPEEEQKRAVRRERNKQAAARCRKRRVDQTNELTEEVEQLEKRGESMRKEIEVLTNSKNQLEYLLATHRATCQKIRSDMLSVVTCNGLIAPAGLLSAGSSGSGASSHHNHNSNDSSNGTITGMDATLNSTGRSNSPLDLKPAANIDSLLMHIKDEPLDGAIDSGSSLDQDGPPPSKRITLPPMSTMPHVHLSTILTPTGASSGSLQTPITSTAPGGFGSAFPVTSNGSSINNINSIGNNMNSPTLNAHNKVPKERPNTLAFQRPLGQMHLTMANNKAGGPTQIQGVPIQTPSTGTFNFDSLMDGGTGLTPVSGPLVPNSSSTNKHPLELPTPTAEPSKLVSL

SEQ ID NO: 38935 - DNA, 2641 bp, DROSOPHILA
gatgtgatcaaaacgtataattgaaatattcattttaattacacgaacaatttacgctctaaaatactgattcgcgatttaatgaacagttatatattctttctctggttttgccagcacttgctgaccatgtcgctggagacatccttgttcagatgcatcataaccatctgctttccatagatctagtagggtataatggcctttatcataatgtatagaaaagtgctggccacagccgtggtaggaatcaaaaggatccaatactccagcgccaggtaagtgtcaccgttcattccccagtataaaagtagcaacctagtcagctggtgggtcacactttccaaggcgcaccacaccacggatgtggagaactcgatgataatcagggatccgaccgtctccccaagaacctgaatgatgtacggcacgtgcgtgtaacctttcggacacatccttacatcggcgaccagaagaaggatggcaaacgtgaagatccaagcgcccactttcggagcaggtgaacaggtatctttaggtggccaagggcttaccgatattccgagcacgaggtgaatcagagcagcaatgcaaaccgcttgataagaagccatcttcaaaaatctttttcaaaaaacaattttacaaacattgatcttgctgtatacgagttaaatacacacgattgcttggcaccgtgcttttgagtatctctactctagttcttcaatatgaacttgatttgctcacgatttcttaggctataagagtacctctagccctgcatttagttctccaaaataaacttgatttgctcacgacctcttaggcttcttactaacatatacaaattataatttgtaattaccaatttatgtaaaactaaaactgagagtttccagtcaggcttgcgaacatcgtttcagtcaaaattcgttttcgggtgaaaacagtaactggagcattttgggaaattcaaagtctacacaaaattcaaagaatggggcgaaaaaggggtcgaaaggagtattgtccccccatttacaagcgccagaaagtggcgcgcgtcactaacaatggatacctcaactttatgaccgagtacaagaaacgcttttacggactttctccgcaggacatggtgcattatgcggctaagcagtggacccagctgtccatggctgagaaggaagctttcaagagcaaggtaaatcggatatatatatagcccttgaggatttatccaaaacgtatatttaaaagaaaccatcgacgattactttgaagagtccagcacagtacgtggcctgtgagatgaaaagcgatgtcgccggaggacagcaaagttcttgccaaagacagtctccaagcgctcggctgagggaatcggagaggagatcgtccagatcgaagaccttgtgcagatcagcaaagaatcgtcagcgagggaagccgaaacctcagcaaagcaagcgcaggctcagtcacatgggctcggcagtggcatatatccacttcctgcgcaagttccaaaggaagaatactgagttgcgcaccatcgatctgctgaagacggcaactagattgtggtgccggttgcccgaaaggcatcgccatgcgtttgagaggccactttggtaagcttccccatggatatactatgtacatagactgagcgtttttctgtttcaggattgttacaataggaaaatcctaggctaggagtaagcagtatgatatgatatattttttttatagctctcaagactataagtcactttcacttttctagattaaattaaatctcatgttagagcaatccaactcccttgttttagttgaaagcccatcccaactagttgggtcgtgcggaaaacgttactagtaatggatgtagtaataattggccggtaaactcgcagccgccttaatccacatcgataagcattggcgatcgtgtggagaagtgtgaaaatagcctgcgatatgctgctgcagacacaaatcccctggagcgactagaaagccggcgtggcatttggtcagctgctaaactacgcagaacgtgtaagttttctaaacacgcaaaggcaattaaaatttttaagcgacatacgaacccccacgaattgcacgcagttaacagggagctggacatcccacaaaaagattgactgcagcagcccagtgcgggaaaacaggaaaggtgcctcctccgccggtgccaccgaaacgtggctacacttgaatcgagttattcaatcaataacattctaatttagctataagatggcacttgccttagctccctcttatattcggagcacacactcttcaatagctcaaatagagagtggagaacacccttttccataacaacacctcgttgccaaagcaatcagccaggccatgtacccttttggccattgcagccggcttgtacaacatatcgtatgcttaatgcataactaatgaaccagcagctcctacgtttccagcacgacgctcgactccaagtcactggtggctgctggctggctgttttgtgcactggtgcattggtgcaattgtggcgaggctgtcactaggacatgccacaattgttggcctttaataccaatggtccaatgctgcacactgc

SEQ ID NO: 38936 - DNA, 561 bp, DROSOPHILA
atggggcgaaaaaggggtcgaaaggagtattgtccccccatttacaagcgccagaaagtggcgcgcgtcactaacaatggatacctcaactttatgaccgagtacaagaaacgcttttacggactttctccgcaggacatggtgcattatgcggctaagcagtggacccagctgtccatggctgagaaggaagctttcaagagcaagagtccagcacagtacgtggcctgtgagatgaaaagcgatgtcgccggaggacagcaaagttcttgccaaagacagtctccaagcgctcggctgagggaatcggagaggagatcgtccagatcgaagaccttgtgcagatcagcaaagaatcgtcagcgagggaagccgaaacctcagcaaagcaagcgcaggctcagtcacatgggctcggcagtggcatatatccacttcctgcgcaagttccaaaggaagaatactgagttgcgcaccatcgatctgctgaagacggcaactagattgtggtgccggttgcccgaaaggcatcgccatgcgtttgagaggccactttggtaa

SEQ ID NO: 38937 - protein, 186 aa, DROSOPHILA
MGRKRGRKEYCPPIYKRQKVARVTNNGYLNFMTEYKKRFYGLSPQDMVHYAAKQWTQLSMAEKEAFKSKSPAQYVACEMKSDVAGGQQSSCQRQSPSARLRESERRSSRSKTLCRSAKNRQRGKPKPQQSKRRLSHMGSAVAYIHFLRKFQRKNTELRTIDLLKTATRLWCRLPERHRHAFERPLW

SEQ ID NO: 38938 - DNA, 4019 bp, DROSOPHILA
cgctttgttcattagagcgcgcactttattcccctattttatgagtttcggttaaccagcacaacggaacccggctgctctggacagtgctatctatatccaatggatgcgatcgaggagggagcgcgaaaaccagaagattaactccgatccgtttcattaaacaaacgatccgagtaacggatacgatgcaagtggctcctggtgccaacgagtcttcaatggagatcgcagatggagcagaaagtcagaaagctagaaagccaacggatgtgcagaaacctaagccgcagcatgggatggccaactcccagcacccagctcccaactcccaagctcttggttctaactgtatgccagccgtagccgcaaaagttgatcggccagttggcgagctggccatttaggcgctcgatgagatgaggtgggcaaaatgggcaaaataagtgaaatgggagaaagacgatagaaatgggaagaatggtaaaaatgggcagaatgtgcacctgatcgctgggtactccgcgggctggcttgccactttattagccaatttatgatgccaccgttatgaacttctcactgtcaatattgccccagccaagtagctagatcggttcgaacggaactgctgaagctgttttcaatttggccagcagtttcgacaccaagttggtattgattggagctgcggatcggggcatcttggatttccacaagtccatatacacacaacgtgcgcggacaacgccaagttggctaaattgtttattgcatattgatatcacaccatttaaggcaagagcagccgtctttgcatacaaaagcaaccacagtctggagctccactcggcggcgctctccagattcgctgtgtgggctccactagcgtaggccaagaagtactacatatttaaatggggatcttggatagatagatagatgtatgcatgcatggagtacaagaaacgtatttgtttactcttattttacagataacatggccgctaggaactcactcactccacagcagggactgggcttctttgggctgctaatcctgctctgctcggcggttttgggcaagtcgcagatgtgcgaagtggaaacggggcagacgaacatcatcctggacatcgaggagagccgggagtcttgtaagtacaccaccctccttcttcactggattatacaatacatatgaaaatacaataaacacggccgtgttatcgactagccagcccatttaagtcgtttaacatggccttaaactggaaatatgagtttcaagacaactgcggcgtcaaatctattacgtggatgctaaaacatgaatggccatatgcttctcagccaaaatgctctgcggccaacctcgacttcaagatcatagactaaaagcacgaaaggtgcaacaccgtaattataattttagacgtgttccagcgcataggcagcccatcacatccacatcgcatcaaagaacgaaaagaaaagcacgtcagagcagggaaactaagtgtacttcgaagatacattgtacaatttacatgccgctgaggtgcacctcggaaaaccttaattggtttttagcctcattaagcttgcagctagaaagaatgtggggtcaagaatagccatcaaatattgctcatacgacgtgttgtacatgcgattagtgtagggaagcgatgtatctccctcttacagatacaatttgaataaattcattacatgcaactataagatataatagtgtatagtacttttagttcgttatgcaacttcagagctcactagtggcgccaaataacaagagcacgcgaatggtaaagactttctcgtgcatctatgatgcacctacgacgtgtgcccacatatgtacatatatgtgcacacactgagatacttcgcaagtgatcgctgcaacttgaccccaaatgcaaagagaaaggctgctgtctgcagttttctcggcttgcgcgttttcccgccgatccgtttgccggtttggccatacttgtaccaataacccagcttggtccattagatcccggctcttactttattatttatgtgctttccgcagtcatcggacagccgaccacgccgccagagctgccgatcttcggcgatccggatacggagattgctctcaacttggtcttccccaagggtcagcccatcttccagctgaacggcaagaagctgcagctgctgcagcccctggatcgcgacgaggagaacctcagccacatcgtcttccaggtgtgtagaccattctccggaagcactttccactgcaaggtatcatcgactctccacgtctgcccgtctcgtttcaggtctcctgcaccaccaggtccacgggcaagaagcgcaccattcccatcattgttcgggtgtcggacataaacgacaatgcgccgcgcttcatgaacacgccctacgaggtcaccgttcccgaggtgagtaagtgctaccgctggagtccacgaccggaaagtggacattttgcagcgtgcgcacgatcagcatttcgtcgccccaaagttgcccgcatttctcctggccgtggtgccgctggctccttcaaaccgggtgccaaacggacaatcacgctggaaatagacacaagtacactgcgggaaatagggttccattcacccagattaggttcaagctttagttgtcgtgacagattggtgtacctgaacggtatttgtattagctcagagcatcttaaatatccgtatgtggttttcggtagctacatatgctgtgtcattttttccagtgcactagtcaggtgaatgtgcatagtcttctcgacgcgacagcagcaactacatactgaacactaatgaagtggtagtgaacatgttttcagcgcttcggcaacacaatagcatgtcggatgcccagtacccaggcatccaggcatccaagtatacccactctgccccagcatcagaatccgcagaggggatcatgggatcggcggcaagagttgcaatagaatcgcctgccggctcttaatcacgtatttagactaataacgttcaattacagaactgttgacatattagaaagcagcagagctggcaaaaagctgaagacaaagcggaaacgtgctatataggaacccctgcgagatcattaccgtggacagagtaatgtctaccatataggcttgtatggaattgaagaaaccccacataattagtcacacacacacccattaagacataaaaagtacggaataatgagttaagtcgtttgtggatggaaattataagagattgaaatctccaatccgaaatcactttgcaatcattttgaaatgcaaacgaaagctataaggacctacatatatgtactatttatatcttttatgacctgcaaaccttgaagaaacccctttggatggtaaataaaattacaagccaatacaatgcaacacagctgaatataaatcgttcattggaattcgtcgcactcagaaaccctcgatcattcgaaatttatttaacaatgtgcggagccttcgagttcaggaagcctggtgcggaataaacaaaagcgaagccagcctgcactacattctacggatcggtccgcctttatggggtccctttataaggcgatctgccagtcaaactggaatataattggtatgcacttgccggccagggcgaacactcccgagggactgcgtccgctgtccagccggcgaggacaagacaacagcatcgcatttccccgccgctctgtcaaataattacaagagtcgagataaattatataccaccagagatcgggcgaaacaatatgatatctgcagcatcaatagccacagacatagtcatgggaatttgtggggctctcggctatgccgaaaataaaaaattatgaaaagcgaaaaagatgagctaagcgtgcatgccatttagcggaaaaacccgaaaacaaatcgcaaagttcagcagatgaacaatgtctgccaattctgggtacta

SEQ ID NO: 38939 - DNA, 777 bp, DROSOPHILA
atggccgctaggaactcactcactccacagcagggactgggcttctttgggctgctaatcctgctctgctcggcggttttgggcaagtcgcagatgtgcgaagtggaaacggggcagacgaacatcatcctggacatcgaggagagccgggagtcttatcccggctcttactttattatttatgtgctttccgcagtcatcggacagccgaccacgccgccagagctgccgatcttcggcgatccggatacggagattgctctcaacttggtcttccccaagggtcagcccatcttccagctgaacggcaagaagctgcagctgctgcagcccctggatcgcgacgaggagaacctcagccacatcgtcttccaggtctcctgcaccaccaggtccacgggcaagaagcgcaccattcccatcattgttcgggtgtcggacataaacgacaatgcgccgcgcttcatgaacacgccctacgaggtcaccgttcccgaggtgagtaagtgctaccgctggagtccacgaccggaaagtggacattttgcagcgtgcgcacgatcagcatttcgtcgccccaaagttgcccgcatttctcctggccgtggtgccgctggctccttcaaaccgggtgccaaacggacaatcacgctggaaatagacacaacatgtcggatgcccagtacccaggcatccaggcatccaagtatacccactctgccccagcatcagaatccgcagaggggatcatgggatcggcggcaagagttgcaatag

SEQ ID NO: 38940 - protein, 258 aa, DROSOPHILA
MAARNSLTPQQGLGFFGLLILLCSAVLGKSQMCEVETGQTNIILDIEESRESYPGSYFIIYVLSAVIGQPTTPPELPIFGDPDTEIALNLVFPKGQPIFQLNGKKLQLLQPLDRDEENLSHIVFQVSCTTRSTGKKRTIPIIVRVSDINDNAPRFMNTPYEVTVPEVSKCYRWSPRPESGHFAACARSAFRRPKVARISPGRGAAGSFKPGAKRTITLEIDTTCRMPSTQASRHPSIPTLPQHQNPQRGSWDRRQELQ

SEQ ID NO: 38941 - DNA, 4738 bp, DROSOPHILA; identical to SEQ ID NO: 26848

SEQ ID NO: 38942 - DNA, 1990 bp, DROSOPHILA
caaagcgcatcgtacagcggatatatcgcatctgtatcgtatcgtaaaacgaatcgtattcgcatccgtgtcggtcgcatctgcgtgctagtgtgtaaccccaaagatcgaaaacgagtttcgcaaaagagcaaagagccgagcggcggccatgcttatattccatatcgaataactgaatagccgaccaataaagtgttacttggcacatccaacatccaacgttcaactagcaatccaacttacaatatccagcatccaactagctccgttgcattggcctatattcaaaatagatcagagatcgactcgagagaccggaggagatgtggatgaggtggtgacgaggagctgcggaggagatcgccatgtgagaagagcaaaactagtttcccatttgcgcgcttatgctaagtaataataataaataagcgcagtagtctctggcttgccgttcgagaagtgacctaaaaatactggtttcgagtgcggttttggcgtgagaacgtgtagcacagcgaaggcaccaccaccaccaccaatggccaccacagccgccggatcagcagccaccaccaccaacacgatggtggtgaagcggccaggaccaccagtgccgcccaggcccaaagcagcagctcagctggccaatggagcaggagcccctccgatcattcagaagaagcccaccttcgtgagccagctgagtgcagtgggtcgtaccttggtctacaagtcgccaacggtcaatctgcccaagaaacaggcccagacccagacgcccaccacggcggtgccaacgccgccggtgaagcccctgaagctgcgcaaggcaccggatgtgcccacggccaagcccagggattcaatgacctcggtggtcacggtcaaccggcataactcgataagcgtgatcgggagcacgccacagaccacaccccgcaaggacacccgcttgagcctgggaaaggtggacttcgagagggcgggcctccagccggccagtcagccacttcccaggccacggaaaattgttcaagtgcccgtggccactctagatgtggaagacataccagtggtggctcccagcccatcatcaaatggactcttcaggcgatcaaagaccaccctggatggcagccagaaggattcggcatcctccccgcacaatggaggaggattcctgtccggacggaccgtggagatcaagaataatctgaagaacgccgccgagcgtttgttctcggagataatcatcaaccagagccagaaacaggcagccaccgacaccaccatcataaccaagcacgaggccctgaagcaggagtccgatgtcctggccatccagtcatcgggcaactgcatgaggatcaatgttaacggcggccagacgagcaccatgaagagctcgatcagcgtgggcaacacgccgcaaaagaagcaagccttccacgagatgctcatctcggagctggctgccatgcggaacaagtcctgctccctggagcagctacccaccgccaagtcgccgccacccaccacttccacgcccaaaagcgtggcatctcgcaggcgctacaactctatagatgatgccgacaccgaggatgtggatgcggacaacgtggaggatgccgatggtgacgtcgacgaggaggacaccctcacctacgcagtcaataaatcgctgaaggagaacattggcaaggagggctcgtcctcgaggaagcgctgcccctcgggctgctccacagactcctcgccctacggaaccgagcgatcccagcgcatccgcacctcggattggatcgaggtgggcgacaacggcacggcagttactctgactagctgccacatcagcctggaggactcgggcatggaggacgaggagcggctggacgacatgtcctcgggagtgggcgacagctgggacagcgtcaaggaggccgagagcgagaagcgttctcgcaacggaaagcggtgagtctcg

SEQ ID NO: 38943 - protein, 480 aa, DROSOPHILA; identical to SEQ ID NO: 26850

SEQ ID NO: 38944 - DNA, 3358 bp, DROSOPHILA
gcagaaggtccaaatgtcatgcttgttttctcaacttttcccagcgactcgacgtcccgtcttcattatggagtttggagtgtggagtatggagtgtggagtgtggagtatgcatgatgtacacctgtacgaagatccatccagcagctgtacaagtatcgttaggctgagcgcttgtgtgaatcatgcaaataaatgcaccctcagcagaacaggaaacaggcttcgtgcagatttgtatctttatctgctggaggagcgctctcgcatacgggaaagtgactcctgtccaagtccgaacgtctgcccgtcactctggacgactgggctggatgggctggctcctccaggcgactggatgcctctcctcacaattaatttacttggcaatgcgccttcaacgacactacctcgagtggtggcagtacttgggagcgccacgagattccagatcgctggcggtacttaacgccaagctgttgttgtttttcaggcataatctggaaagattcttaattaaggcatgcatgcaaggcgataaaaatgaatgtacgttagatttgtaatgatggtgccgtggccattttcctcgctcaattagagattccccagtgtcgattgtgctccgtcagcacacgaaataattggatgtgttttctgctggcacaccaatggcacaccacagtggagatcagcatagctccaaacagcagcattcgtgccgagaattgatcacatatatagttatgcagaaattaaaatgcatcacgttcgaaggatgcataagactttttctggctgagcattattgtctgaaatcggcgaggtctacggtctcctctgcagctttatggccaaaagacaggtggtgctgcaggaagagcacatacgagtaatgtcgcctaaggcaactggtttccgtgcagccaagagctgctatgaaggccactcagcagaattattgggttgccccaatttaatttctattcagaggcggagtcatttgcttagattgctcgtatatgcaacccaatatgcgcatgtgtgtttatttttttttacaataggaaaacatgtacttagactaacactatatgaattgatacaatttgcatactatatccgattcacgtataaataaaataatcaagtaaagttgttaaaacgtcgaccgaatttactatgtacagcagattgcagcactgctctgacttcttaagcgtttcagtttcggaattggattgcatccgactggctcgagtgacgtgtatggcaacattagggctatgactccgagtagatggtgcagcgcttgttctttcccacggaggccagcatgttgttgttgggactccaactgaccgcgtttacggcggtgctgttaaatgggagcagagaacgcatcattcaaggattaatcgcaattaagccaccaaggatgggccgagaactcggccataatgaagtaagcacttcacctggattctatggccaggccaactaagccaactaagacaaccaggccaaccaggccaagctggcccgccaggcatcactaaacttttactacccacctgtgtcccttgagtgtggcttccaggaacccattcacattccaaatgtatatagcgccatccgctgatccacaagcgatctttaggccgctcgagttgaaagaagctcgagcaaaatcacagctgatcttaaagtgttcgtttctatgggtgattgcaatgttgaaaaaaaaaaaagtgtaaaaagttagggtatatgactggctggctggcgcacacttacgtaaacgtggatataacttggttcttgcgtaaatctaacagtttaatagtatcgtctcttacagagcatatgaggtaattgcaatctgtggaattaacatgttgtagtagggattagtatggcatggcagatcaactagcattcagcactcgccttttgacaaatccaaagaggtgatcttggccggcattaagacgtcgtccgcctgcttctcggtgcgtatgtcccagaaccggatcttcttatcgtagtgcccactgatgatcgttgatccgaggctgtcggtggtgactagatcattgcagctggagccggcgaacttcgtctctatgcaggcgatgctgcgcaaatcccagatcttcagtgtgcgatcgtggctaccggtcaccactttgatgggctcctggacgtacttggcggccattaccttgccgctgtgacccgtcagcgtgtgcttcaatggcggagaggtcgagacgaacagttagtgggaagttacgttatagggcaggcattacagacatcccgacccagcatcttgtcagtcagcgaaagaaccattaaaagcgtaactcgggccagaagaccgcccgccaaacacctcttcaggcataccctcttctcttctcctggaaaccggctaattagccgcgcgaagtatctttcactagaacgcggcgtgcaattaaatagtgtccacagacattaaagcgactacagacatttaattacggcgttataaaccaggatctaaaaacaccacgcataactgccgcggaaaattcattgacataggtcgtagcatggtgggacatatttcgaagtgccactccgtcatcttggagccacctgaacccgtgtcattgacactgtggagcggggattctcgctttgagaactgtaaactgccgattatttatctccaaggcgagatgcctaatggtggaaacaagagacgagataagataaaaaaaaagacttcctgcgtatcagcgaaattgttgatttataacattcggaggaagctgcatgcagctacgtacataaatctgctatttgaaatactttgacgctgggaagggcactataaatcgcagcagctggcagcaaatggctgccgagccctttgaagggcatttgaaggcagccgcttaaactattaaataaataataaaagtcttttactaattgctaagtaaaagccgttccatggcgctgcccttataggtgcagtcgctcgctctttctctctggcagcctagcagcctagcagcccagcaagcgaagagcatccgagtccgattctcgaccggcaaccggtcaagtcgaacggtcaatgtacgcgccttgtgatcgctgggatcgcggaccagcgactccacctagcagcggcggtggctcaaacatgtttggccgtagcttgcggccgaagagtggagagttcgagagccaagaattgaatggcaagagcgtcttcggcgcgtgaaaagagcccagtcgagcctagcttagccggtttgccgctaataacgtggattgaaacgttctcttaaaacgtctt

SEQ ID NO: 38945 - DNA, 947 bp, DROSOPHILA
atggttctttcgctgactgacaagatgctgggtcgggatcacacgctgacgggtcacagcggcaaggtaatggccgccaagtacgtccaggagcccatcaaagtggtgaccggtagccacgatcgcacactgaagatctgggatttgcgcagcatcgcctgcatagagacgaagttcgccggctccagctgcaatgatctagtcaccaccgacagcctcggatcaacgatcatcagtgggcactacgataagaagatccggttctgggacatacgcaccgagaagcaggcggacgacgtcttaatgccggccaagatcacctctttggatttgtcaaaagattgcaattacctcatatgctctgtaagagacgatactattaaactgttagatttacgcaagaaccaagttatatccacgtttacaaacgaacactttaagatcagctgtgattttgctcgagcttctttcaactcgagcggcctaaagatcgcttgtggatcagcggatggcgctatatacatttggaatgtgaatgggttcctggaagccacactcaagggacacagcaccgccgtaaacgcggtcagttggagtcccaacaacaacatgctggcctccgtgggaaagaacaagcgctgcaccatctactcggagtcatagccctaatgttgccatacacgtcactcgagccagtcggatgcaatccaattccgaaactgaaacgcttaagaagtcagagcagtgctgcaatctgctgtacatagtaaattcggtcgacgttttaacaactttacttgattattttatttatacgtgaatcggatatagtatgcaaattgtatcaattcatatagtgttagtctaagtacatgttttcctattgtaaaaaaaaataaacacacatgcgcatattgggttgcatatacgagcaatctaagcaaatg

SEQ ID NO: 38946 - protein, 220 aa, DROSOPHILA
MVLSLTDKMLGRDHTLTGHSGKVMAAKYVQEPIKVVTGSHDRTLKIWDLRSIACIETKFAGSSCNDLVTTDSLGSTIISGHYDKKIRFWDIRTEKQADDVLMPAKITSLDLSKDCNYLICSVRDDTIKLLDLRKNQVISTFTNEHFKISCDFARASFNSSGLKIACGSADGAIYIWNVNGFLEATLKGHSTAVNAVSWSPNNNMLASVGKNKRCTIYSES

SEQ ID NO: 38947 - DNA, 3422 bp, DROSOPHILA
tcgtttatttatttcataaactgtattgtctttgtacaaacaggaaaagctcttacttacttgatgaacaaaacgggccgcttgacttgaactgggtatttcgctggcgtgaacaagcttaatgcatagtccatcccatgcgtcggctaattgctcaatgcaatcctctaggaagatcttagagaagccgtcctagcacctgatcatccggtgtcctcgaataacaaatgaggagtcaagcaacgggtgaggtccttgaggcaccgccgcccgtctatccgccacaatgcgagccagcctcgcctcgatctgacaccacttttcgaagagcaagcagccgtctgcgtggcgctcgtctaccagggccattgtcgggttgtcctggatcaactccttgtacttccaggcctaaatagacagatgcatctgcatctccgtttgtgattcttcccatttgagtccgatggtccgtttcgcttacgttgctgctgatcgctactgattggtgctctgcgctgaacacatcaagagcgttctaccctactccttgacacgtttgaagtatcactttccccctccgttccaagccctaggaaactaagaggggtctcaacttaataatgtgggtgcaccagatacccggctaacatacccttataggccggttttacgttcctgttctccaaggaacggggagttgaagcaaggcctggtttttacgtgaatatctagtcatgattaaggatccgtatttccgtgcttctgctgaattaatcttcgcagaagtaaacaaatctctgcctgctttctagcgataactgacacaacctacttcgatattggaagttatcgaggagtgtgaccgcaacataattattaatcttgtagtgcaaatatccggtatttcccaccgtttaagtacagtgctcactattgaatgtgcgtttagttacaatgagtagaatcctagattaagcatattaataacacataattgagctacagtttgttactaactctaagcgtaacggtgaagtttatttacgagctgaaatgatcgcttttaagccggcactttttacaaataatatataaattaataaaaggacataagaataacatgcaatggccaaattacttctctttcaatttctatgcccttccctcgtggaaattaatcccccgcacaataaatgctcagatcataaaatcgtttaaagtataatcatacctaagtgtaaataatcatattgcccgccttatccacctacaaacacaagccgttccaatcgtcgatgggctagttgtccactacgttcatgtccaggagaagctttttggtctgcagatcaatgagccgccgcttggccctggccaactcggccatctcgttgtagtatatcgtttccgccttgagcttctcgtccagctgtgtggtggactccgccagcgaggcgctgtcctgcggaatcatgttctgcatctccgccggctccggctcatcgcacctgtccaccaccacggagtccgagttgtccacaacgtactcgtagaagggttcctgcagcgaaatcgaagtgaccttaaatcaaagatcgaaagcatgtagaggctaaatgtgggtaggggagcggaagtggtccgtggacaaacctcttcttcaaggtgatcggccaccttttcgatgatgctgtccacatcgtcaaagttgactttctccaggggatcagccgcctgcctacgctccaggctggcgtaggagtccttcttgggtgtcatgaggtgctggtgcgagtgattcagcgtcttggccaggctggtgtgacgacgcacaatgtgtcgcatcagattggaggacgagtgcttcgaggagagcgtcttgccgcagtgcatacatttggccatgaattcggagatgcggataaagtgcgcccacagtttattgttcttcccaatgaccttgttgcgcatctcctcctggctgtgccgctccatctgctcttgttcgagcttcgcgttcatgatgccgcgcaccgccgacttggtctcgccctctccgagctccatgctcaggtcctcggaggcggaggcttccagctcgtccttcagctccgccagcatcttaccctcctcgccggcaaaaattgatcgggccaagagcttgtggttccggattaagtggcgcgtcaagttggaggatgtgtgtttggaggacaatgtcttctcgcagtgtttgcactgaactatgtactcggtcagtcggtggaagtgcgctagagccttgaagtttttcccaaccatagctgcttccgcaaatccgggagttgcagtttcgcctgctcctggccaatttggtggcaattgtcgcgtttatttatcaaattgcttttattttcggtgcaaaatgagggtgtgaccgtgtgcgcgaagccacaagctaacattttaccgagctgttacgaacgcaagctggccacaccttattcaacgggtaatatatttcgacagcagtagtggtattctcaaatgttaagtttataattaaataagtgctcctgttgtattccaaaatacatgtcctgatatatatcttaattgtaaagcaatataattagatattagtaaatacaatctaccactatggctcataaaaataattggtttcacattgcttcatacatttttaactaaatttcactgattccaggtgctaaaaattaatatttgaattaatgtaacagcaccgagtgtactgtagagcgcgcgctaacagcgcagagttgcccaaccgcggcaactgtcaaaaagataaccctacttttttgacacgaggtgctgtgcgtgtcttttcctttctttctcgctttttactcgaacatgggtaagtcgactctcgcaaattgcgtcgaaatatcaagaaaatgggctcaatacggcctgcaaacaccatgaaagtgcgcacaaagtacgtttacaacagcatcgagaaaaaagcaacggggaatgtgtgaatttaaataaatatccgtgaatttaacttggtgcggctctttttagtgcgcccccaaacgtgcccatgttcttggttttttttcgacttttccgtgcgccttgtactaacatggacctatttctcaatcaccaggtattagccgcgatagtgcacacaaacgccgggccaccggaggcaagcgcaagtcgctccgcaagaagcgcaagttcgagttgggacgccccgccgccaacaccaaggtaaggataatctccggataatcgcaatggcgtgtattcgaatgccagggtccagtttctcatactcccattaagttttattggtcggtgccgaaatgtgtgcttgaaaaccaagcacattttcattgtttttatcttaccatcgtgacttggatagtatacacatggtt

SEQ ID NO: 38948 - DNA, 1351 bp, DROSOPHILA
acacggtcacaccctcattttgcaccgaaaataaaagcaatttgataaataaacgcgacaattgccaccaaattggccaggagcaggcgaaactgcaactcccggatttgcggaagcagctatggttgggaaaaacttcaaggctctagcgcacttccaccgactgaccgagtacatagttcagtgcaaacactgcgagaagacattgtcctccaaacacacatcctccaacttgacgcgccacttaatccggaaccacaagctcttggcccgatcaatttttgccggcgaggagggtaagatgctggcggagctgaaggacgagctggaagcctccgcctccgaggacctgagcatggagctcggagagggcgagaccaagtcggcggtgcgcggcatcatgaacgcgaagctcgaacaagagcagatggagcggcacagccaggaggagatgcgcaacaaggtcattgggaagaacaataaactgtgggcgcactttatccgcatctccgaattcatggccaaatgtatgcactgcggcaagacgctctcctcgaagcactcgtcctccaatctgatgcgacacattgtgcgtcgtcacaccagcctggccaagacgctgaatcactcgcaccagcacctcatgacacccaagaaggactcctacgccagcctggagcgtaggcaggcggctgatcccctggagaaagtcaactttgacgatgtggacagcatcatcgaaaaggtggccgatcaccttgaagaagaggtcacttcgatttcgctgcaggaacccttctacgagtacgttgtggacaactcggactccgtggtggtggacaggtgcgatgagccggagccggcggagatgcagaacatgattccgcaggacagcgcctcgctggcggagtccaccacacagctggacgagaagctcaaggcggaaacgatatactacaacgagatggccgagttggccagggccaagcggcggctcattgatctgcagaccaaaaagcttctcctggacatgaacgtagtggacaactagcccatcgacgattggaacggcttgtgtttgtaggtggataaggcgggcaatatgattatttacacttaggtatgattatactttaaacgattttatgatctgagcatttattgtgcgggggattaatttccacgagggaagggcatagaaattgaaagagaagtaatttggccattgcatgttattcttatgtccttttattaatttatatattatttgtaaaaagtgccggcttaaaagcgatcatttcagctcgtaaataaacttcaccgttacgcttagagttagtaacaaactgta

SEQ ID NO: 38949 - protein, 309 aa, DROSOPHILA
MVGKNFKALAHFHRLTEYIVQCKHCEKTLSSKHTSSNLTRHLIRNHKLLARSIFAGEEGKMLAELKDELEASASEDLSMELGEGETKSAVRGIMNAKLEQEQMERHSQEEMRNKVIGKNNKLWAHFIRISEFMAKCMHCGKTLSSKHSSSNLMRHIVRRHTSLAKTLNHSHQHLMTPKKDSYASLERRQAADPLEKVNFDDVDSIIEKVADHLEEEVTSISLQEPFYEYVVDNSDSVVVDRCDEPEPAEMQNMIPQDSASLAESTTQLDEKLKAETIYYNEMAELARAKRRLIDLQTKKLLLDMNVVDN

SEQ ID NO: 38950 - DNA, 2384 bp, DROSOPHILA
gcgactataaacttaaaaataaactagtttgtgagcatcaaaacaattttgtttaatttggcatctcgaatatatgcaaatatcgttttataaatcactggtttcgctagctttaagaccaaggataaccgcattttgataacaaattgagaaatagtgttccatctgttggcacagcagggagaacccattatgtgtgtggagcagatgtcgccaagtcgattcctttgccgaatattcctcgaaatcaatctttaaatataacatttttacagaaaggcgttggcgtttctttcggcatttgacttgcggatcgagaagcgaccggttttactctataagtagtggctgctactaagcagaaaaatatgacttatccactgtgtgtgtgcctcgcgcgtcgcgagcttgaaagatctatgcagatcctaacttttatatattaggggtcgcacttcggatgctttagtatagctcggtaactccatcgcgcatcaacatggcctcagcgaaattggtaagcagctgctcagggcggaaccctattccgattcgaattcagctactgatgctgattcgcatccggatacctcgaccgtgttccagacctacgacttggtattgaccagggggcggcaatgtggcctggcctggcatgtgaagtgtgtgcataatccaaatagtggctgtcaatccaatacacgatattgatgcagctgtgctaatagcccgtcttgctgccaagttacacagttcgcagtttaacttttggatttttattattggatctattaaataaaactagtttcaattgtgatcttatttaaaaagtgcaaagtagtgagtgagatattcaattctttaaaggtgtacaaaacattgaattagcacgctataagtgcatcacttacataggcataattagttagtcaaatatgatccaagactaatgtgacccgttcgtttctcacagctacttttcactgccctggtggcccttatggccgcccacagctcggcgggacttctggactacgtcttccccaccattgtgtcggagtattacaaccaggcgccgaccaaggagggataccgcttcgcgtgagtactttccgccttatagacacagatcggtgttaatgtgccattcgattgcaggtcggaggagccaaatggcagcaagcgcgaggagatgggcgtgatcatgaaccccggcactcccgacgagcaactggtggtcatgggtatgtactcctcgtacgatgaaaagactgacaccgagactgtgacgatgtacaccgccgacaaggatggttacaaggcccgttaccagatcaagaaccggaaactgagccccggagccctgaagtccgctgctggataaggagcttgtagattagagttgtaaataaatgagtccaaaatatatgcttgcttgctaagaattttcatttccactcgccactggccaagatcaagtttagttgtttcaatatcagtggaccgcactctggatagacgagttttctgttgcgtaatagttgtgacctttaaaaagtctttacgcccgacaaattagcgcattctatagtaatgatggacccgacacccgaaacgagtttcaagaatctcgtatccatggacaagcacattcggtgggttttcgccacttcatgccatccactcgatgtatctatacacaaagaaatgtcgagtcaggtgaagcacacgacttaataagcgcctacagctcaaaattatggccagatttgacagactaaattcttagcatacgtataatcaaattcttattttagtgatcgccggataagaacaatggagatccaaaaattagactggttcctggaagcatttggaccaagaaacttgtttccatgataaatgattagtcgaggtacaaggtaatatttatgtatttttcgggggttttttgtaagcctacatgggaaaccttgtccgctcgggtgacgtatttggcttatttggcagctacaaaggaaacaagtttaccaaaagatgtgggtgggaatttactgagtacgtcttcataattattaataattaatcatctatacaccagtcggccggcgatacgaaaatgcaatacctttggtaattaaacgaaggctgcccatcgttttctgcagaagtcgctcggcaaaccttattaaattactataaaaaagctattcattcatcaagtgggtttttgagtgcccaaattactcgattagtaatacgaaggccacctgcaaaacttagccatattaccctttcttaggtcgtctgaagttaatgattacaatgaaaatgggaagaagaacaacaatagatacatatgtatggcataaaatgtatgctgc

SEQ ID NO: 38951 - DNA, 327 bp, DROSOPHILA
atggccgcccacagctcggcgggacttctggactacgtcttccccaccattgtgtcggagtattacaaccaggcgccgaccaaggagggataccgcttcgcgtcggaggagccaaatggcagcaagcgcgaggagatgggcgtgatcatgaaccccggcactcccgacgagcaactggtggtcatgggtatgtactcctcgtacgatgaaaagactgacaccgagactgtgacgatgtacaccgccgacaaggatggttacaaggcccgttaccagatcaagaaccggaaactgagccccggagccctgaagtccgctgctggataa

SEQ ID NO: 38952 - protein, 108 aa, DROSOPHILA
MAAHSSAGLLDYVFPTIVSEYYNQAPTKEGYRFASEEPNGSKREEMGVIMNPGTPDEQLVVMGMYSSYDEKTDTETVTMYTADKDGYKARYQIKNRKLSPGALKSAAG

SEQ ID NO: 38953 - DNA, 4334 bp, DROSOPHILA
ttcttaggtcgtctgaagttaatgattacaatgaaaatgggaagaagaacaacaatagatacatatgtatggcataaaatgtatgctgccagttggtttgtcatgtttgccatctgagcaagctaagaaacttgtttaaacctaatggctaattattgttaattaatcaagcttttaacacttttgtgtgcttacagtaaagctatactccgagtaatggtatgaaggtctcttgaaattgtaatcatagtcgtacatacatatgtagataaacctaaaaaatgagcgttaaaataatatgttatttcattattgtttatacttgaataaagtaataaatttgcattatattgatttatataaattcgatttaatttgaattatcacctgaagggttattaccaaataagttatatgattgaaaaatactttttaagctgcgaataccgttgtactgtttctacaagaccttcttcgtgtaacaatcagcttttgtacatagttaaacgagcttttgtgactggaaccatgactgcacattgtacgtggtagctgtgtctaagcaatccagtgctgtcccaaaatgtttgggacaaagtcggacttgacggcaaaagctttccattgttggtggaagggggtttttgtggcttggcgcgcttttccgatttgtgcctgttgccgcggaagtgtcggttgccccaggtaactgaccaggcataaagcggcccaaacagagagcgggctataacaatgtcacccgcatccgcaccaccatatagccccgagaacgcttggattacaatggaacgtttagttcccggtcgacgttcgacggtgtcgaatcagcttttccaaatagttcggatatcggatatcgcccatatagagtgtacttttccacaatcgcaccgttgctgtagccgcgtggaaagggaaatgcggcccgaattaggaacacccgaaagtgaccagaacgctcataaataatccagtgaaaatgaaagcaaatcccgcgattctgctcatttccttctcgcttctggccttccaatccaattgtgtagctacgcaaaagtcgcagcttggtcagccgcttatacaattgagtcacggtgagttgagcatccgccgagtgaaatttcgatgtatatttgaccagaaccagaggttctgccgcatttagggtgcaagtattttgacctttaacgcttcccttgctttacgcactggctgagagccatgtcatacgaccaaaattcatcactggtcgcagcaaaaaatttgggacaatcaatatgggctaattgcaaaaccgaaaggcaaagaggactgacccaggtgattcgacctgccaaatcaaggcaggtgtatgcctaattgcgggcccaacacgcaagcaaattgtcaagttcctgtctttcggttttcggaaacgcaggtgctaatcgataagttatgcttttgttgtccctgaggagggggtataccatccaaaaccaatgcatatagacgaacttgtcgctggagcataatttgtgcggtggaactgcattcattgtgggaaatatgttgccattagtgcaattgatcaaacaaactcgaaagcctgctaccaaaataggggtaataaaaccgaaaaacagcacttaatacaacttggagaatgagaaagacacgagaatatatattaaactttaggatatgaattacatatatacatttatttccaatataagtttaaaacccctctataaagttatcaaatcagatactgtgtgttgtttactttctatggaaacggggtgaaagttcaagaaacttgtaagccaaaaataaatccacgacatttccagacaacaacgacgatgactatccagaagttaaggacgaaattcacttggaagacttcttttggactggctcgggggatgggccaccggattttctgaagaaggtgcacacggggattaccaagggcaaggaaacagttttcaagaccgaaacggtggtggccaccatctatgtggatggaaataatgtaagttaaagcacgggataactccgaacaaaggacctatgttaaagattgatttacaggagatcgacatacccatttgtctggactgcaagccagatgatggcggcggcacctgggacatgggtggcccaggaatgcctcctctgaactactccgccacggaccgacgttattggctgctgaccgtcatgtcgggattctatacggccaaggataatcccacgttggaggagaagctggcacggctatatcgtctggcttttaccaggtaagaatagtttaagcaaggtatgaaagaagtacttaacttacatctcacaagtagacaacaaaccaggcaccttggcattaatggagctcaacaaatcgaaggggttaacctaccggcacctcgagaacgtcgaaagtctttgacgctaccgacgagagtggaaaccacgacgggatcgccagcagatgatgtcgaaatactggacatgcaggatgaggacgagcagcactacataaagagtgtgaggcgactgggcgaagacaccgagtgggccagccactcgcaggaggagcaggagcaggagcagtccgaggagcagctcccattgggggtcacaccctcgaccagcacggaatcgatagattatggagcatacgttactctgatcccctgggagctcatacagcagaatgggaaatcggaaaagttgcgggaaatgcacgaaaccttgttgactaagcaaccgccggtgcaacaacaacaggaacaacaacagggggcgcaaccaccaccccagacccatccccaaagccttccccattcccagtcccagtcccagccactttatagggacgagcacgtcagagttgtcatacacaacctaacacaaattagcgaggcggatgtgcaaaagtggagcaccaacaccaatgggttcggtaccatggaggagcacaactacgtcaacctcaaattgtgagtgcctgccgaactggttttcaatattatgagtttgattaacccacaaagtgcactcacataaacatctaaagtggcatgagtcgagttttgaatgaattcatgtaatatttgtttgatttatattttttgtttttagcagcaatgatcgaccgatagccaaccaaacggagctgatttacacggttctggtgaatggtcgacctgttttggccacaacagcagcaaaggacatggaactggtcagtgaatccgaagcggtgaagacatttggacaggccgtatatatgaaatctgaacgtgagttgatttatctgcaatagttccgatatatacgtatgtatcgtattttcttttaatatagcctacatcagggagcccacggcaaccgctttggctcctgttcctcgaagtggacaggctggattctttaactcggtcaaaaacaacgtggccctggttgtcatcagttctttggccatactgctgctgatgctgctcctcgtggcggttctactcctgggacgaacccgatcccggcaaagagaacttagtgcagtcaacaggtatgtcctttgcggaatgaaagtattttttgcaaggaatatatatatatatatatatccccttttcagaaactcctcccgcaacgaactcctctccgatggtcaatcaatgcgacctacgactagtgagaggaccgaaggagaaccaagtccaggacattcccaatcccgggaggcaggagtaaggaacttctcctacgagagggagccacgcatcagtttcccagctccgccgcaggagacacgatcccgtcgagagtccatttcctcgtccacggacaacacttccgattcctccgtttactgccctatcaatccgccgagtgccgatgtccaaaggatcctggacgacaaggctgcccgcttgtttgacgcccataagaggcgtcatcagtacgatcgagccgaaggtcacgaggaaaccgtttacacatccgtggtgtcggagaagaagagcgacaaaatgcgacacaagtccagaaggcgctacctgaacgagaaccgagtgggctccttggagacgagtccggtccaaggttccctggcgggtcattcctccgctgaggagtcccccgaagttatgcgccggagctacgagaacttccaacgaagcgaagccttcaatccgcacaacaactaccaccggaacaagttgctgacccaaaaaaccggcagaggggcgtccgccgaggccatcaacagcgagatgatccggaatattcagccatccgacaagtcggatacggccagtgtggga

SEQ ID NO: 38954 - DNA, 1335 bp, DROSOPHILA
atgaaagcaaatcccgcgattctgctcatttccttctcgcttctggccttccaatccaattgtgtagctacgcaaaagtcgcagcttggtcagccgcttatacaattgagtcacgacaacaacgacgatgactatccagaagttaaggacgaaattcacttggaagacttcttttggactggctcgggggatgggccaccggattttctgaagaaggtgcacacggggattaccaagggcaaggaaacagttttcaagaccgaaacggtggtggccaccatctatgtggatggaaataatgagatcgacatacccatttgtctggactgcaagccagatgatggcggcggcacctgggacatgggtggcccaggaatgcctcctctgaactactccgccacggaccgacgttattggctgctgaccgtcatgtcgggattctatacggccaaggataatcccacgttggaggagaagctggcacggctatatcgtctggcttttaccagacaacaaaccaggcaccttggcattaatggagctcaacaaatcgaaggggttaacctaccggcacctcgagaacgtcgaaagtctttgacgctaccgacgagagtggaaaccacgacgggatcgccagcagatgatgtcgaaatactggacatgcaggatgaggacgagcagcactacataaagagtgtgaggcgactgggcgaagacaccgagtgggccagccactcgcaggaggagcaggagcaggagcagtccgaggagcagctcccattgggggtcacaccctcgaccagcacggaatcgatagattatggagcatacgttactctgatcccctgggagctcatacagcagaatgggaaatcggaaaagttgcgggaaatgcacgaaaccttgttgactaagcaaccgccggtgcaacaacaacaggaacaacaacagggggcgcaaccaccaccccagacccatccccaaagccttccccattcccagtcccagtcccagccactttatagggacgagcacgtcagagttgtcatacacaacctaacacaaattagcgaggcggatgtgcaaaagtggagcaccaacaccaatgggttcggtaccatggaggagcacaactacgtcaacctcaaattcagcaatgatcgaccgatagccaaccaaacggagctgatttacacggttctggtgaatggtcgacctgttttggccacaacagcagcaaaggacatggaactggtcagtgaatccgaagcggtgaagacatttggacaggccgtatatatgaaatctgaacgtgagttgatttatctgcaatag

SEQ ID NO: 38955 - protein, 444 aa, DROSOPHILA
MKANPAILLISFSLLAFQSNCVATQKSQLGQPLIQLSHDNNDDDYPEVKDEIHLEDFFWTGSGDGPPDFLKKVHTGITKGKETVFKTETVVATIYVDGNNEIDIPICLDCKPDDGGGTWDMGGPGMPPLNYSATDRRYWLLTVMSGFYTAKDNPTLEEKLARLYRLAFTRQQTRHLGINGAQQIEGVNLPAPRERRKSLTLPTRVETTTGSPADDVEILDMQDEDEQHYIKSVRRLGEDTEWASHSQEEQEQEQSEEQLPLGVTPSTSTESIDYGAYVTLIPWELIQQNGKSEKLREMHETLLTKQPPVQQQQEQQQGAQPPPQTHPQSLPHSQSQSQPLYRDEHVRVVIHNLTQISEADVQKWSTNTNGFGTMEEHNYVNLKFSNDRPIANQTELIYTVLVNGRPVLATTAAKDMELVSESEAVKTFGQAVYMKSERELIYLQ

SEQ ID NO: 38956 - DNA, 2538 bp, DROSOPHILA
gatcgaagatcaggagaacgaggatgaggacgacgaggtggaggtggaggtgggaaacgagctggacgaggagggcaacagccgggtgtcctcgtccatcgagtcggtgcgattggagggcggtgctgatggcacgtcgaagcatctgggaaccataccaaaggtcataacgacgcagccaaaggtgctgagggactcactggccacggccagcaaggaccagaagccggtgcccaggatgcggagtgccccgccaccgccacctcccgccgtgctgcaatccttgtccctggagcgaaaaccgccggctccgtcacgacccacatgatgttacctctcggacttcctcgccggagtcaggatggtcatgtgcaaggcgatcgtgagcgatgtgcccgcctcatccgcgtccgcgtcccttggaggcgatggagccccgcttggccgggacgcgcagagctgtttgggcaaccagactggccaggtcctccaagcatagttttagttgatatatccgataaacaaggtgtacgagcgattacgagcgaactgatccaaattctgggtgcactggcagcagttctcgaagtgcccccacaaagaatcccgttgcgaagcctagattatctgctgcttacctcaatataggaagacccaacataatatgtataattggtagaattcgtgagaccagcctctgtggttaggagtcctttgtgatcttcagttgtaagtttattgtacatttttctcttgtggtttgggctgatgggtttcaccgataacacttgtttttgtttaatagccttactcgttaagcttagctatcgaatgcagtgtatcctggatcgatctgcggatcctgtgcatttgaccagtaacatttgtatatagcgattttcccggctagctgctgaacattttataaacctaacgaagagcatacagaataaaaaacttgaaagaagcgttgtttgttttgggtgtcgcatttgtatttctagatcaggctaactccatccatgcccacttggatgcagggaaaatcgtagctggcgacctggttcgtggcataatcggtataaaaggtgggacaggccttgaccgccactcctgccaccttgatgtttactttgatgcacatgtccagggaaaccattgagatgacgggaatgcaatatgtgggcgggttggcggtgctgatggatagcgcggccaccgaatttccatccattgtggcccccaaattgatggttccactggtcaagccaatgcccaaagtgaggcagacttgaaggggaatttggtataaggtaagggttatatgaatgtgtgtatcctagctacataccggtactattttgactaaggagatcaaccgaaacactctggcagcagctgcaggacatcgttagcgagcattggcatccctgggtctgtgccgacgaggataaaagtccagctgcatcgacattttcatgactaaggattccaacaaggatcaccaggaatccaagcagcaggacgtgagacttcattgtgaagacgcctctaaaacgtctgagcatcagaggttttgccaatacgcttttgtccagcaccacttgccaatcagtactttaaatattaaatgtccataatttaatttaatatatattttcacaacttaattatttttccgattggttcatttactttgtaatttagtcagcgattagctcaaaagtcgagcaattaaaagcaacaccaaaaaattaatacattgggggtttttttgaatttttatattttgtttttataaattgttgaaattcgtataataggataactattgcattttgagtgctgccatctatcgaggaagtgtaaatgtagtaaatgtaaaaaagatgtatacattgtgtataaatacattgagtgtcgtaggagccagcttttttcacttgacttactagattcttcaaacccctaatattttaaaccgtaagcactaaataacagtaaacgaataaaaatatgttaaagatatataaataactattttaaaaaatatgataattcaacgtgatattaacaaaaattttaaagcatacttttgggcaacgagagctcaattgtttgcgttcacacaagcatatttgtaaaccatactcaaaatgaaaacaatagtttgaaatatacataattatcaatagtttgtttgtttgtattcttttatgttgtgttatgttctcagagaactggacttttgtacgttgttttttttttctgagagtttgtcaaacagatacatttcaattccaaactaataattcggtaaagagttcctgctttatagcaagtatacaaatctgtgcaatctcttcgacttttcggcttctaaagaaatatttaattatattggtgctgtctagagcgttgaacctcaaaatgagattttaattaatgggtaaaaagcaatcgcttaagtttgagtttcattttattgccaatcaggaaaacgtcaattcaacaccaatggacctgtacacaaatctg

SEQ ID NO: 38957 - DNA, 477 bp, DROSOPHILA
atgaagtctcacgtcctgctgcttggattcctggtgatccttgttggaatccttagtcatgaaaatgtcgatgcagctggacttttatcctcgtcggcacagacccagggatgccaatgctcgctaacgatgtcctgcagctgctgccagagtgtttcggttgatctccttagtcaaaatagtaccgtctgcctcactttgggcattggcttgaccagtggaaccatcaatttgggggccacaatggatggaaattcggtggccgcgctatccatcagcaccgccaacccgcccacatattgcattcccgtcatctcaatggtttccctggacatgtgcatcaaagtaaacatcaaggtggcaggagtggcggtcaaggcctgtcccaccttttataccgattatgccacgaaccaggtcgccagctacgattttccctgcatccaagtgggcatggatggagttagcctgatctag

SEQ ID NO: 38958 - protein, 158 aa, DROSOPHILA
MKSHVLLLGFLVILVGILSHENVDAAGLLSSSAQTQGCQCSLTMSCSCCQSVSVDLLSQNSTVCLTLGIGLTSGTINLGATMDGNSVAALSISTANPPTYCIPVISMVSLDMCIKVNIKVAGVAVKACPTFYTDYATNQVASYDFPCIQVGMDGVSLI

SEQ ID NO: 38959 - DNA, 3801 bp, DROSOPHILA
acgttactctgatcccctgggagctcatacagcagaatgggaaatcggaaaagttgcgggaaatgcacgaaaccttgttgactaagcaaccgccggtgcaacaacaacaggaacaacaacagggggcgcaaccaccaccccagacccatccccaaagccttccccattcccagtcccagtcccagccactttatagggacgagcacgtcagagttgtcatacacaacctaacacaaattagcgaggcggatgtgcaaaagtggagcaccaacaccaatgggttcggtaccatggaggagcacaactacgtcaacctcaaattgtgagtgcctgccgaactggttttcaatattatgagtttgattaacccacaaagtgcactcacataaacatctaaagtggcatgagtcgagttttgaatgaattcatgtaatatttgtttgatttatattttttgtttttagcagcaatgatcgaccgatagccaaccaaacggagctgatttacacggttctggtgaatggtcgacctgttttggccacaacagcagcaaaggacatggaactggtcagtgaatccgaagcggtgaagacatttggacaggccgtatatatgaaatctgaacgtgagttgatttatctgcaatagttccgatatatacgtatgtatcgtattttcttttaatatagcctacatcagggagcccacggcaaccgctttggctcctgttcctcgaagtggacaggctggattctttaactcggtcaaaaacaacgtggccctggttgtcatcagttctttggccatactgctgctgatgctgctcctcgtggcggttctactcctgggacgaacccgatcccggcaaagagaacttagtgcagtcaacaggtatgtcctttgcggaatgaaagtattttttgcaaggaatatatatatatatatatatccccttttcagaaactcctcccgcaacgaactcctctccgatggtcaatcaatgcgacctacgactagtgagaggaccgaaggagaaccaagtccaggacattcccaatcccgggaggcaggagtaaggaacttctcctacgagagggagccacgcatcagtttcccagctccgccgcaggagacacgatcccgtcgagagtccatttcctcgtccacggacaacacttccgattcctccgtttactgccctatcaatccgccgagtgccgatgtccaaaggatcctggacgacaaggctgcccgcttgtttgacgcccataagaggcgtcatcagtacgatcgagccgaaggtcacgaggaaaccgtttacacatccgtggtgtcggagaagaagagcgacaaaatgcgacacaagtccagaaggcgctacctgaacgagaaccgagtgggctccttggagacgagtccggtccaaggttccctggcgggtcattcctccgctgaggagtcccccgaagttatgcgccggagctacgagaacttccaacgaagcgaagccttcaatccgcacaacaactaccaccggaacaagttgctgacccaaaaaaccggcagaggggcgtccgccgaggccatcaacagcgagatgatccggaatattcagccatccgacaagtcggatacggccagtgtgggatccttcctgtcgatggcctcggtccgggcctttcccaagagtactctgccggaaccactgaaccgcgtactggatcccgtcttcgtcacctactacgacaacgtgaacgcagtggcgcctcacaactccacaagatccctgcgatcccacaagtcgcagggcagcaaggacaacaccattgccactatcgccagttttcccagtcccaaggcaccgccgtcggtgaggaatgtccgctccgcctcgcacagcgacaatccggatccgggagtcgtgggtcccgtggtctgggagcggcacaagaagaaacagacgcagggtgagccgggcggagaaaccccaaagagtaacaataacgatgacgatgaggacgatggcgacgttcgatttggggccaagtcgcgttactaggacaacccgtagtcgttgatttagttattgttattgcttgcaccaatcctgataacccgataaccaaaacgtagctactaacaacgtagagacccacctctccagtcctctccatatcagacgacctggtaaagtcattcctccgcctatcgtactcaacttctccaatcgatcttccccagaggcccagacctatgccgactacaaccccagtccgctgcacaatccgtcggccattagaaaccactacgaggggcttctggagggagccctgcagatgtactccagccaggacgacatacccatgcccctgcccacccagaatttcaccaacaaccggagggctacgaagcgcgagcacaggggctcatctgcgggattgccgaggtgcggatctatcctggaaatgactatcattctcaactcaagtaattgatattccagctttcatccttcggcggaacccaagagcttagctgaacgtccggcaaccgctcagccggagaagacgtccaagtcggcgcactcgacgcaacctccgtcgcctacttacagtgcctggggaggtgggagtatgtacagctcccactccaccctgaatcgtccagtgagcgcaggacccttccagaggatggaggcccgattggatgcgactgctccatcgggcagtagaacgggaactgcaccccttatcgaggccatacagtccgagctacgaaagttcaagcaacagcaggagtagagcccacaacggatgatcttagccatgtcatggcaatggcgtatcattcatgtccgaaccaaaactgtttgcaattcatttagaataaacttttcttaatactccaaaaggaatcccagttgtaacgcggtacttgagcaggctactttatatgatttattatatttacatacttgaaatggcaagaaggacacgcaaagacattaattacaagctctcaccagcccttattcataatatatatttgaccgaaaaacatatttgctgtatacccgttacaatattcaattagaagcgttctctttgatatacaaaagtatctacgacattcagagtgtcaaaagggggagtcagtgtgtctagttgagttccttctgtcccttggagatgtccgcaaacgacttggcgtccacactgcgctttcccagccggggaccgaaccacaatcccgaggaggcgctgggtcccgtgcgcttgtccagcacctgttgcagagccagaaggtgggcccacttcctcagctcggcgtcaccgcggccaacgcgtgggaaggccaccagaccactggctttcttttggaaatcagcctctggaatggcacatgcgtccccggggcgttaggaccaattagtcaaccgtatccggccgcaacgacttaccattgtaatcctcctgggaggcatctccgtaaatgccgtcgaggactccggcctctaatccgtcgcgcagactgttggccagactgggatcgctgcgaccaacgcgcgggaaggcatagagccccatgttggcacctcgtcggttcttgtcgtggtccgtctctgaatggagtgtttggggattgcaatttattcaaatgttctcatcttattgttcttaagtctccgtggaataagctattttcgtagcctaaccgccaaagtaactcaagtgacttgaatatttttattaaggctttttgtgattaaaaccttttttaaatttgaattatagatttaga

SEQ ID NO: 38960 - DNA, 1554 bp, DROSOPHILA
atgcgacctacgactagtgagaggaccgaaggagaaccaagtccaggacattcccaatcccgggaggcaggagtaaggaacttctcctacgagagggagccacgcatcagtttcccagctccgccgcaggagacacgatcccgtcgagagtccatttcctcgtccacggacaacacttccgattcctccgtttactgccctatcaatccgccgagtgccgatgtccaaaggatcctggacgacaaggctgcccgcttgtttgacgcccataagaggcgtcatcagtacgatcgagccgaaggtcacgaggaaaccgtttacacatccgtggtgtcggagaagaagagcgacaaaatgcgacacaagtccagaaggcgctacctgaacgagaaccgagtgggctccttggagacgagtccggtccaaggttccctggcgggtcattcctccgctgaggagtcccccgaagttatgcgccggagctacgagaacttccaacgaagcgaagccttcaatccgcacaacaactaccaccggaacaagttgctgacccaaaaaaccggcagaggggcgtccgccgaggccatcaacagcgagatgatccggaatattcagccatccgacaagtcggatacggccagtgtgggatccttcctgtcgatggcctcggtccgggcctttcccaagagtactctgccggaaccactgaaccgcgtactggatcccgtcttcgtcacctactacgacaacgtgaacgcagtggcgcctcacaactccacaagatccctgcgatcccacaagtcgcagggcagcaaggacaacaccattgccactatcgccagttttcccagtcccaaggcaccgccgtcggtgaggaatgtccgctccgcctcgcacagcgacaatccggatccgggagtcgtgggtcccgtggtctgggagcggcacaagaagaaacagacgcagggtgagccgggcggagaaaccccaaagagtaacaataacgatgacgatgaggacgatggcgacgttcgatttggggccaagtcgcaggcccagacctatgccgactacaaccccagtccgctgcacaatccgtcggccattagaaaccactacgaggggcttctggagggagccctgcagatgtactccagccaggacgacatacccatgcccctgcccacccagaatttcaccaacaaccggagggctacgaagcgcgagcacaggggctcatctgcgggattgccgagctttcatccttcggcggaacccaagagcttagctgaacgtccggcaaccgctcagccggagaagacgtccaagtcggcgcactcgacgcaacctccgtcgcctacttacagtgcctggggaggtgggagtatgtacagctcccactccaccctgaatcgtccagtgagcgcaggacccttccagaggatggaggcccgattggatgcgactgctccatcgggcagtagaacgggaactgcaccccttatcgaggccatacagtccgagctacgaaagttcaagcaacagcaggagtag

SEQ ID NO: 38961 - protein, 517 aa, DROSOPHILA
MRPTTSERTEGEPSPGHSQSREAGVRNFSYEREPRISFPAPPQETRSRRESISSSTDNTSDSSVYCPINPPSADVQRILDDKAARLFDAHKRRHQYDRAEGHEETVYTSVVSEKKSDKMRHKSRRRYLNENRVGSLETSPVQGSLAGHSSAEESPEVMRRSYENFQRSEAFNPHNNYHRNKLLTQKTGRGASAEAINSEMIRNIQPSDKSDTASVGSFLSMASVRAFPKSTLPEPLNRVLDPVFVTYYDNVNAVAPHNSTRSLRSHKSQGSKDNTIATIASFPSPKAPPSVRNVRSASHSDNPDPGVVGPVVWERHKKKQTQGEPGGETPKSNNNDDDEDDGDVRFGAKSQAQTYADYNPSPLHNPSAIRNHYEGLLEGALQMYSSQDDIPMPLPTQNFTNNRRATKREHRGSSAGLPSFHPSAEPKSLAERPATAQPEKTSKSAHSTQPPSPTYSAWGGGSMYSSHSTLNRPVSAGPFQRMEARLDATAPSGSRTGTAPLIEAIQSELRKFKQQQE

SEQ ID NO: 38962 - DNA, 2863 bp, DROSOPHILA
ggagcagccctttgagatgaatgtgtgtgttcgaaaggtggggttcaatggagctccgggcggaatggcatcgtacgtgttcaagtcgtacggggtttttagcggggccaatgcactccacactccactcgcatggcttccaagagaagaggaaggaagtgatggtggcccaaggaatttcaaaattaaagtcacagctgtcgaggggaactcattaagtgcgaattaattagaggccatagctgaaaatacctggatggcattctcgtaattatataaaggtactcctcattacacaaatgtggctaaatgcacattcttcttataagttcccattaactaaatgctatgttgggtttatacatgattttctgcagtgtacaactgggttgcactcaatgattcattggcctccaacaaaactcctgccttatttagcttttaaggacccttgtgagttatgtgctcagttctccacgagaaaagcgaaagagctcattttccctgggtttgcgtagcaggttgcactttcactgtctccccaccggaaaccgtcaagattgcgggataaaattcattttatggccatctgtattaaaattatatctctaagccctcaacatgatcgtaaaaatctatagtatcaatgctgatttgctttatggcaccgataagatacttatgtgtttaaacaaattgaatgtacccacgtagaaaatgattttatgaattgcatccgatgagtagtatttaacattaaatttattgtatttttaactgattcgcaaatcattgaacactgataagtttacgttttttatattgctgtacaagcctctgcgttgtttattttttgtctttttgctcctatgtaatctggatgacattaatttactgccctccagctcaacatatgggtagtttgacacttggtcaagataagacaagggacttcttctgtatataaaggcgcttcgacatcggaacaccattgagttgcaagacttgaccaagatgaaactgttcgtattcctggccttggccgtggccgcagctactgctgtgcccgctcccgcccagaagctgaccccgacgcccatcaaggacattcagggtcgcatcaccaacggctacccagcctacgagggcaaggtgccttacatcgtgggtctgctcttcagcggcaacggaaactggtggtgcggtggctcgatcatcggcaacacctgggtcctgaccgccgctcactgcaccaacggagccagtggagtgaccatcaactacggagccagcatccgcacccagccccagtacacccactgggtgggcagtggcgacatcatccagcaccaccactacaacagcggcaacctgcacaacgacatctccctgatccgtaccccgcacgtcgacttctggagcctggtcaacaaggttgagctgcccagctacaacgaccgctaccaggactacgccggatggtgggccgtggcctccggatggggcggcacctacgatggcagcccactgcccgactggctccagtccgtcgatgtccagatcatttcccaaagtgattgcagccgcacctggtctctccacgacaacatgatctgcatcaacactgacggaggcaagtccacctgcggaggcgactctggtggccccctggttacacacgacggcaaccgcctggtcggagtgacttccttcggatccgccgctggctgccagtctggtgctcccgccgtcttcagccgcgtcaccggatacctggactggatccgcgacaacaccggcatctcctactaagcagttgatgttccttaattctgaggggtttcttcaataaacgattatagcaagcaactcaagttctgtttttgggatgggattcagatgtcttcttgcttaagtaatgaaatcaataaaatatttccaagtgaagggaaatatattaaactgcaaacggaaataaacttattccgatttccgatttatgtatcggaaaaaatcaagctttaggaacacataatgacgaaccatcggactatatgcaaatatatatatatggatcatacgtcttattattatgtattattattatgtattgtttataattattatgtatattatgtatataaaaagcaaactggattgaaaatggtgtatgtagaatattggacttgttatatttgcaacataattaaagtgcataaacataatataaatttatgttattataaatagctgcaagtggactttcctagcttaaacagttttaaatataggaataccctatagtcgctactagcgttcaacagctatcatatggatagaatataaaaataggatataaaaataagttaaacaatctcgttttaaaaacatttaaggaaaatatgagattacttttagttttataatatatgtacatttaatgtacataatagaatatataaatatttagctctcaataatgtgcccctcaatctacaactgaataaatagtttggtcgaatttttcatttttgctataatcgtttattgaacatcaactgcttagtaggagatgccggtgttgtcgcggatccagtccaggtatccggtgacgcggctgaagacggcgggagcaccagactggcagccagcggcggatccgaaggaggtcactccgaccaggcggttgccgtcgtgtgtaaccagggggccaccagagtcgcctccgcaggtggacttgcctccgtcagtgttgatgcagatcatgttgtcgtggagagaccaggtgcggctgcaatcactttgggaaatgatctggacatcgacggactggagccagtcgggcagtgggctgccatcgtag

SEQ ID NO: 38963 - DNA, 824 bp, DROSOPHILA
aagacttgaccaagatgaaactgttcgtattcctggccttggccgtggccgcagctactgctgtgcccgctcccgcccagaagctgaccccgacgcccatcaaggacattcagggtcgcatcaccaacggctacccagcctacgagggcaaggtgccttacatcgtgggtctgctcttcagcggcaacggaaactggtggtgcggtggctcgatcatcggcaacacctgggtcctgaccgccgctcactgcaccaacggagccagtggagtgaccatcaactacggagccagcatccgcacccagccccagtacacccactgggtgggcagtggcgacatcatccagcaccaccactacaacagcggcaacctgcacaacgacatctccctgatccgtaccccgcacgtcgacttctggagccaccaggactacgccggatggtgggccgtggcctccggatggggcggcacctacgatggcagcccactgcccgactggctccagtccgtcgatgtccagatcatttcccaaagtgattgcagccgcacctggtctctccacgacaacatgatctgcatcaacactgacggaggcaagtccacctgcggaggcgactctggtggccccctggttacacacgacggcaaccgcctggtcggagtgacttccttcggatccgccgctggctgccagtctggtgctcccgccgtcttcagccgcgtcaccggatacctggactggatccgcgacaacaccggcatctcctactaagcagttgatgttccttaattctgaggggtttcttcaataaacgattatagc

SEQ ID NO: 38964 - protein, 252 aa, DROSOPHILA
MKLFVFLALAVAAATAVPAPAQKLTPTPIKDIQGRITNGYPAYEGKVPYIVGLLFSGNGNWWCGGSIIGNTWVLTAAHCTNGASGVTINYGASIRTQPQYTHWVGSGDIIQHHHYNSGNLHNDISLIRTPHVDFWSHQDYAGWWAVASGWGGTYDGSPLPDWLQSVDVQIISQSDCSRTWSLHDNMICINTDGGKSTCGGDSGGPLVTHDGNRLVGVTSFGSAAGCQSGAPAVFSRVTGYLDWIRDNTGISY

SEQ ID NO: 38965 - DNA, 3280 bp, DROSOPHILA
tagtcgttgatttagttattgttattgcttgcaccaatcctgataacccgataaccaaaacgtagctactaacaacgtagagacccacctctccagtcctctccatatcagacgacctggtaaagtcattcctccgcctatcgtactcaacttctccaatcgatcttccccagaggcccagacctatgccgactacaaccccagtccgctgcacaatccgtcggccattagaaaccactacgaggggcttctggagggagccctgcagatgtactccagccaggacgacatacccatgcccctgcccacccagaatttcaccaacaaccggagggctacgaagcgcgagcacaggggctcatctgcgggattgccgaggtgcggatctatcctggaaatgactatcattctcaactcaagtaattgatattccagctttcatccttcggcggaacccaagagcttagctgaacgtccggcaaccgctcagccggagaagacgtccaagtcggcgcactcgacgcaacctccgtcgcctacttacagtgcctggggaggtgggagtatgtacagctcccactccaccctgaatcgtccagtgagcgcaggacccttccagaggatggaggcccgattggatgcgactgctccatcgggcagtagaacgggaactgcaccccttatcgaggccatacagtccgagctacgaaagttcaagcaacagcaggagtagagcccacaacggatgatcttagccatgtcatggcaatggcgtatcattcatgtccgaaccaaaactgtttgcaattcatttagaataaacttttcttaatactccaaaaggaatcccagttgtaacgcggtacttgagcaggctactttatatgatttattatatttacatacttgaaatggcaagaaggacacgcaaagacattaattacaagctctcaccagcccttattcataatatatatttgaccgaaaaacatatttgctgtatacccgttacaatattcaattagaagcgttctctttgatatacaaaagtatctacgacattcagagtgtcaaaagggggagtcagtgtgtctagttgagttccttctgtcccttggagatgtccgcaaacgacttggcgtccacactgcgctttcccagccggggaccgaaccacaatcccgaggaggcgctgggtcccgtgcgcttgtccagcacctgttgcagagccagaaggtgggcccacttcctcagctcggcgtcaccgcggccaacgcgtgggaaggccaccagaccactggctttcttttggaaatcagcctctggaatggcacatgcgtccccggggcgttaggaccaattagtcaaccgtatccggccgcaacgacttaccattgtaatcctcctgggaggcatctccgtaaatgccgtcgaggactccggcctctaatccgtcgcgcagactgttggccagactgggatcgctgcgaccaacgcgcgggaaggcatagagccccatgttggcacctcgtcggttcttgtcgtggtccgtctctgaatggagtgtttggggattgcaatttattcaaatgttctcatcttattgttcttaagtctccgtggaataagctattttcgtagcctaaccgccaaagtaactcaagtgacttgaatatttttattaaggctttttgtgattaaaaccttttttaaatttgaattatagatttagagtgccacaactatttctttgatatttaactcttcttaagtggcttttattatttcagcggttagatttgaaatcacctttttgatttaaagagcttgatataaaaagacactgtgtacgacttaaattgcatgcctcttcaagaagtgctttaagtgttaaaaaaaaagttaataaaataataataaacaacttttctaagtagaacattttaatgaaaaattggaaaggtctttttaccattacctctttcttttaaaggtgctgcaaaatattattgaacattattaaaaagcatttaactattttcactttaaagttaacaaaagatagcagcagcacttagtcgagatagactagtttgttgtttaagatttccttaaaagcgattttgtaatgtttccaccactcaccagctgtactgaattcggcgattatgaaaatcactagaactatgtggaccaacatagatttcatatttgcaagactatttaggacgaaacactggcttggcgaatatgtttttcggtctgatgttatcctcggaacggtcacggttcttctgattcctctggtcgaagttcacgttcttttataggccagaaaagcaggcggatggatggcagacaaacaaattgccatcggaacaacggggcggatgatgaatgttgctgcgatgcaaatgagatgttgctggcaacaggtggcctttagcaacaagttgcagaaacgtggtacttgagattctttttttttattattcacacaaacaaaggacttaactatttaattgctatgaaagtggattccgcggcttagagccagccggagatcatgcgtcctgtgaccgtggatttgcctcgttctccgccagctgcggcactgctctgacccaccttgatcgccggcttcagaggagctgctgctggcttcttgtccttgtcatcggcaggcttcttgtccttatcatcgctcggcttcttgtccttgtcgtcacccggcttcttgtccttatcgtctcccggcttcttgtccttgtcatcggctggcttcttatcattattgtcagcaggtttcttgtctttgtcgtcgccaggtttcttgtccttatcgtcgccgggtttcttatccttgtccttggcatcgtctcctggcttggagtctcctgcagccttttttggctcctccggaccgctcttcttttcgtccggcttggaggccccattggttgccttagttgcttctggtgctccagctgctccaggtttcagtttggaatccggcttggcatccgaaggagcggagggagctgcgctcttggctgctccatttgtggctgccggcttgctagcttcggtcttggaagactcctcctttttggcagcggcctcgggcttggcggattctccaggcttcggcgcagcaggcttggtgtctccaggtttggttggtggtgccggagcgtccttcttttgtgactcaccgggcttgctgatagtgccagctgcttggggctttggagctcccgcacccggagttggcttctga

SEQ ID NO: 38966 - DNA, 619 bp, DROSOPHILA
ttccgaggataacatcagaccgaaaaacatattcgccaagccagtgtttcgtcctaaatagtcttgcaaatatgaaatctatgttggtccacatagttctagtgattttcataatcgccgaattcagtacagctgagacggaccacgacaagaaccgacgaggtgccaacatggggctctatgccttcccgcgcgttggtcgcagcgatcccagtctggccaacagtctgcgcgacggattagaggccggagtcctcgacggcatttacggagatgcctcccaggaggattacaatgaggctgatttccaaaagaaagccagtggtctggtggccttcccacgcgttggccgcggtgacgccgagctgaggaagtgggcccaccttctggctctgcaacaggtgctggacaagcgcacgggacccagcgcctcctcgggattgtggttcggtccccggctgggaaagcgcagtgtggacgccaagtcgtttgcggacatctccaagggacagaaggaactcaactagacacactgactcccccttttgacactctgaatgtcgtagatacttttgtatatcaaagagaacgcttctaattgaatattgtaacgggtata

SEQ ID NO: 38967 - protein, 118 aa, DROSOPHILA
MGLYAFPRVGRSDPSLANSLRDGLEAGVLDGIYGDASQEDYNEADFQKKASGLVAFPRVGRGDAELRKWAHLLALQQVLDKRTGPSASSGLWFGPRLGKRSVDAKSFADISKGQKELN

SEQ ID NO: 38968 - DNA, 2581 bp, DROSOPHILA
aagtgaggcgatggcttgaaatccgatatagtttctgaggaacgcctcgggcggagtgggcgaaatggcggacccattcctcattaggaagctactgggaatgcctttgtttgcattctccgagcttccccttgaccgtccttccgccgacgtagtgccacgctgaaatgtgcaacatatcggggcaggaaactcaccacacggaacggaaaacggagaacggagagctattaaagccgacccccaacgaagcgtgagtcagttcccgactgggcgtccgggcattcagaccgctcgcaaggataacgcgcaaggatccgagcgaacgcgacgagtaaataaagcataaataatacaattaaaagttgagcgcgctcccttcgcaaaggacattcccacacttgtagcccacttccttcgggcagtgcaacacaaaagtgcagtcattaattaatttaatgcatatgtaccccatcctggcagcacaagagtcgagccaagccgacgatatcctataaagcgagtgagtgaaaagtgttcgacgaagcgtttaaaggaccgcgctgtttgccgtgtgcgatgcccataacaacgggcttcgcgattgccttttaaggtggggcgattaagtcacgctcctccgtatcagcggcatcgccagaacaggaactcggggcattgacactgcggttttagtgctcaaactaaaaatgtgaaaggagaacattaaatcctgacatgacataccaagaggtgttatatcattccaagttccgcgctcttaaatccttgaacatatcgaagtaattaagaaacttacagctgtaactcacagatacagtttctaatgtttaattacaaattccatgctttaggcactagataccaccgatagcaccatgttcccacccagttctgaaggacacatccgagtgtctcgacgtgactaggccaagcaggccccacagattataatccccaaggggaccaggtcatcaggatgcaccaggtactcagctacgagacggcggtgcgggccaacagctctcgggagttccgcgagtacgtttccaagcgcacctgtgcctccctggtgctaacgattggcttcttcatgctgataacaggtgagtgcattcacaggacagcgcctaatgagtcactcttgtgtgtcgtggtttcgcaggatacttgctcggtaattttgtggccgagcgcaagtaccacattcgccagatgacgaaagacggcggcaggtccgtgaaactgagcagcgccgagtatgccagcctgcaggagctgcaatcatatcagaaggccaaggatcagctgttgctggccgcccaggagctggacaagctgcagcagcaggacgagagcgagcggtatctggccacgtcgctgaacacggagatcttcaacaggtacatatcctgcacgcaggatataccgcccaacacgaacattgcggccagtcagttcacggaacagctgatcgacaacacggtggccaggcagcgccactgcttgatgatcatccagcgggtcatcgacaaccacctggccaacagccagctctagagctctagggcggatgccagcgatggtttagcgggccaatgttcgacatttgacatttatgtgtgtatgtgcttttaggtgtgctcaatgtgtgtgctcccagctaattagaaattaggttttgtaattcattgtgaaagtattagatcacacaagttttttatacatgtctgcattaaaagttaaactttaaatagatgctaactattttggtaattggctaatgtttagttcgatgagttatgctgacgatacattgggttcacgcccttaatgggcaggaaatggcctgcactgttgaagacccactgctccagcgaaaccacgtcgtcgtcggagaagagcagatacaaatacttcagagtggagcccaagaagaaggacccctgcacgtcatccggttccgaagtaacgttgttaacgtccatcactccagtatatccgtagggcattcggcagtacttctctatcgcctgcaccatctccaatccccacaagcggtactgtggatgatgggttatgcgccacagaaccaagtaagtttccgcgacttccggccgtaaattgtaatagttcctctggagcggctctatttcctgctggctttcctccgtgaaggcaaacgtatccggacccaaccgagtgggagaactccagtagctgtcgtgacaagtatctgtgaggcctatgccaatatgggcatacttttcccagtgcttcatttgggtttctgctgctcccaggacaaaaagcccgccggcaaagcaatcggagtgcctcatacgatggaaaagagtgccattcctgaacgtggacacgtaggtcacgtcctcgggattgatgacaaccagattttgagccacagctagcatggcttctttgaaggtatcagcattttgagtatcagttctcccggactgaatccatgactttagcagggtatcataaagtcggtgcatggagcagttgtaattttcccacttaccaaattttgtgcaat

SEQ ID NO: 38969 - DNA, 522 bp, DROSOPHILA
atgcaccaggtactcagctacgagacggcggtgcgggccaacagctctcgggagttccgcgagtacgtttccaagcgcacctgtgcctccctggtgctaacgattggcttcttcatgctgataacaggatacttgctcggtaattttgtggccgagcgcaagtaccacattcgccagatgacgaaagacggcggcaggtccgtgaaactgagcagcgccgagtatgccagcctgcaggagctgcaatcatatcagaaggccaaggatcagctgttgctggccgcccaggagctggacaagctgcagcagcaggacgagagcgagcggtatctggccacgtcgctgaacacggagatcttcaacaggtacatatcctgcacgcaggatataccgcccaacacgaacattgcggccagtcagttcacggaacagctgatcgacaacacggtggccaggcagcgccactgcttgatgatcatccagcgggtcatcgacaaccacctggccaacagccagctctag

SEQ ID NO: 38970 - protein, 173 aa, DROSOPHILA
MHQVLSYETAVRANSSREFREYVSKRTCASLVLTIGFFMLITGYLLGNFVAERKYHIRQMTKDGGRSVKLSSAEYASLQELQSYQKAKDQLLLAAQELDKLQQQDESERYLATSLNTEIFNRYISCTQDIPPNTNIAASQFTEQLIDNTVARQRHCLMIIQRVIDNHLANSQL

SEQ ID NO: 38971 - DNA, 13957 bp, DROSOPHILA
ggaaggactttttgttctgcgaggctgtaatcagcgccttgaggaccacccgggatcgggagtgcgtcaatatacggcagccatcggtaatgaacctttgggcctgctgggcaatcacctggattgggtggtacaatgaggggttagttcatgcgctagcactagcttttcgtatgagagccaacctgccgggaattgagcaacttggtgaggaagatttttccgcgattcaacataatctgccggcactcctccatgtgcttgtcgtccagactgagggtgatgaacctgcaaaagagctctccggcagaaacaatggctgctatagacaaatccgtattccgcatggcagccaccgcttccctcatggttgtgtgtagaatatgaatggttccaactgaggaatatgttgtagatgatttaaaatggttcagtaaagaggtttattagcccactaacattgtttcttttccaggatcattagcagagtcctgatagccgcaatgccggaggacagatccttgtcctcgtccaggagctgcaggaagtatttgaccacatctaagggtgaaagcttgtattatcacttctgcgtaactttagacccattcttagctcaccaaaatcctggccattttccgtaatttgcggcatttttatgaaattgtgaaagcctaccgctgcacgttaaacgtcaacaaaataatcagctgttcgaaggcttatttacacttcgcaattcacaggttaatttatcgattgccaattcgcaccttccgataacgataacgattggcagattgccggggctgaaacgtaaacaatccaaaattctatggctatgtttgttttgttaaacatattcggcccagaattgtagcaaaattcacagcatgtaaattcaagttaaccgccggcaacgcattaaatgaagagtgtcatataagtgagcagtcaacagcgctgggatcgaggcctgagcctccggcgtcgccacaccatgttcaaactggagtcctacatcactccgattctgctgagctacgtggccaagtacgtgaagaacttccgcgacgaggatgcccaagtgtcgctgtgggaaggcgaggtcaccttccagaatctggacctgcgcctggaggtgctcgaggaagagctgaacctcccagtagaactagtttccggccacattcatgaactcagcatcctggtgccgtggaccaagcttatgtccgagcccgtgaagatcgtcatcaataccatagaattcgtggccaagttgccggatagtgagagcaagcagcgcagggcctccttccagcgggagcagcgaaggaaatcgaagcgggagtccgtggagcagccggatcagacgaagagtcctggaccggcaagctcttccagcgtggtcaacaaaatcatcaacaacatcaacctgcagtgccacaacatcatcctgaagtatgtggaggacgacatcgtggtctctatgaatgtgcagacccttaactttagctccgccggcgaggactggaagcccactatggtggacatacacccggtgtccgtcgtcatgcgcaagttgctccaggtctcagatttgaccatctgcttggacaagcgcaacacagctggtaggatagaggtgtgccaggagccggttctctaccgatgtactctggagtgccgggttctccgcaagtacaacgccaacacggtgtccacaacaagcacaacacgcattggagttttcacgaagtcgctggatatcaacgtgtcatctctgcagttccccatggtgatgaggctggtcaaaatgctgctcgagcttaagccagccgagtttgaggatgacccccagaatccagaagatcaggaggcggtagctgagggcagcgagtcgcaacaggggaccgaatccgcaggacgaagcgtcttttggtgggcctggagcctactgcccagtttcgatactgaggcgccttcctcgtcctgcgacactcccactggtcacgccttcgatctgggagtctacgccgaggagctgaacttccagcttaaaaactcggagtactttaccgaccagagcatgggtggcatcaagcgaatacgatacaccccaatattgcgaattagtttgggcggactttattacgagcggacaattctaaaggagtgcgactgggccaacgtcaaggcgggcctttctagcatgtgcatggagccattaggtgcttaccgtagcgacgatctcgtggatcgcaacttggtcaatacccaggaagtgagttgatcctaagactgtttattgccttcactctttactattttttatataaagtttcagcaagagcgatcctttattgacaagagtctgtttgacgagaactacatgttcgccgaacggtcctggtgcagctacaactacgcggattacgtggccaggaacacggatgaatacatgctgtttcgcagtcctgttttggccttcgacgtcatcgagcaccgggtgcctaagcccagcagccatcccgtggcggagagccagctcagagatctgggagttcgcatccagtatcgtctattgtccgccggaatcacgttccacttttcgcagtcgttcgtccaggttaaaaaggtaattagtgatttaattcgtccttacgattacccgggatatcgttcagaatcgatgaaggatgaggatcgcggtgtccccgagccggaaaacaagaactctgaaatgactatacctgatctggagtatctgatgggattggtgcccacttgtaactacaaaattgagttgcgtaacattgtggttcagttgtatccccgccagcagcaagatgagtcatccgcgatcaatcaacaccaactgacgaccacagtcagacaatctttgctaccatatttgcagcttaagatctccctagtcgagggcacaatgtgtggaccagtgaatcctgttcgcctggtccaactgattactcatctagaagagaagcctcgggacgtggttaatgcctgctacaactgttttcacttcaatgtgaaaaacttggcgcttatgattatgaatacaactccggataatggacgtgccaagcttttgaatattccacgcgttcaagtgaactggaaccgccttttggcgcctcatctttggcgtcaaaacgaggcgcctttagagacttcggaaataaaatcagagatcataactttagagttctcaaagcgcgagctaatcatcgcaaagcgcttggtgccgttaatttcgagtttcagtggccaagatctttgtgatctggcccacattgtagccaatgtcaacgtcaattctgatgtgatcaagctgcagagtgtgggcaccaaactaaacctggtctatcacaagtaccatacacatttggctgcagtggggtcacttcaaggtgtccacactgatgccgtccataccaaaatgaatatacgcaatgtggtgttgtccacttcaaagaatgcagacaataagtggcttgagatgcagtgtcagtttcccctggaggaggtccattcggagcaggaaaaaattcccggcacagtggtgtgcctttggttggaaccatttcgcatcactacggacatatatttgctgcagttcctaaatttttcggacaacagtggaaggcaaattacaaaagacaagggtacgtgattctatataaatcactaatatttataaaagtaattaattctggtttcagaagtagaaactgatttggagtctgtgaaccagtcggagccaccaattacacaatcggtttcgaattattccacgatttctgcatctgcgatcgccttcaatgattttcaaccgcgtcgaatcagcagaaacaatagtcgaaagatctcggtccccgaggagacagttcatctaagttccgagcgagatgagaggcacacccaggcagaacctttgaccataccagtggccaataagccacaaccaagtaatttcgatacaaccgattttgtgaagcggctgacaaaaatggtagtgctggtagagatcgctcaggctaagattgacgtatgtgaagtaatgatgcgaaaaactcctggacataccgatgtggagtatacttccattcgcctgccgcacatgaaagtaaaatcgggcaattgcgaggccatccaacgaggaaacatcagaggagttattccagttgcgagtaacactgagctattgaattgggtcttcgacctaaacgagtttaacgtttgctatcgcagagctaatgtgaccgagatgattatagctccagtgaggaccacgataaccttagctctgtctttcaagacatctgataaagttgacggaagtaaaggaaaagaggataagtgtgctaacacgtgctctataaatgtgcatgtggatatgtctgccattaacatttttgcccagcgggtaagcgaagctttcgtaaaacctatttaaatttgcttaagtaaacccatttccaggtgaaattgctacatgagcactgcttgattatttccaagatgtacggttcgctgtgcccggacgaacctgcatccaagtggcagacaggaaaaatgaaacccagactggaagtgtacactgggagtgcgcaaaactatccggttattaaggagttcctggagctagatccaaacttcgaagcaccgaaagtaaaaagtggtaagaataaatacccattggtttaagaaatgcattaaaattgtattatcccatttagctcccaaaagctcagttatactattttgccaatggacaattccgcgtatcagttttgaaatggaaaactccaatgatttcaaacacagcaaaatcgttatgagtcttgaggacttactcctgaatatcgacaagcatagtgacttcaacaaaattaccaccaaaatagaaaacttcggccttaactactatgaggaaaagcatgaggaatgggaaaagatcgacgacttgcatatcaaaatgctgggagatagcacaaacttgccattgattagtgtggtgatcaccactgtgagccttgaggatctttacgcaaagattggggcaagaaaccctcacaacaagcagcacactatctctgaggtcctcatcgaggtgcaaccgatagaaatggtgctgaacctggaccaaattaccgagtttatggtcccaatatgcgaggtccttgaaattattggaaattctgcctctgcacagtcagcgaacaaaccgagtgctccagttccaagcaagatcacaacagttcaagatctaccaatggtgcatttaaacagcaagggaatctatgtttatcttcctctgtctacaggcaaaaagagttgcagtgtcctgctgctaagggtaagtgtgccgatacttgttaaaccttagcatgtttattgtatatatgtgaattgcagattgaaagtattcaacttactccgagtctcgaaaatcctctagttcgtcagcttgtccgaccagatatctaccaaaaagcagcagagctgaacatgctcagcactccgggagcactggtggaggaccgccagtatgagcttagtgttcggagggtatctctgtccaccggaaactggaagcaaactcaagagtatcgcatagagaagactctggcaagcaaacatgacaatcccgcattcgagtggaacaatcaaagtcaatccaccgagctggatcatatggaaatattcaaagactttgattttatcatgatttacgcaccggctataagctacgatagatttttggtttgtggacagagtgtggagtataattgcgcgaccgattttgtggcttccttgaacactcaccaaatcagtctgattagctgcatcatagtgcgcgcgcagcgattgggttgtataatcgaccaggtctgtgttaaaaatgctgagttaccaaaagcgagatcacataaaacgctgggaaacatttccaaatacaacagcgtggacaactcgatatattttccagcagatccaaaagtttttaagaaggatacttggatcccaaaatcatctaaaaagctggtcagcgagaggttaagttacacgaatgcaagcacaagttttactgatgccaaaggcagtagtgactacttctacggttcctgccaaagcgattctggaattcatttgggcactcggatgaaaggatattcaagatcgcttgcagcggaagagattaatcggagtggacgccaaccgtttgtcctgagttaccccagtagcgtatcgtttgtggccggtatattcgttcttaagatctacgacgttttggagttggaagaactggaaagacctgtcatgaaaccactttttttaatgactgtatctcagcccagtttcatgtctacccaaaatttcaaagcagccgtaacacaagcctcgatttttaacgtaaacataagcgtagccaaggcagatgttgatggaaaagtagattcggaacgatttaatgagtcggtatttgcaacattacccggacaactgggaagctcgggtattccgcctccgttgcttactattaagactcaatatgaccgcctccatcagaaggaagtagatgtggagcttcggaaacccatccttttaaggatttgcgaaaacactatcaaacaattggcaagtgacgttttccgtatctacactgttcttcacgagactccctgctttaatgtccgtagtccgcgtcctgtgcccgaaggatcccaactccgccagttgaagatgaattgctacaacgcggataggtttcacttgtcatgtgatcgtataactgccaagttctacgatgaggaaaggagctataaatgcagcttcgtctggctggatgtcagcacccgcatcaagtttagtagtcgccctcagaaggcggttataaggtccaacataggatcattctatgtgcagtccggagaaaagatgctgctccacccgttgcttatgcgtttgtccgtagatttggtcagtgagccatggtctgaggagctattggtcaatgccacactcaagctaaattaccttcacatcgacgcgggtgttttcagcatattgcaactgcaaaaggcacagcaaggagtgaaccggatacgcgaatatgccgatcgggaatggcagcagttcctgcgcagtcgtcctgttctgggcactccgaaagatgtctcaccctgcaatctgattaagtgcactccctcacacgaatcgatagagcggattaaacgaccgttgaaatcgaacgcggaattttatcaggatgacctgaggtgagatattcaacacactaactaactatatttcactgattaatgcattttacacatcagagctggcgccttccagttcgtgtatctgaactccgagtctgtactgccaatgccctaccaggtgcagatcattaagaaaaactatggcatcatctgctggcgatatccgcagccgcgccagatgacaagcatacacatatatccggttcctatgccagtaagttaatgatatgataatgcatatttcattgtcttattaatgtcgttgtatgcgaaaaggtaagcagacccatacatatcagatgtcgcatggagtactttagtgagacgcatgaaactttcctgcattactgcgattttatgctctcggagacctctactaagcaattgactccaccagatcgtccgatctgtgcaaccatttggagggttgtaatactgcaatcgttgatatctgtagacggtacatgttttgaaggaagtgaggatgaagacctctcggtagggttttaatataaggctacacaaatgaagtccctaataattaattattattttaagatcgagtacctccagtcggacttcaaagtggacgaaaacaatgattttattttgcatccaaaagttcttgtgggttgcatgcgaatcgataccgtttttagggcagaaaaagtgccaaaactgcagttgttgctctgctgccaggacatcgaactgaattttgtgaaccagacggataacactggtgaactgcctaaacaattgaacaagtaccgccttaggcagacccctaatattacgcaaacctttcttactgtgcacgtggaggatctacagatgcattcgaggatatattccagaaacgattttagtttgcagaccgaaatgcgcgctcgagttaagtgcttggactatggattcctaaacatgctagatgttctagaaccaatgaagttctcaagctatgtaaggctgaccgactatccacgctctctagtgcaagctaatttcctagtggataagcttcggttgaactgcggaccccatgtgatccacactttgctgagttccaaataccactggcaggaagttttgcagcagaaggatgtgcggcacgttttgatgccaaagttggttatagttaaccggatacagacgcccataagctttgggcaaacgaacactgtcgaaaaaatccccgtcaatcctggtgaagtgcagctctatcacttccgcagctgctcccacgtccaggaactaaccttcttcattacaaatcccaaaactcttctggtggattcaagtgattcagtacatatagcacttaagttcgaggacgaagaaaaaatccataatttgcgggtcggagagtattgtattactctcaagttagcaaaactctccaccacccaaatttatattctggtcaagggacaaatagagttggttagcatggttcccttcaatctggtcactgagtttcgcgaggaggaaataaattacgacgaaagcaccccaccggagcatctcctcctgtccaaagaaagatcatcctactaccaaaatgtcaagcggaacgccgatatcaacatgcggtaatttactgctttcaaatgtaagttctataagttctctaaaaatgtgatcattctttaggcttaagctgaccgccggacttggaagaggacgcactggcgacatcccactgaaaactaacaacaacttgccttggctggtcaaggttcctacgcaatctgctcagcagtttatcagcatttgggtgcgaatcttgcgtgaggacattaaaatggataagcccgccgaggactttcagccgcagaagattctgatctgcatatggccgatctttgagatatgcaatatgctcagctgtgcggtcaaggctaccgaaagtactaccggggaaagttccacaatcgaagccatgggaggcagatgggcactgaacactgctacaacccatgcaacggagcataacattggctttacattctcgtaagtttgagaaacatcctaatccgatccaatttaaaccgacgcttgaatttcaggggtattttgcgaggatcttcaaaagatgaatattcgcttatgttaaggacaatggactggcacaagttcttttattatgatcccacagtgtggaccatcgaaaatgctctgcataagcttggcaagtcatcgaagcgcaaatggccactgaacgatcctgaagaattgcgggttagccgcgtgctagattttgaaaatgcctttgatgtaaagtaccagactaaggcgacgagggagttctcctgctgccaaggactggacgtgactgcctggggcatgttcatcaatggaacgggcttatatgtagccatttttatgatccaagagcaggcgcgccttgatcttaaagcaaacagtttgcaaatgatgccaaaactcaaaagtgctttcacaattgatgtccgatttgacaacgggtggaaatcctcaactccgatctgtttggaagactttacccaaaaatcgtccagcaacgccgggcgatcattgtatctgcggtacaattcattcgtggatatagttatagtagaaagggatgaagtattgcgcctaatactggaatacaggcaggaagacgacggacgtcgtttgttcaaattgcgatcaaaattcgtattcactaattttacggatgtggtccttaatgccctgacccttgctatggaccacaaggagaactctacgcgggaagaagtggaggcatattcaatttgcaaaaaggcccgcagtcttgtttcatccgaatcaaccaagaattggtatggactacagtcatacgtgtttttttttttgttactaactttctttctttgcagctcgggtaatgcaatggacgtcttctacgatcttaacgcccataaggctaagcataactgtgatacagcattcgtctatttcgtttgctttagtgttggtggtagtcgggagatctccatacccattcccttggccgtacccttcaccagacgctgcttcagcttgcaagcgggacccgagtccatcccattgatgatcaccctaatagagaaggataatgtccactacttaaatgtgttccgggacacagcacctgccattgttattagcaacaacacgaatgtcaagtttattgtggcccaaacgagtgcttcggagaacagcaatgtgagctgcacaaactcggaatttgtgggaaggaacttcgagtggaatcagctggtcctgcctcacagcaattgctattatacccctccgcagatgtacgctaactttccagatgtggaattcacaatgtgtaatttatccttggcagtttacaaaggtttggagttcagtatatgccatctagaataggttatgagttttttattttatttttcagataagctttgtgccaagaacaagatcgcttggtcaaaacccattcgcaccgacaagtcttggcagaaattcctacatgtgcctcaccacggcgacgtgaaagtggttgtctgtgacaagcatcgagctatacgactgaacatctactatatagctcagcagctggagttttcggttaaagacttgcgatcacgtttgacaaaacccgagaatgttttgatgccatcgcaggagcaggctgctccgagaccagatgagagctcggagcaagagaacgacactaaaagggtaactttaccgaatatggtgacgtgtgcccatttcaacgaagagtgtgaaagcaaaacgcagacaaggatcaaaattttcatcaagagctttgtgttcagcctgcagacagacaaccgggaaaatgacttcgtgaagacggaggtgtgcaatatctatgctgatgactccatgcttatctacgacgacgacgacgatcagcgagagctgcgattgcagttgccaaaccttcaggtagataaccagttgtactccagtggaaagtatgattttcccgtcctgctttgtgcggaaaaactgtacagaaggaattgtagtctgccacaggtctacgatttggaccatgtatataagcaacaggcacaacgaactcccgtctctctgttcacgttcattttctaccaagatgaaatgcaactgcagaatgtgcgatgtcagattccacccttcagggtgtacatcgaagatgcctacctgaatcaactgctggaagcattggtagagtgtgaaccgtccaattgtgtctatagtccccctgtggagcaggatcaaattcttctgccagccgggatgacccttttgcccgatcaagttgtggcccaatcattgtacatatcggaacccttgcgtcttaatagttttacggtagagcccctgaatctattgctatccgtccatacatcttcgaggctctatatagcactagatcactctcccctatccttttcacgctacgagcgtcagcaaatccttacagttcccctccgattcggacaatctctaggactgcactacctcagcggagcgattttcggagccggctgggtcgttggttccctagagatactgggaagtcccagtgggctggcgcgctcgttcagcaccggtctgcgagactttgtgtccatgcccgttcagggtctgttccgcggaccttggggcttcctcgtgggagtgacgcaaggttctgcctctctgctgcgaaatgtgacagcaggaaccgtgaattccgtgaccaaactggctggttcagtggctcggaatctcgaccggctgactttggacgctgagcacatcgaactgaccgaggcgaggcgtagagctcggccacagggcttcgccgatggactgacccaaggtctgactggattgggcattagtttacttggcgctgttggcggattggcccatcacaccctggaggcacgaagttccgttggtgttatcgctggtctcaccaagggcattgttggagcactaacgaaaccaattagcggagcagctgaaatgctagccctcacgggccagggtgttctgcatacggtgggctttaatgctatgccccaacaggttgagcccagtttcattcgaaacgttgccctgcatggaagctccaatcgcatatggagctatttgcccgaggagttgagccgcgatcagatgctgttctttagtgagatcatgctgcagatcagcacgcagttgcgcccagccttgctgtttctaacctcgtcagtattggccatcatgcagtcggatagcgaagacctggccttcgcctctcccatttccaaggtggatgtgttggcggaccgcgaagatccctccaaactgtacttgagtctgaaatccgagaggagggatgactttgaaggggtgagtaacagatcggccattagttatatctcataaataatcattcgtgcgtttctagcaactcaactacaccaatgagcgcatcatgaagttcctgaatgcctctcgacttcaaagcatcgccaacgattcgctgaatgatctgctccagctacacgaactggatgtggacgaccgaatccagcggcaatcgcagtgcatcttctacattaagcccaatattggtgaacacctgatccactacctaaaggtaattagtcggattcaacattgatagtaaatatgcatctgtgcgtacgtttcggattagtccaaagtattcctagaatcctgtgtattttatgccaaaaaagacattttttgttacaatttttgcaataaaaattaaaaagaaaacgtgtcttttttcctaatgactgctgaattacaaggtaatttttctctggaactagtgtatattattttcctctgcttttactcagttattctatgtgctgtccaattccgcaaaatcccatcaattccgtcggttttagctaaagccgcccacaagccagcattgtaacttaaaacttacaacaagagcatggatgcattttaatcagagccagataaatgaagctaaagcaaaacccttgcaattggaaggaacttgtaaaaattaacctgtcttctgcaaaaccgttcaaccaaagcgcttcctatttttcgagttaaatttaatttgcgtggctgtgttgttacagcgaaaacaaaagcttacctacttcaagtgttcttattattgttcttattaaacagaacaaaggtgaaaggtgaaagatgtgaattcaaccgataagatgacgttgctatttaacatcttccgcattaggtgtgaaattgtttcataatgttatatttgttgcacccagatgatgctacatttatatttatgtatattgattatttctccgcgtgtgctcgatatccttcctggttggttgcctggatttggccttgtatgtgcgccagagcgcgacccaaagattcaattatgggtggttggttggtggtcggctcaccgcatccgcaagtcagcccgtacaggttgcttattgaggcccccggttcccgattcccccgttggccttctttatgtgtttgacatgtctcgggggcatggcgtcgtgccctagctggtggctacacagatttgcacaccgtttccgtgggccaaatgtaggtacgtctattgttttatgcttataaaaggtgggcatttaacgactctg

SEQ ID NO: 38972 - DNA, 10830 bp, DROSOPHILA
atgttcaaactggagtcctacatcactccgattctgctgagctacgtggccaagtacgtgaagaacttccgcgacgaggatgcccaagtgtcgctgtgggaaggcgaggtcaccttccagaatctggacctgcgcctggaggtgctcgaggaagagctgaacctcccagtagaactagtttccggccacattcatgaactcagcatcctggtgccgtggaccaagcttatgtccgagcccgtgaagatcgtcatcaataccatagaattcgtggccaagttgccggatagtgagagcaagcagcgcagggcctccttccagcgggagcagcgaaggaaatcgaagcgggagtccgtggagcagccggatcagacgaagagtcctggaccggcaagctcttccagcgtggtcaacaaaatcatcaacaacatcaacctgcagtgccacaacatcatcctgaagtatgtggaggacgacatcgtggtctctatgaatgtgcagacccttaactttagctccgccggcgaggactggaagcccactatggtggacatacacccggtgtccgtcgtcatgcgcaagttgctccaggtctcagatttgaccatctgcttggacaagcgcaacacagctggtaggatagaggtgtgccaggagccggttctctaccgatgtactctggagtgccgggttctccgcaagtacaacgccaacacggtgtccacaacaagcacaacacgcattggagttttcacgaagtcgctggatatcaacgtgtcatctctgcagttccccatggtgatgaggctggtcaaaatgctgctcgagcttaagccagccgagtttgaggatgacccccagaatccagaagatcaggaggcggtagctgagggcagcgagtcgcaacaggggaccgaatccgcaggacgaagcgtcttttggtgggcctggagcctactgcccagtttcgatactgaggcgccttcctcgtcctgcgacactcccactggtcacgccttcgatctgggagtctacgccgaggagctgaacttccagcttaaaaactcggagtactttaccgaccagagcatgggtggcatcaagcgaatacgatacaccccaatattgcgaattagtttgggcggactttattacgagcggacaattctaaaggagtgcgactgggccaacgtcaaggcgggcctttctagcatgtgcatggagccattaggtgcttaccgtagcgacgatctcgtggatcgcaacttggtcaatacccaggaatttcagcaagagcgatcctttattgacaagagtctgtttgacgagaactacatgttcgccgaacggtcctggtgcagctacaactacgcggattacgtggccaggaacacggatgaatacatgctgtttcgcagtcctgttttggccttcgacgtcatcgagcaccgggtgcctaagcccagcagccatcccgtggcggagagccagctcagagatctgggagttcgcatccagtatcgtctattgtccgccggaatcacgttccacttttcgcagtcgttcgtccaggttaaaaaggtaattagtgatttaattcgtccttacgattacccgggatatcgttcagaatcgatgaaggatgaggatcgcggtgtccccgagccggaaaacaagaactctgaaatgactatacctgatctggagtatctgatgggattggtgcccacttgtaactacaaaattgagttgcgtaacattgtggttcagttgtatccccgccagcagcaagatgagtcatccgcgatcaatcaacaccaactgacgaccacagtcagacaatctttgctaccatatttgcagcttaagatctccctagtcgagggcacaatgtgtggaccagtgaatcctgttcgcctggtccaactgattactcatctagaagagaagcctcgggacgtggttaatgcctgctacaactgttttcacttcaatgtgaaaaacttggcgcttatgattatgaatacaactccggataatggacgtgccaagcttttgaatattccacgcgttcaagtgaactggaaccgccttttggcgcctcatctttggcgtcaaaacgaggcgcctttagagacttcggaaataaaatcagagatcataactttagagttctcaaagcgcgagctaatcatcgcaaagcgcttggtgccgttaatttcgagtttcagtggccaagatctttgtgatctggcccacattgtagccaatgtcaacgtcaattctgatgtgatcaagctgcagagtgtgggcaccaaactaaacctggtctatcacaagtaccatacacatttggctgcagtggggtcacttcaaggtgtccacactgatgccgtccataccaaaatgaatatacgcaatgtggtgttgtccacttcaaagaatgcagacaataagtggcttgagatgcagtgtcagtttcccctggaggaggtccattcggagcaggaaaaaattcccggcacagtggtgtgcctttggttggaaccatttcgcatcactacggacatatatttgctgcagttcctaaatttttcggacaacagtggaaggcaaattacaaaagacaaggaagtagaaactgatttggagtctgtgaaccagtcggagccaccaattacacaatcggtttcgaattattccacgatttctgcatctgcgatcgccttcaatgattttcaaccgcgtcgaatcagcagaaacaatagtcgaaagatctcggtccccgaggagacagttcatctaagttccgagcgagatgagaggcacacccaggcagaacctttgaccataccagtggccaataagccacaaccaagtaatttcgatacaaccgattttgtgaagcggctgacaaaaatggtagtgctggtagagatcgctcaggctaagattgacgtatgtgaagtaatgatgcgaaaaactcctggacataccgatgtggagtatacttccattcgcctgccgcacatgaaagtaaaatcgggcaattgcgaggccatccaacgaggaaacatcagaggagttattccagttgcgagtaacactgagctattgaattgggtcttcgacctaaacgagtttaacgtttgctatcgcagagctaatgtgaccgagatgattatagctccagtgaggaccacgataaccttagctctgtctttcaagacatctgataaagttgacggaagtaaaggaaaagaggataagtgtgctaacacgtgctctataaatgtgcatgtggatatgtctgccattaacatttttgcccagcgggtgaaattgctacatgagcactgcttgattatttccaagatgtacggttcgctgtgcccggacgaacctgcatccaagtggcagacaggaaaaatgaaacccagactggaagtgtacactgggagtgcgcaaaactatccggttattaaggagttcctggagctagatccaaacttcgaagcaccgaaagtaaaaagtgctcccaaaagctcagttatactattttgccaatggacaattccgcgtatcagttttgaaatggaaaactccaatgatttcaaacacagcaaaatcgttatgagtcttgaggacttactcctgaatatcgacaagcatagtgacttcaacaaaattaccaccaaaatagaaaacttcggccttaactactatgaggaaaagcatgaggaatgggaaaagatcgacgacttgcatatcaaaatgctgggagatagcacaaacttgccattgattagtgtggtgatcaccactgtgagccttgaggatctttacgcaaagattggggcaagaaaccctcacaacaagcagcacactatctctgaggtcctcatcgaggtgcaaccgatagaaatggtgctgaacctggaccaaattaccgagtttatggtcccaatatgcgaggtccttgaaattattggaaattctgcctctgcacagtcagcgaacaaaccgagtgctccagttccaagcaagatcacaacagttcaagatctaccaatggtgcatttaaacagcaagggaatctatgtttatcttcctctgtctacaggcaaaaagagttgcagtgtcctgctgctaaggattgaaagtattcaacttactccgagtctcgaaaatcctctagttcgtcagcttgtccgaccagatatctaccaaaaagcagcagagctgaacatgctcagcactccgggagcactggtggaggaccgccagtatgagcttagtgttcggagggtatctctgtccaccggaaactggaagcaaactcaagagtatcgcatagagaagactctggcaagcaaacatgacaatcccgcattcgagtggaacaatcaaagtcaatccaccgagctggatcatatggaaatattcaaagactttgattttatcatgatttacgcaccggctataagctacgatagatttttggtttgtggacagagtgtggagtataattgcgcgaccgattttgtggcttccttgaacactcaccaaatcagtctgattagctgcatcatagtgcgcgcgcagcgattgggttgtataatcgaccaggtctgtgttaaaaatgctgagttaccaaaagcgagatcacataaaacgctgggaaacatttccaaatacaacagcgtggacaactcgatatattttccagcagatccaaaagtttttaagaaggatacttggatcccaaaatcatctaaaaagctggtcagcgagaggttaagttacacgaatgcaagcacaagttttactgatgccaaaggcagtagtgactacttctacggttcctgccaaagcgattctggaattcatttgggcactcggatgaaaggatattcaagatcgcttgcagcggaagagattaatcggagtggacgccaaccgtttgtcctgagttaccccagtagcgtatcgtttgtggccggtatattcgttcttaagatctacgacgttttggagttggaagaactggaaagacctgtcatgaaaccactttttttaatgactgtatctcagcccagtttcatgtctacccaaaatttcaaagcagccgtaacacaagcctcgatttttaacgtaaacataagcgtagccaaggcagatgttgatggaaaagtagattcggaacgatttaatgagtcggtatttgcaacattacccggacaactgggaagctcgggtattccgcctccgttgcttactattaagactcaatatgaccgcctccatcagaaggaagtagatgtggagcttcggaaacccatccttttaaggatttgcgaaaacactatcaaacaattggcaagtgacgttttccgtatctacactgttcttcacgagactccctgctttaatgtccgtagtccgcgtcctgtgcccgaaggatcccaactccgccagttgaagatgaattgctacaacgcggataggtttcacttgtcatgtgatcgtataactgccaagttctacgatgaggaaaggagctataaatgcagcttcgtctggctggatgtcagcacccgcatcaagtttagtagtcgccctcagaaggcggttataaggtccaacataggatcattctatgtgcagtccggagaaaagatgctgctccacccgttgcttatgcgtttgtccgtagatttggtcagtgagccatggtctgaggagctattggtcaatgccacactcaagctaaattaccttcacatcgacgcgggtgttttcagcatattgcaactgcaaaaggcacagcaaggagtgaaccggatacgcgaatatgccgatcgggaatggcagcagttcctgcgcagtcgtcctgttctgggcactccgaaagatgtctcaccctgcaatctgattaagtgcactccctcacacgaatcgatagagcggattaaacgaccgttgaaatcgaacgcggaattttatcaggatgacctgagagctggcgccttccagttcgtgtatctgaactccgagtctgtactgccaatgccctaccaggtgcagatcattaagaaaaactatggcatcatctgctggcgatatccgcagccgcgccagatgacaagcatacacatatatccggttcctatgccagacatcgaactgaattttgtgaaccagacggataacactggtgaactgcctaaacaattgaacaagtaccgccttaggcagacccctaatattacgcaaacctttcttactgtgcacgtggaggatctacagatgcattcgaggatatattccagaaacgattttagtttgcagaccgaaatgcgcgctcgagttaagtgcttggactatggattcctaaacatgctagatgttctagaaccaatgaagttctcaagctatgtaaggctgaccgactatccacgctctctagtgcaagctaatttcctagtggataagcttcggttgaactgcggaccccatgtgatccacactttgctgagttccaaataccactggcaggaagttttgcagcagaaggatgtgcggcacgttttgatgccaaagttggttatagttaaccggatacagacgcccataagctttgggcaaacgaacactgtcgaaaaaatccccgtcaatcctggtgaagtgcagctctatcacttccgcagctgctcccacgtccaggaactaaccttcttcattacaaatcccaaaactcttctggtggattcaagtgattcagtacatatagcacttaagttcgaggacgaagaaaaaatccataatttgcgggtcggagagtattgtattactctcaagttagcaaaactctccaccacccaaatttatattctggtcaagggacaaatagagttggttagcatggttcccttcaatctggtcactgagtttcgcgaggaggaaataaattacgacgaaagcaccccaccggagcatctcctcctgtccaaagaaagatcatcctactaccaaaatgtcaagcggaacgccgatatcaacatgcggcttaagctgaccgccggacttggaagaggacgcactggcgacatcccactgaaaactaacaacaacttgccttggctggtcaaggttcctacgcaatctgctcagcagtttatcagcatttgggtgcgaatcttgcgtgaggacattaaaatggataagcccgccgaggactttcagccgcagaagattctgatctgcatatggccgatctttgagatatgcaatatgctcagctgtgcggtcaaggctaccgaaagtactaccggggaaagttccacaatcgaagccatgggaggcagatgggcactgaacactgctacaacccatgcaacggagcataacattggctttacattctcgggtattttgcgaggatcttcaaaagatgaatattcgcttatgttaaggacaatggactggcacaagttcttttattatgatcccacagtgtggaccatcgaaaatgctctgcataagcttggcaagtcatcgaagcgcaaatggccactgaacgatcctgaagaattgcgggttagccgcgtgctagattttgaaaatgcctttgatgtaaagtaccagactaaggcgacgagggagttctcctgctgccaaggactggacgtgactgcctggggcatgttcatcaatggaacgggcttatatgtagccatttttatgatccaagagcaggcgcgccttgatcttaaagcaaacagtttgcaaatgatgccaaaactcaaaagtgctttcacaattgatgtccgatttgacaacgggtggaaatcctcaactccgatctgtttggaagactttacccaaaaatcgtccagcaacgccgggcgatcattgtatctgcggtacaattcattcgtggatatagttatagtagaaagggatgaagtattgcgcctaatactggaatacaggcaggaagacgacggacgtcgtttgttcaaattgcgatcaaaattcgtattcactaattttacggatgtggtccttaatgccctgacccttgctatggaccacaaggagaactctacgcgggaagaagtggaggcatattcaatttgcaaaaaggcccgcagtcttgtttcatccgaatcaaccaagaattgctcgggtaatgcaatggacgtcttctacgatcttaacgcccataaggctaagcataactgtgatacagcattcgtctatttcgtttgctttagtgttggtggtagtcgggagatctccatacccattcccttggccgtacccttcaccagacgctgcttcagcttgcaagcgggacccgagtccatcccattgatgatcaccctaatagagaaggataatgtccactacttaaatgtgttccgggacacagcacctgccattgttattagcaacaacacgaatgtcaagtttattgtggcccaaacgagtgcttcggagaacagcaatgtgagctgcacaaactcggaatttgtgggaaggaacttcgagtggaatcagctggtcctgcctcacagcaattgctattatacccctccgcagatgtacgctaactttccagatgtggaattcacaatgtgtaatttatccttggcagtttacaaagataagctttgtgccaagaacaagatcgcttggtcaaaacccattcgcaccgacaagtcttggcagaaattcctacatgtgcctcaccacggcgacgtgaaagtggttgtctgtgacaagcatcgagctatacgactgaacatctactatatagctcagcagctggagttttcggttaaagacttgcgatcacgtttgacaaaacccgagaatgttttgatgccatcgcaggagcaggctgctccgagaccagatgagagctcggagcaagagaacgacactaaaagggtaactttaccgaatatggtgacgtgtgcccatttcaacgaagagtgtgaaagcaaaacgcagacaaggatcaaaattttcatcaagagctttgtgttcagcctgcagacagacaaccgggaaaatgacttcgtgaagacggaggtgtgcaatatctatgctgatgactccatgcttatctacgacgacgacgacgatcagcgagagctgcgattgcagttgccaaaccttcaggtagataaccagttgtactccagtggaaagtatgattttcccgtcctgctttgtgcggaaaaactgtacagaaggaattgtagtctgccacaggtctacgatttggaccatgtatataagcaacaggcacaacgaactcccgtctctctgttcacgttcattttctaccaagatgaaatgcaactgcagaatgtgcgatgtcagattccacccttcagggtgtacatcgaagatgcctacctgaatcaactgctggaagcattggtagagtgtgaaccgtccaattgtgtctatagtccccctgtggagcaggatcaaattcttctgccagccgggatgacccttttgcccgatcaagttgtggcccaatcattgtacatatcggaacccttgcgtcttaatagttttacggtagagcccctgaatctattgctatccgtccatacatcttcgaggctctatatagcactagatcactctcccctatccttttcacgctacgagcgtcagcaaatccttacagttcccctccgattcggacaatctctaggactgcactacctcagcggagcgattttcggagccggctgggtcgttggttccctagagatactgggaagtcccagtgggctggcgcgctcgttcagcaccggtctgcgagactttgtgtccatgcccgttcagggtctgttccgcggaccttggggcttcctcgtgggagtgacgcaaggttctgcctctctgctgcgaaatgtgacagcaggaaccgtgaattccgtgaccaaactggctggttcagtggctcggaatctcgaccggctgactttggacgctgagcacatcgaactgaccgaggcgaggcgtagagctcggccacagggcttcgccgatggactgacccaaggtctgactggattgggcattagtttacttggcgctgttggcggattggcccatcacaccctggaggcacgaagttccgttggtgttatcgctggtctcaccaagggcattgttggagcactaacgaaaccaattagcggagcagctgaaatgctagccctcacgggccagggtgttctgcatacggtgggctttaatgctatgccccaacaggttgagcccagtttcattcgaaacgttgccctgcatggaagctccaatcgcatatggagctatttgcccgaggagttgagccgcgatcagatgctgttctttagtgagatcatgctgcagatcagcacgcagttgcgcccagccttgctgtttctaacctcgtcagtattggccatcatgcagtcggatagcgaagacctggccttcgcctctcccatttccaaggtggatgtgttggcggaccgcgaagatccctccaaactgtacttgagtctgaaatccgagaggagggatgactttgaagggcaactcaactacaccaatgagcgcatcatgaagttcctgaatgcctctcgacttcaaagcatcgccaacgattcgctgaatgatctgctccagctacacgaactggatgtggacgaccgaatccagcggcaatcgcagtgcatcttctacattaagcccaatattggtgaacacctgatccactacctaaaggtaattagtcggattcaacattga

SEQ ID NO: 38973 - protein, 3609 aa, DROSOPHILA
MFKLESYITPILLSYVAKYVKNFRDEDAQVSLWEGEVTFQNLDLRLEVLEEELNLPVELVSGHIHELSILVPWTKLMSEPVKIVINTIEFVAKLPDSESKQRRASFQREQRRKSKRESVEQPDQTKSPGPASSSSVVNKIINNINLQCHNIILKYVEDDIVVSMNVQTLNFSSAGEDWKPTMVDIHPVSVVMRKLLQVSDLTICLDKRNTAGRIEVCQEPVLYRCTLECRVLRKYNANTVSTTSTTRIGVFTKSLDINVSSLQFPMVMRLVKMLLELKPAEFEDDPQNPEDQEAVAEGSESQQGTESAGRSVFWWAWSLLPSFDTEAPSSSCDTPTGHAFDLGVYAEELNFQLKNSEYFTDQSMGGIKRIRYTPILRISLGGLYYERTILKECDWANVKAGLSSMCMEPLGAYRSDDLVDRNLVNTQEFQQERSFIDKSLFDENYMFAERSWCSYNYADYVARNTDEYMLFRSPVLAFDVIEHRVPKPSSHPVAESQLRDLGVRIQYRLLSAGITFHFSQSFVQVKKVISDLIRPYDYPGYRSESMKDEDRGVPEPENKNSEMTIPDLEYLMGLVPTCNYKIELRNIVVQLYPRQQQDESSAINQHQLTTTVRQSLLPYLQLKISLVEGTMCGPVNPVRLVQLITHLEEKPRDVVNACYNCFHFNVKNLALMIMNTTPDNGRAKLLNIPRVQVNWNRLLAPHLWRQNEAPLETSEIKSEIITLEFSKRELIIAKRLVPLISSFSGQDLCDLAHIVANVNVNSDVIKLQSVGTKLNLVYHKYHTHLAAVGSLQGVHTDAVHTKMNIRNVVLSTSKNADNKWLEMQCQFPLEEVHSEQEKIPGTVVCLWLEPFRITTDIYLLQFLNFSDNSGRQITKDKEVETDLESVNQSEPPITQSVSNYSTISASAIAFNDFQPRRISRNNSRKISVPEETVHLSSERDERHTQAEPLTIPVANKPQPSNFDTTDFVKRLTKMVVLVEIAQAKIDVCEVMMRKTPGHTDVEYTSIRLPHMKVKSGNCEAIQRGNIRGVIPVASNTELLNWVFDLNEFNVCYRRANVTEMIIAPVRTTITLALSFKTSDKVDGSKGKEDKCANTCSINVHVDMSAINIFAQRVKLLHEHCLIISKMYGSLCPDEPASKWQTGKMKPRLEVYTGSAQNYPVIKEFLELDPNFEAPKVKSAPKSSVILFCQWTIPRISFEMENSNDFKHSKIVMSLEDLLLNIDKHSDFNKITTKIENFGLNYYEEKHEEWEKIDDLHIKMLGDSTNLPLISVVITTVSLEDLYAKIGARNPHNKQHTISEVLIEVQPIEMVLNLDQITEFMVPICEVLEIIGNSASAQSANKPSAPVPSKITTVQDLPMVHLNSKGIYVYLPLSTGKKSCSVLLLRIESIQLTPSLENPLVRQLVRPDIYQKAAELNMLSTPGALVEDRQYELSVRRVSLSTGNWKQTQEYRIEKTLASKHDNPAFEWNNQSQSTELDHMEIFKDFDFIMIYAPAISYDRFLVCGQSVEYNCATDFVASLNTHQISLISCIIVRAQRLGCIIDQVCVKNAELPKARSHKTLGNISKYNSVDNSIYFPADPKVFKKDTWIPKSSKKLVSERLSYTNASTSFTDAKGSSDYFYGSCQSDSGIHLGTRMKGYSRSLAAEEINRSGRQPFVLSYPSSVSFVAGIFVLKIYDVLELEELERPVMKPLFLMTVSQPSFMSTQNFKAAVTQASIFNVNISVAKADVDGKVDSERFNESVFATLPGQLGSSGIPPPLLTIKTQYDRLHQKEVDVELRKPILLRICENTIKQLASDVFRIYTVLHETPCFNVRSPRPVPEGSQLRQLKMNCYNADRFHLSCDRITAKFYDEERSYKCSFVWLDVSTRIKFSSRPQKAVIRSNIGSFYVQSGEKMLLHPLLMRLSVDLVSEPWSEELLVNATLKLNYLHIDAGVFSILQLQKAQQGVNRIREYADREWQQFLRSRPVLGTPKDVSPCNLIKCTPSHESIERIKRPLKSNAEFYQDDLRAGAFQFVYLNSESVLPMPYQVQIIKKNYGIICWRYPQPRQMTSIHIYPVPMPDIELNFVNQTDNTGELPKQLNKYRLRQTPNITQTFLTVHVEDLQMHSRIYSRNDFSLQTEMRARVKCLDYGFLNMLDVLEPMKFSSYVRLTDYPRSLVQANFLVDKLRLNCGPHVIHTLLSSKYHWQEVLQQKDVRHVLMPKLVIVNRIQTPISFGQTNTVEKIPVNPGEVQLYHFRSCSHVQELTFFITNPKTLLVDSSDSVHIALKFEDEEKIHNLRVGEYCITLKLAKLSTTQIYILVKGQIELVSMVPFNLVTEFREEEINYDESTPPEHLLLSKERSSYYQNVKRNADINMRLKLTAGLGRGRTGDIPLKTNNNLPWLVKVPTQSAQQFISIWVRILREDIKMDKPAEDFQPQKILICIWPIFEICNMLSCAVKATESTTGESSTIEAMGGRWALNTATTHATEHNIGFTFSGILRGSSKDEYSLMLRTMDWHKFFYYDPTVWTIENALHKLGKSSKRKWPLNDPEELRVSRVLDFENAFDVKYQTKATREFSCCQGLDVTAWGMFINGTGLYVAIFMIQEQARLDLKANSLQMMPKLKSAFTIDVRFDNGWKSSTPICLEDFTQKSSSNAGRSLYLRYNSFVDIVIVERDEVLRLILEYRQEDDGRRLFKLRSKFVFTNFTDVVLNALTLAMDHKENSTREEVEAYSICKKARSLVSSESTKNCSGNAMDVFYDLNAHKAKHNCDTAFVYFVCFSVGGSREISIPIPLAVPFTRRCFSLQAGPESIPLMITLIEKDNVHYLNVFRDTAPAIVISNNTNVKFIVAQTSASENSNVSCTNSEFVGRNFEWNQLVLPHSNCYYTPPQMYANFPDVEFTMCNLSLAVYKDKLCAKNKIAWSKPIRTDKSWQKFLHVPHHGDVKVVVCDKHRAIRLNIYYIAQQLEFSVKDLRSRLTKPENVLMPSQEQAAPRPDESSEQENDTKRVTLPNMVTCAHFNEECESKTQTRIKIFIKSFVFSLQTDNRENDFVKTEVCNIYADDSMLIYDDDDDQRELRLQLPNLQVDNQLYSSGKYDFPVLLCAEKLYRRNCSLPQVYDLDHVYKQQAQRTPVSLFTFIFYQDEMQLQNVRCQIPPFRVYIEDAYLNQLLEALVECEPSNCVYSPPVEQDQILLPAGMTLLPDQVVAQSLYISEPLRLNSFTVEPLNLLLSVHTSSRLYIALDHSPLSFSRYERQQILTVPLRFGQSLGLHYLSGAIFGAGWVVGSLEILGSPSGLARSFSTGLRDFVSMPVQGLFRGPWGFLVGVTQGSASLLRNVTAGTVNSVTKLAGSVARNLDRLTLDAEHIELTEARRRARPQGFADGLTQGLTGLGISLLGAVGGLAHHTLEARSSVGVIAGLTKGIVGALTKPISGAAEMLALTGQGVLHTVGFNAMPQQVEPSFIRNVALHGSSNRIWSYLPEELSRDQMLFFSEIMLQISTQLRPALLFLTSSVLAIMQSDSEDLAFASPISKVDVLADREDPSKLYLSLKSERRDDFEGQLNYTNERIMKFLNASRLQSIANDSLNDLLQLHELDVDDRIQRQSQCIFYIKPNIGEHLIHYLKVISRIQH

SEQ ID NO: 38974 - DNA, 3590 bp, DROSOPHILA
tatccgctggttggactgttcttaaagtttcttctgccaggctgtggtccactgttgtcccgctgctgaaaccgattgctgccgaagcgtccctcgttgcccgcgcttccaccgaacttgcctccgcctgcaaatttgttcctaaagccctgtccctgattggaagactcattgttcggtggtcctttcgagtatggagcactgcgctgttgtctgtagttggactcgtttctcacgggaccaaatttggcggccgaggagttcgagctccttgggccttcgttggagaatctgccaccgacttcctcacgaaagttgcgcttgaagttggtattggattcatgaggtctcttgtccgccccgccaccttgaactgaggatgatgaaatacttagatgctggatctttggagtgatcaaagcttaccctgcgagggcctgcgccccggattgtccccagagcccggctgacctcgactgccacctcccgggccgtactttggcctgcccgcctccaccacaatgggctggcccttgaagatggtgccattcagcgctgcgatggccgcctccgccatgtccgtgttctccagatggacgaaggcgcagcgattcatcacgtcgcactcaacgaccgatccatagttggtgaacagtcgacgcagctcctccggcttgcagcgcggcaggctgccgacgaacaccttggcggtctgcaggataaagctagcattactccggattactatggacaatccggcggcgctgcctctttcttacgtacagtattcatgtatttatttttctctacaacttttcgctgtttttttcttttattgaaatggagatggacaactgtgcacctgaccggcagtgtgaccagcgatggctacttccacggccatatcggtagctatcgacatcgatagacccaagccatcacttttgtttaccaattttaaaattttaaaaattaaggtttctcacgagcctgatctatcatgtggcctccagggagcgaggatagctactccgccaaaatggactatggcaagagcgtggtgaacatcctgcccagcgtagagatgctggtgaactttaatggcgaaatgacgcggtctagcaaacggtcatgtctactgtacgcggagagagtggacttcaaggagctgctggtaaatatgcttgtcaagacctcctccgatcaaatttcaatacatcctctgccccacagcaactccgattaacggagaagtccgatcaacggcgcatgtacatcaccacagtggacagcgcctcctttcaggatcttaaacaggatcagtcgctgaatgtgtcattctctgggttcattgacaatgtagtgcgcatgctgaaggactgccagtcgggtaaactggagctgcacctgaccacacgggatcagaacctttcatccggcagggaggtccacgactattatcttcagtttgttgaaattcggtcctttaagaacctagttcaccttagcctgccttgtcgttctgctcccttgaacaccgtactcttctacataaacagcatgctggaagcctcccacaaaaagcaatatattctcgagcaaagtatgcagcaaatgcaggctgaaatcaacgcacaacgcgcgcatgcggaaaggttgaccacggaaaacacaaatatcagggaagctttggccgaaaatactcgcatcttagaggaaaagcatgctgccgaggtccatcaataccaggaaaaactgtccaaaataaacgagcagcgcagcaatgagctggagagaaatcgtagagcgatctccggctttcaggcccaattggacaaggcttcgttggagaaagcagaactaaagtcggcccaagagcaggccgagaaacgatgtcaaaccctgtccgaggagttgtcctgttgcaaagccagagtgtgcaccctaaaagagcaaaatgacaaactgcacggggatgtggccaatatcaggaagcatgaacgcaagttggagtacaaaatcgaggacctcaagcagcacactgtcgagctgcaggaacatattcaaaagggaaacaaagagaaggtatgtgtataaaaagaataatgcacatcagaagagtatatcccttttaattttgcaggccaacatagccgctgaactggaggccgagaagaagatcctgcacaccaagcgccaggctttggaaatggcctccgaggagatctccaaggccaaccagataatcgttaaacaaagccaggagctgctcaacctcaaaaagaccattgcctggcgcacagaggtggctctgcagcaagagaaggcggttcaggccaaggagagcctactatccctgcgggagaatgagctgcgcgaggctcgaataactattgaaaaactgagggaggaaatcccccagcaactgcaatccatgcgtaactttgcccagggactggagcagaagtattccaaacgtaagctgagaccccaatctttaagtgtacctacttacaacttgctcttttcagaaatcctcattctaaaagaacggcttgcaatacccacgggcaaagaaaatcggcgatagttttacttattgttaatgcattttttcgttttttgtaccagtttagtaaagttagttgtattattcagctctagtcataatcctcctgaacactttcacctgcatgagccgtggccacattcaccgcttggctgatatcctccatttggttcagtttcagtcgctcacggatgagttcagcaatagctttctgggtacgtcgttccagtcgctccaactttttgctggcatcccgcttcagatcccagtcgggttttcggggagccaggttggttatgtcaatctcatctatcaccatgggctgctggagcagactcaattgatcctccacagctgattctatgttgcccgtgggttcctgtgctagaatctcgccatcggtggtctcattctggggcttgtagctgcggaaaactggtctgcaaagatatatgaaactggtttatagggattcataatagcatttcattgtattgctgacttgggtaacttttcaatggactcggcagcgtctcctcctttgttttgcacttgttcccggagtttttgcagacgctccttgcgttttagagattcttgtgtcagcttgccgacgccattgttgtccatcatgcccatgtgaagtttgttctcaagataatacaattaatttaaatttgagtctggggtctttacgtttatttattattgttatgtttcttgttcttcccatacatatatcgtatatcgattacaatcgcgttcgttaccagcttggaattatgcaggtatgaactattattttacaacaagatatttgttgttatacaagattcgattttattttatttattacaatttaagattaaggaggcgtatcaagatattaaaaatacataattactttagtgacgaaagcaaccacattccacaacgaatacggtctgatcgaaacaaccgatgaatcgatagcggccaagatggatacacagcgtttgtttttgcgcaagggggtggaaat

SEQ ID NO: 38975 - DNA, 1419 bp, DROSOPHILA
atgtggcctccagggagcgaggatagctactccgccaaaatggactatggcaagagcgtggtgaacatcctgcccagcgtagagatgctggtgaactttaatggcgaaatgacgcggtctagcaaacggtcatgtctactgtacgcggagagagtggacttcaaggagctgctgcaactccgattaacggagaagtccgatcaacggcgcatgtacatcaccacagtggacagcgcctcctttcaggatcttaaacaggatcagtcgctgaatgtgtcattctctgggttcattgacaatgtagtgcgcatgctgaaggactgccagtcgggtaaactggagctgcacctgaccacacgggatcagaacctttcatccggcagggaggtccacgactattatcttcagtttgttgaaattcggtcctttaagaacctagttcaccttagcctgccttgtcgttctgctcccttgaacaccgtactcttctacataaacagcatgctggaagcctcccacaaaaagcaatatattctcgagcaaagtatgcagcaaatgcaggctgaaatcaacgcacaacgcgcgcatgcggaaaggttgaccacggaaaacacaaatatcagggaagctttggccgaaaatactcgcatcttagaggaaaagcatgctgccgaggtccatcaataccaggaaaaactgtccaaaataaacgagcagcgcagcaatgagctggagagaaatcgtagagcgatctccggctttcaggcccaattggacaaggcttcgttggagaaagcagaactaaagtcggcccaagagcaggccgagaaacgatgtcaaaccctgtccgaggagttgtcctgttgcaaagccagagtgtgcaccctaaaagagcaaaatgacaaactgcacggggatgtggccaatatcaggaagcatgaacgcaagttggagtacaaaatcgaggacctcaagcagcacactgtcgagctgcaggaacatattcaaaagggaaacaaagagaaggccaacatagccgctgaactggaggccgagaagaagatcctgcacaccaagcgccaggctttggaaatggcctccgaggagatctccaaggccaaccagataatcgttaaacaaagccaggagctgctcaacctcaaaaagaccattgcctggcgcacagaggtggctctgcagcaagagaaggcggttcaggccaaggagagcctactatccctgcgggagaatgagctgcgcgaggctcgaataactattgaaaaactgagggaggaaatcccccagcaactgcaatccatgcgtaactttgcccagggactggagcagaagtattccaaacaaatcctcattctaaaagaacggcttgcaatacccacgggcaaagaaaatcggcgatag

SEQ ID NO: 38976 - protein, 472 aa, DROSOPHILA
MWPPGSEDSYSAKMDYGKSVVNILPSVEMLVNFNGEMTRSSKRSCLLYAERVDFKELLQLRLTEKSDQRRMYITTVDSASFQDLKQDQSLNVSFSGFIDNVVRMLKDCQSGKLELHLTTRDQNLSSGREVHDYYLQFVEIRSFKNLVHLSLPCRSAPLNTVLFYINSMLEASHKKQYILEQSMQQMQAEINAQRAHAERLTTENTNIREALAENTRILEEKHAAEVHQYQEKLSKINEQRSNELERNRRAISGFQAQLDKASLEKAELKSAQEQAEKRCQTLSEELSCCKARVCTLKEQNDKLHGDVANIRKHERKLEYKIEDLKQHTVELQEHIQKGNKEKANIAAELEAEKKILHTKRQALEMASEEISKANQIIVKQSQELLNLKKTIAWRTEVALQQEKAVQAKESLLSLRENELREARITIEKLREEIPQQLQSMRNFAQGLEQKYSKQILILKERLAIPTGKENRR

SEQ ID NO: 38977 - DNA, 3914 bp, DROSOPHILA
atccatgcgtaactttgcccagggactggagcagaagtattccaaacgtaagctgagaccccaatctttaagtgtacctacttacaacttgctcttttcagaaatcctcattctaaaagaacggcttgcaatacccacgggcaaagaaaatcggcgatagttttacttattgttaatgcattttttcgttttttgtaccagtttagtaaagttagttgtattattcagctctagtcataatcctcctgaacactttcacctgcatgagccgtggccacattcaccgcttggctgatatcctccatttggttcagtttcagtcgctcacggatgagttcagcaatagctttctgggtacgtcgttccagtcgctccaactttttgctggcatcccgcttcagatcccagtcgggttttcggggagccaggttggttatgtcaatctcatctatcaccatgggctgctggagcagactcaattgatcctccacagctgattctatgttgcccgtgggttcctgtgctagaatctcgccatcggtggtctcattctggggcttgtagctgcggaaaactggtctgcaaagatatatgaaactggtttatagggattcataatagcatttcattgtattgctgacttgggtaacttttcaatggactcggcagcgtctcctcctttgttttgcacttgttcccggagtttttgcagacgctccttgcgttttagagattcttgtgtcagcttgccgacgccattgttgtccatcatgcccatgtgaagtttgttctcaagataatacaattaatttaaatttgagtctggggtctttacgtttatttattattgttatgtttcttgttcttcccatacatatatcgtatatcgattacaatcgcgttcgttaccagcttggaattatgcaggtatgaactattattttacaacaagatatttgttgttatacaagattcgattttattttatttattacaatttaagattaaggaggcgtatcaagatattaaaaatacataattactttagtgacgaaagcaaccacattccacaacgaatacggtctgatcgaaacaaccgatgaatcgatagcggccaagatggatacacagcgtttgtttttgcgcaagggggtggaaatcggaaatctgctgtactttcgtgcattttaaacaaaccaaataggcattatagccgatggaagtggacccagcatccttccagctcctctaggcacccgttccagggcccggcggctagtccgtccctgccaattggcgcagcgacatcggcagagcgcaaccagctgctgtttggagtagcaaaaataaaccagagcacagctcccgctcccgctcccgagcacagagactatcccgatccgcatcgaggtaacttctgtggtctattaatattagtggccggctaaccagtgcgcgatcccttccccgacagaaagggagaaccgacagcccattgttctgacaccgattctagattgcccggccagatccgactcagcgatctaaaaatggagtggacgcgcgagaagacgctgcagctgatcagtgagtaccgcagccgacgcgggctgtgggacatgacttgcgacgagtaccggaagaaggacgtcaagcagcggctcttgaacgaagtcagccaagtgctgggcgggaacatcccgatcaacgagctggagaagaagttccacacgctgcgcacgcagtaccaccgcgagatcagtcgcatgaaacgcaaggagccctacaactccaagtggtttggcttcaagaacctggtgtttctcagctcgccctacgcctgccgctccacaaagggtcgcctgaaggcggatctgcagggcgacgagcgaaagtttgtcctgggcgaggtcaccgccgatcataacagcgacagcagcacgccggccaatcacaacagcaacacgaacgccaacatgaacgaggagtacctccgcaagaaccacgccagcagtcgggcccaagagctggagaaacttatcgaggagacaaccaaagacgtggatgacattgatgagtcggagctagaggagggcgaagtcaagcctaagcaggcgaaagagatgagcgtccgctttgtaagcctcaacgaacaggaagagacggagccgctggagaatcatcatcagacgctgatggacctgcaccaccagggcaacgccgtggaagccgtcagcttccaggccaacgagagcggtgaactgcactaccagaccacaccaacccaaagcacgggcagcagctcagtgcacgtaatgcccacacgaatcattaagatccagcggcgggacacgtcgagtgggcaggaggatagctactttgaggagcacacgcaactgcatccgccgccggtcaaacgcatgtactacgaagccagtccagcgtcgcacaacaccacctccattctgtcccccgcactggaaagcagtgccaatggcacagccagcagtgtgctgaccacctcgcccggaataaccatgagtaacttgcgcttgcccaaggtgaacacgccgcccaaaccagcccaggcccaagccatccccagtccacctccgcccaccattgtcagcctgccgccagcgcgcgacgagtttgcaacgtatggagagtacgtggccaacgagatgcgcgccatcagcaatcgggaggtgcttgtcgccctcaagcaccgcatcaacacggccatcttcgaggctagcatggccgaaatagccccgaaatagattgatcacttagctagagctattaactacaactttaggtttaaggcctttgtctctgtgctttttataggcctcgtcccccgtgacttgtattctcatttgaatttgtacatttaacatatatatgtatgtaacgatttaaatactaagccaaatataaaatttagtggaatttcaaaaataagttcaattggcagcaggcccgtttaattctgtttcgagtttgggggaaatttatttcattgtttcgttggcactcaagatgcagaatcccatttgtgaaccgttcaccagttggccggtaaagttcgacatcaaccagctcatcaaggagttccagcccgaggagaaggggcgccaggtagatgaggataagtcgccgcgggactttctccacctacccgacaacaactgggtggtcctgcccagttttaagtaccaattcgagcacttgaccccgtatctttcctgccgccagagcaaatatatgcggtgccgctttcagaagtttttagataatgttcccagcagctatgtgaccatctccttgtatggctccaatgtgagcaagtgggttatcttcttaaaaatgtattagaaagcacttcgtgaaataacaatcctcttctagcatgcccaagccgaggcgaaagagtctgaatggccagttctacggggtggataacaaactggctcctgttccggcggtcgcagatcctcgctctcctccgcaccgaaagtagtgatataaattaacaagcaatttaaaatttttggtggaattactgcttagataaatataatattctttttgttctatgcctacatttttcaaaaaagaatttcaatttaaattcaaatcagcgatattgccggactgtcgtattttaacagaacctctggactaccgttatttcgtcagctgtacgtttctaacggttaagtggacggttacactgcaaacggtaaaaatcaataatgcagaaatagcgggcgaaaaaaaatgtttacaaaatgcattagttgctgtggcctcgcaataatctcggtttttttcgcctgccttttcgtcgagaattgcggtgagcacagaaatagaccataaaaagcaaggatcttgataaagtgtcc

SEQ ID NO: 38978 - DNA, 1914 bp, DROSOPHILA
aagattaaggaggcgtatcaagatattaaaaatacataattactttagtgacgaaagcaaccacattccacaacgaatacggtctgatcgaaacaaccgatgaatcgatagcggccaagatggatacacagcgtttgtttttgcgcaagggggtggaaatcggaaatctgctgtactttcgtgcattttaaacaaaccaaataggcattatagccgatggaagtggacccagcatccttccagctcctctaggcacccgttccagggcccggcggctagtccgtccctgccaattggcgcagcgacatcggcagagcgcaaccagctgctgtttggagtagcaaaaataaaccagagcacagctcccgctcccgctcccgagcacagagactatcccgatccgcatcgaggtaacttctgtggtctattaatattagtggccggctaaccagtgcgcgatcccttccccgacagaaagggagaaccgacagcccattgttctgacaccgattctagattgcccggccagatccgactcagcgatctaaaaatggagtggacgcgcgagaagacgctgcagctgatcagtgagtaccgcagccgacgcgggctgtgggacatgacttgcgacgagtaccggaagaaggacgtcaagcagcggctcttgaacgaagtcagccaagtgctgggcgggaacatcccgatcaacgagctggagaagaagttccacacgctgcgcacgcagtaccaccgcgagatcagtcgcatgaaacgcaaggagccctacaactccaagtggtttggcttcaagaacctggtgtttctcagctcgccctacgcctgccgctccacaaagggtcgcctgaaggcggatctgcagggcgacgagcgaaagtttgtcctgggcgaggtcaccgccgatcataacagcgacagcagcacgccggccaatcacaacagcaacacgaacgccaacatgaacgaggagtacctccgcaagaaccacgccagcagtcgggcccaagagctggagaaacttatcgaggagacaaccaaagacgtggatgacattgatgagtcggagctagaggagggcgaagtcaagcctaagcaggcgaaagagatgagcgtccgctttgtaagcctcaacgaacaggaagagacggagccgctggagaatcatcatcagacgctgatggacctgcaccaccagggcaacgccgtggaagccgtcagcttccaggccaacgagagcggtgaactgcactaccagaccacaccaacccaaagcacgggcagcagctcagtgcacgtaatgcccacacgaatcattaagatccagcggcgggacacgtcgagtgggcaggaggatagctactttgaggagcacacgcaactgcatccgccgccggtcaaacgcatgtactacgaagccagtccagcgtcgcacaacaccacctccattctgtcccccgcactggaaagcagtgccaatggcacagccagcagtgtgctgaccacctcgcccggaataaccatgagtaacttgcgcttgcccaaggtgaacacgccgcccaaaccagcccaggcccaagccatccccagtccacctccgcccaccattgtcagcctgccgccagcgcgcgacgagtttgcaacgtatggagagtacgtggccaacgagatgcgcgccatcagcaatcgggaggtgcttgtcgccctcaagcaccgcatcaacacggccatcttcgaggctagcatggccgaaatagccccgaaatagattgatcacttagctagagctattaactacaactttaggtttaaggcctttgtctctgtgctttttataggcctcgtcccccgtgacttgtattctcatttgaatttgtacatttaacatatatatgtatg

SEQ ID NO: 38979 - protein, 410 aa, DROSOPHILA
MEWTREKTLQLISEYRSRRGLWDMTCDEYRKKDVKQRLLNEVSQVLGGNIPINELEKKFHTLRTQYHREISRMKRKEPYNSKWFGFKNLVFLSSPYACRSTKGRLKADLQGDERKFVLGEVTADHNSDSSTPANHNSNTNANMNEEYLRKNHASSRAQELEKLIEETTKDVDDIDESELEEGEVKPKQAKEMSVRFVSLNEQEETEPLENHHQTLMDLHHQGNAVEAVSFQANESGELHYQTTPTQSTGSSSVHVMPTRIIKIQRRDTSSGQEDSYFEEHTQLHPPPVKRMYYEASPASHNTTSILSPALESSANGTASSVLTTSPGITMSNLRLPKVNTPPKPAQAQAIPSPPPPTIVSLPPARDEFATYGEYVANEMRAISNREVLVALKHRINTAIFEASMAEIAPK

SEQ ID NO: 38980 - DNA, 2548 bp, DROSOPHILA
ccacggaaaacacaaatatcagggaagctttggccgaaaatactcgcatcttagaggaaaagcatgctgccgaggtccatcaataccaggaaaaactgtccaaaataaacgagcagcgcagcaatgagctggagagaaatcgtagagcgatctccggctttcaggcccaattggacaaggcttcgttggagaaagcagaactaaagtcggcccaagagcaggccgagaaacgatgtcaaaccctgtccgaggagttgtcctgttgcaaagccagagtgtgcaccctaaaagagcaaaatgacaaactgcacggggatgtggccaatatcaggaagcatgaacgcaagttggagtacaaaatcgaggacctcaagcagcacactgtcgagctgcaggaacatattcaaaagggaaacaaagagaaggtatgtgtataaaaagaataatgcacatcagaagagtatatcccttttaattttgcaggccaacatagccgctgaactggaggccgagaagaagatcctgcacaccaagcgccaggctttggaaatggcctccgaggagatctccaaggccaaccagataatcgttaaacaaagccaggagctgctcaacctcaaaaagaccattgcctggcgcacagaggtggctctgcagcaagagaaggcggttcaggccaaggagagcctactatccctgcgggagaatgagctgcgcgaggctcgaataactattgaaaaactgagggaggaaatcccccagcaactgcaatccatgcgtaactttgcccagggactggagcagaagtattccaaacgtaagctgagaccccaatctttaagtgtacctacttacaacttgctcttttcagaaatcctcattctaaaagaacggcttgcaatacccacgggcaaagaaaatcggcgatagttttacttattgttaatgcattttttcgttttttgtaccagtttagtaaagttagttgtattattcagctctagtcataatcctcctgaacactttcacctgcatgagccgtggccacattcaccgcttggctgatatcctccatttggttcagtttcagtcgctcacggatgagttcagcaatagctttctgggtacgtcgttccagtcgctccaactttttgctggcatcccgcttcagatcccagtcgggttttcggggagccaggttggttatgtcaatctcatctatcaccatgggctgctggagcagactcaattgatcctccacagctgattctatgttgcccgtgggttcctgtgctagaatctcgccatcggtggtctcattctggggcttgtagctgcggaaaactggtctgcaaagatatatgaaactggtttatagggattcataatagcatttcattgtattgctgacttgggtaacttttcaatggactcggcagcgtctcctcctttgttttgcacttgttcccggagtttttgcagacgctccttgcgttttagagattcttgtgtcagcttgccgacgccattgttgtccatcatgcccatgtgaagtttgttctcaagataatacaattaatttaaatttgagtctggggtctttacgtttatttattattgttatgtttcttgttcttcccatacatatatcgtatatcgattacaatcgcgttcgttaccagcttggaattatgcaggtatgaactattattttacaacaagatatttgttgttatacaagattcgattttattttatttattacaatttaagattaaggaggcgtatcaagatattaaaaatacataattactttagtgacgaaagcaaccacattccacaacgaatacggtctgatcgaaacaaccgatgaatcgatagcggccaagatggatacacagcgtttgtttttgcgcaagggggtggaaatcggaaatctgctgtactttcgtgcattttaaacaaaccaaataggcattatagccgatggaagtggacccagcatccttccagctcctctaggcacccgttccagggcccggcggctagtccgtccctgccaattggcgcagcgacatcggcagagcgcaaccagctgctgtttggagtagcaaaaataaaccagagcacagctcccgctcccgctcccgagcacagagactatcccgatccgcatcgaggtaacttctgtggtctattaatattagtggccggctaaccagtgcgcgatcccttccccgacagaaagggagaaccgacagcccattgttctgacaccgattctagattgcccggccagatccgactcagcgatctaaaaatggagtggacgcgcgagaagacgctgcagctgatcagtgagtaccgcagccgacgcgggctgtgggacatgacttgcgacgagtaccggaagaaggacgtcaagcagcggctcttgaacgaagtcagccaagtgctgggcgggaacatcccgatcaacgagctggagaagaagttccacacgctgcgcacgcagtaccaccgcgagatcagtcgcatgaaacgcaag

SEQ ID NO: 38981 - DNA, 486 bp, DROSOPHILA
atgggcatgatggacaacaatggcgtcggcaagctgacacaagaatctctaaaacgcaaggagcgtctgcaaaaactccgggaacaagtgcaaaacaaaggaggagacgctgccgagtccattgaaaagttacccaaaccagttttccgcagctacaagccccagaatgagaccaccgatggcgagattctagcacaggaacccacgggcaacatagaatcagctgtggaggatcaattgagtctgctccagcagcccatggtgatagatgagattgacataaccaacctggctccccgaaaacccgactgggatctgaagcgggatgccagcaaaaagttggagcgactggaacgacgtacccagaaagctattgctgaactcatccgtgagcgactgaaactgaaccaaatggaggatatcagccaagcggtgaatgtggccacggctcatgcaggtgaaagtgttcaggaggattatgactag

SEQ ID NO: 38982 - protein, 161 aa, DROSOPHILA
MGMMDNNGVGKLTQESLKRKERLQKLREQVQNKGGDAAESIEKLPKPVFRSYKPQNETTDGEILAQEPTGNIESAVEDQLSLLQQPMVIDEIDITNLAPRKPDWDLKRDASKKLERLERRTQKAIAELIRERLKLNQMEDISQAVNVATAHAGESVQEDYD

SEQ ID NO: 38983 - DNA, 2420 bp, DROSOPHILA
gcgcagaaataagcccaaatggttttgcctggcggccagctccccgcgaccaatataatcggatctgtagagcgccatggcactgtccacaatcagcaaagcgtatctggactcaaagagcatgcccgccgccatctggatgagcttggtctgctgatctgagttgtgggcacgggtgaaggccacattgtccagcacctcggattcattcagtttgtacctttgcgcgatggcagccaaacgctccggacggaaggtgttctccgtgtcgatgtacatgcacttgccctcgccgcccttctggctgatgggcagctggcaggttactgccagagtgtggcacaattgggtctttccgcagcggaactcgccaaagatctcggtaatggatcccgtctcaatgccgccgcccagcagtttatccagctccttggagcccgtgctcagctgcacgacatcggcacgcatttgatagaaggtgcgagcactaaggaagcccagaggcaccagtttgttagcctccgtgatgatctgctccaccttgccgccgcccaagccgggaatggccatcagttgcttcttggtggcattggccaccgactccacggtgtgcagactggcctgctggagcagcttgatgtccttggccgtgatgctgccgccctaggaggaggatatcgtagggaatgcccataataatcctggtcgagatcgcagcctactcactattaacttagtcacgctgagtggaccttcttcctcctcctcttcctgctgtgcctgaacattcgttagcttctccatttgacagtttcgaagttaaatttgactatttgttgtttcgagtttcgttatttaaattgcacgtcttgcgtgagagaatttcgacaaagactgcgcggcgcgcaattcactgcaaaatcagtttgccaatcgccccgaacgcacaaaactctatcactacagaggatcccgcttaaaaggaacgcgcaagatcaccatggcgaactattactatttcgacatcaaactgtgagtagaatgatgttctgcggtcattaatataaacttggttgttattaaattcagtaaatatattcatttatttaatagtaaacttcgggatccgactgcagttgctttgaccccatctctgtttcgaagctgcgttcttgacgccctggacagtttcttctgcgaggagaaacccacactggagatcgtgaagttctgcgcccagcaacatcgtgttatctttcgagtgccagagcaactgcacgacatgacccgcatatccattgagctcatcggtcactaccagcagataccctgtcattttgagatcttggaaacatccaaatcatcgctggactttgagaagagcattgaaaagactgtcgcggttgtgtccgatgattaggactagcgaattgtaatactcagtgtaatatacattataaccgtcatgaagaatttgaatttgaatcctaactgattttactgtgatctgatttttttgtcattcacaacgaactgaaatgatttctgtgatggctactaaatgagattaaaaagcggaaaaaccccataaacttgtaaccattttaataaaattgcatttaagtagttccaataacaatttaaatgttttaataaatggctataattttagctattttataactactcatgtccgttgtgagccgagctggcatctctggcggcgcacagctgtttgagaagcagaaagaaacagcaaaaaaggggagtaattacataaaaaaaacacactgaccggcaacttttggacgacttttcccgaagattccgccaaaaaaagaggggcactggcacttgcacccaaagcatgagtggttaccaatatctggacgtgaagatgtgagttccgggcactcagccccgctccttaaagccccgtatttcccacgtgcgcacgtgcatcatgcaaatataattaagataattcacgtttttaatcgccagaaaactccgtgatccagactccgtgactctgacgcccgtattcttctgtggctgcatccatagctccttggctagtatttttggcgaaataggtggccagaccatactggaaattgtgaaatttagttccagccaaaaacgctccattctccgggtgcccgagaacgtcctggatcgcgttcgcgtagctatagccctaataggatactaccaggaggtgccctgccattttcaggtgctcagcacatcccgaaagcccttggattttgaggaatcccccgaggagtttgtagcatttaactagcattaccgcatcaggatgtcattctcttactgcaaggagtacggcaaggacaaggtgatttttgtgaccaaggaggaccatgccacgcccagcaccatcgagctgccgccgc

SEQ ID NO: 38984 - DNA, 339 bp, DROSOPHILA
atggcgaactattactatttcgacatcaaacttaaacttcgggatccgactgcagttgctttgaccccatctctgtttcgaagctgcgttcttgacgccctggacagtttcttctgcgaggagaaacccacactggagatcgtgaagttctgcgcccagcaacatcgtgttatctttcgagtgccagagcaactgcacgacatgacccgcatatccattgagctcatcggtcactaccagcagataccctgtcattttgagatcttggaaacatccaaatcatcgctggactttgagaagagcattgaaaagactgtcgcggttgtgtccgatgattag

SEQ ID NO: 38985 - protein, 112 aa, DROSOPHILA
MANYYYFDIKLKLRDPTAVALTPSLFRSCVLDALDSFFCEEKPTLEIVKFCAQQHRVIFRVPEQLHDMTRISIELIGHYQQIPCHFEILETSKSSLDFEKSIEKTVAVVSDD

SEQ ID NO: 38986 - DNA, 2195 bp, DROSOPHILA
cggtgggaggtgggcggtggcagggggcgtggaacgaacaggtattttcggtttagttgttacgaaataagtggcgaaaattgacgtgccgaaagcgaaggcaaaaaaccaaaacaaacaaacacgaaaactcaggcaaatgcgccgtacgctttgcattgttttttcgcccactttttatggatcgaatttaacgacaatctttggccttttgttgctttaattgccctagctgtccgcactcacctttgctggacttttcgcgcagtgcagctgcctcgaaggagcccaatgcctgcattatttcgcggtcgccactttccttgcggtcaatcgatttttcagagcgccccgaaaagtccaagtgcagcagtgtaacgaattcgcagctttcgttcgcttttccgtgcatttcggaatttgcactaattggtaggattccccggggaatcgaatccgtcacttttaatcctgtttgctgttcttttcgcactcgcttttgtttttgcaatgcaggctcctgcacttgcggtacacacacataccagcagctgctacggccgccgctgcacacacacacacgcacagcgggcaaacgggcatctctctagctctacccgtctcgcttcaacccactgccgcgcgcattttcacatttcccgcatttgttgctacttcgcttgatttattcggcgttcatctgggcgttccgttttcactttcgcctggctggggcaacaacaagctcgcgatcgagtatctcagctcggccgtccgctgcgaacgagtatctgagtagctgagtaactgagtatctgagcgtgagtatctgtatccgagtgtctcgcggaatcggaatcaacacaaacagctgttagggctgcgatggcaagaatcgatagcttagcgataggaaatcgatagtttgggatttaaaaattgaacaaacaaaatcgtttattaacttgatttgggaaatcaaacaggtgtaattcatacatcagcgcagtctcctggcctcgcgttcagtttccagcagcgacaggatgtcgcccacgcgaacaggtcctttgacattccgaataatctggcggctttggtcgccgaggaactccacccgcacctgggtgcactgcccttgggatccagtgcgtccaaggatctcgaccacgcgagcgtactgaggcttgtccatgctgaatacgaaattcgagaattgttcgacaataaaagatttgaatttgaagctgtgagtgctgctgcctttccagtcgatgaaaatagaaaacctatctacccttctatcatccctggcgccacctgtaggccttgtagcgcaacataagtgcggacgcgaaccacaaggtgaccccaagtcgagctgccacctttcgcagtgttggcaatccagttggcatccccgaggcgagctatcgaaccagttcgatttcgaaccacgcaactctagcatgtaatcgttcgtctcgccgtctaacatttgtgtcgaactacattttgttttgccattcaataaatctattatttaccactgaataagcggcgccacggagccctaaaagagtgtgcgcgttccggagactcggcgcacagcggcccgcagcgatacgtccatgaaaatcgaacggcaacagcagcagcacccacaaccagcggaggcaacagcaacaaaatacacaaaataaagaagcagcagacggaaaagtgcacaaatggtgcagaactgagtggaaaggccaccgagcacagatttctcacagtgcaggagcccggagacgccgaaatgctctagagggcggcgcttcagcacgattttctccccgcggagagcccaaagttgccagcggacgaggatgactgctcctggcgaagcattaagttaagagacatacagccattgtttacagcaggcagctcagacaccgggataggataggataggatatgccctcgggccagcccacttgagttgaggagagcagaggagaggatcgggatccgtgcgcgaggagaggatctgcagccttgtttagcatttagtccggtcatcgtgccagcgccttgttaaccacactctcttgtttacgtttgcttgtttgttgaactccacaaatcgtccttccattaattgttagtcacgcgtccctctcgttgagcacactaatcaaaatgaaagc

SEQ ID NO: 38987 - DNA, 195 bp, DROSOPHILA
atggacaagcctcagtacgctcgcgtggtcgagatccttggacgcactggatcccaagggcagtgcacccaggtgcgggtggagttcctcggcgaccaaagccgccagattattcggaatgtcaaaggacctgttcgcgtgggcgacatcctgtcgctgctggaaactgaacgcgaggccaggagactgcgctga

SEQ ID NO: 38988 - protein, 64 aa, DROSOPHILA
MDKPQYARVVEILGRTGSQGQCTQVRVEFLGDQSRQIIRNVKGPVRVGDILSLLETEREARRLR

SEQ ID NO: 38989 - DNA, 2723 bp, DROSOPHILA
agaggccagcgtccggctgcctaagagagtgagtgttgaccctatcacacatacgaacctactaagatactaaccaatccgttgcccatccacagaaatccgtatccactcgaacagtgcaggagttcatagcgggcgccgtgatcggtgcgagcataagcacaatattctacccgctcaatgtgatcaaggtgtcgctgcagagtgagatgggccagaggtctgagggcagctggcaggcgtgcaagcgaatttacgtagagcgcgatcgccgcattggcaacttctatcgcggatgccccttcaacacaggccgctccttcatcagctggggcatcatgaatacggcgtacgaaaacctaaagaaactaatgcagcagcagccgccgttgccactggcctctgagtagaactagagttaacttagctgattgtacacaaacggttacttctgcctttagctagccaattatttcgttcgatttaagtctcgcctaagtcgcttgtgcacagatgctgaattctaggtgttaatgtacatacacgcatcccaagcggaggtcgcctgctcctcctactcatatctgtatatctgtatacctgtagatctattcaattcgcctcgcggatgccaagtacaatacaacgtgagcatttaaaggtacccaatcttcgagttacggtttagttagctacttttcgtgtacgtgtaaataatactagatgatgtgcgatataatacgagtgtgttgtttgtgttcgccaataactttgtgattgattgaagatactacaactgattaattaacgcggtagattcaatgttcttaaacgaaaataaaagtgtatttgtaattacgaacgaggcttaagcgtacatcttatgtaagtttcagcatttcatttcattatcattaagcacacacaacttaaacatctaatctaaggctagtggtagggtacgagtatcacaagtaagattaattgcggcacaacgggcctatcgcctcttgagggagctgcggtagcgctggtagaagtcctccatggccctgtactcgggctccagtatgtcggggatctccttgtccagcgaggcgaagtacaccatggccaccgagctgctgccccgcagctgttgctcgtaccgtcgcagctgctggaagaatccggagttcgggcgaacctgcggacgtatggcctgcacatgcttgtaggcctcgcgcaagctcatcccggcgtgcttcattagataggccaggcacaggctggccgagcggctgacgccggccacgcagtggatcaacgtgcagccgccggagagatgcacctcctcgatcagatcggccgcctcgtcaaaatgcttggccaagtccacctcggagcgatcctgggccatgatgcggagatagagcgggttcttctggctgggcagtggtgtgtccggcagctcgggcgccacgttgatgacgcagctcacgcccagtttgtccatgtaggcgggcaccaccgccgcggcaccgcaaaggatcagcgatggagtgatgcgggacagaccgggaaacggcgtgtgatcctctagcgtggatgcactcagctgactgcaaggaatcaaagagggaatactggtgagttctcattctttttccgaacaaaagaaagcttatgcaatgcgttaaatttacatagctacaaagttctggggggctctgccaaatggcataaatgcgcaaatatttggctggacaacctggtgcacttcaaagtgggtgaaaaacccgataaaataagaacatttcgcgggcgaacaaaggagcacaactggtgctaagccaaaaacaaatgggccataaacaaatggcaggtattcgtgtgtgtttttgtgaatggaaaaacaacccatcccagcccatccaatccaatcccattcgatcccatcccatcccatcgcctacgtatttatgggtcgacgtcatggttctatgagttcgttgcgtaggcacaaacaataaacatattgccaaaatacctacatatagtatatacacatatatgtatatactatatccaaatttgtatctgtacacctcagaaatgcttgtttataattagtttcgcggagtgtataataaatggaggcgatgtgaaaatagcgcagttctaaaatggtatttggcgaatgcgtaaacaaacagatcagtcatcgcataatgggatattaaccactgcacctccgatcttttggatccaaatccgtttggctgggaaaatccaagaggtcagttaccttcgatatatataatgtagtaagggatcagcgaaggcagcattgggattagtcatattttcatattatatcatttcctgacttccaaccttataatggaaacagaggtctgccatctggtttccctttgcccgctccatcttctcatcccttggcacccccagtcatccaatcaaatagagatcaaatagaaggtgccaatccctgccgcctttcctgctgtcatcgccctccaaaagctcctgccactgaggaatgtaaaattaagcactcggctgatttcaaaacgaataagtctacactcttcgctagaaaccaaagaaattcgcagagatttcaaaacactcaagttattgaagtttttttcagctgagtttcgagctgaaaatattatattgcatacttctgaacacctgggaggttacatttcttccaa

SEQ ID NO: 38990 - DNA, 639 bp, DROSOPHILA
atgccatttggcagagccccccagaactttgtagctattcagctgagtgcatccacgctagaggatcacacgccgtttcccggtctgtcccgcatcactccatcgctgatcctttgcggtgccgcggcggtggtgcccgcctacatggacaaactgggcgtgagctgcgtcatcaacgtggcgcccgagctgccggacacaccactgcccagccagaagaacccgctctatctccgcatcatggcccaggatcgctccgaggtggacttggccaagcattttgacgaggcggccgatctgatcgaggaggtgcatctctccggcggctgcacgttgatccactgcgtggccggcgtcagccgctcggccagcctgtgcctggcctatctaatgaagcacgccgggatgagcttgcgcgaggcctacaagcatgtgcaggccatacgtccgcaggttcgcccgaactccggattcttccagcagctgcgacggtacgagcaacagctgcggggcagcagctcggtggccatggtgtacttcgcctcgctggacaaggagatccccgacatactggagcccgagtacagggccatggaggacttctaccagcgctaccgcagctccctcaagaggcgatag

SEQ ID NO: 38991 - protein, 212 aa, DROSOPHILA
MPFGRAPQNFVAIQLSASTLEDHTPFPGLSRITPSLILCGAAAVVPAYMDKLGVSCVINVAPELPDTPLPSQKNPLYLRIMAQDRSEVDLAKHFDEAADLIEEVHLSGGCTLIHCVAGVSRSASLCLAYLMKHAGMSLREAYKHVQAIRPQVRPNSGFFQQLRRYEQQLRGSSSVAMVYFASLDKEIPDILEPEYRAMEDFYQRYRSSLKRR

SEQ ID NO: 38992 - DNA, 2839 bp, DROSOPHILA
gccactccacttttgaaccattattttcaaagttgtgtccaaaaaacgcattattttttaaccaaaaacagggaaatcgagcttggaccaaaaagtcatatttacaatttataggatttataattatagaattttttgaatgcctatcaaatgggacttaaccagcactatcaacagctcattaataaaaacaacagatcagcaaaacaaactcagttctcaaactttttagcagagcgggcaaacggctcagatccatatgttggccactcgtatccattcggtctcggttatgtagagccgcagaaatgcgatatggggaacccctccccaccaaaaattgcaggcacattcaatgaattccacagtcagtcggaaaaatggtggggggggggggtatggaaaatgcatgggtgctaaacgtttaataattgtcgttgcccacatgtacactgcaaagaattgtacactcaaaaataatcctattttcgttatgtacgtttaaactgcgttctttcagtggatctctctatatataaagacattacagataattaaattgtgagatattaagcacagaaaggttgactgcatttctcattgtgtataagaacagagagctgatctccccactgcactcggagtatccagttactcgccgggcttcaaactatccgagttcccgcgttcttgccaatgtgaattttgtttaccagccatatccatatcttatttaaatatgaacatttctgccgccccacaaccgagcagtagacacattttaattaataagcactgccagacgagacggcttctgttctcgggctctgaattctgggttctggttctggttcctcgtctggttctggtcacaaagtagtcagtcttcagcgcagctcgatagcgaaagatgtttgccgggagcggcggtctcagtgccaccgatccatctaatccaaggtcgcgggaataggactgctctactgtgtcgtttggcgccatgtgctgctggtgtgcacgtgtctactggacggttctgcacaatctcctggctcgcatgatggacagcctgatggaagtcagatcgcccaccttctgtagctgctgcttcggttatcagcggcaggccagtcaggaaggtgacgtcgcagaacgggtttccagcaccgacgacgatccacaacagcagccccgtgaggattacgtcattgtgggtgagtacgcatcgatctctcggtttcaaaacaaagccaaatccccagagtgacggcatataaaccaaaacagaaagcacgatacagttcgtagagctaaatttaactcgaatttaagtttaaatgatcgaaatttgataaataatagataactacagaggcataaattaatgtagagtaatactcaattagaagattaagcggtaaataggtccaattactaatacaacatttttaattccgcaaagacgatgccgatgtcaactacgcggagattgaggagaggcatgtggaaaaggagcagtactacttcacagtggatcgtcctacggcggagcgaatgctccatggacgagaggacgggtcctgcctggttcgacctttcaaggcagccgaccagtggatccgttacatagtgagcatctgggcggcggatcagtactatcacctgttcataaggcaagtggataggagacaacgctatgccattggtcagaagaagtctcaggagcgctgcttcggatccccctcggaaatcgtggagttctacacggagcatccacttctctgcaccaacaaggtccggagccagtgcgtccaactccgtcccatcagttacgcttagctaggggtcaaatctttattgcataagagagggcaagtatgtacaaatggggttagcttaagacgatgctcaggtggccaccaccgccttgaaggcgcactggttgttctgcatcagggcgggccagaggaaggcttttatcagatccgatcgccggtccgcctggggatgccgctcgtgtttctcgggcctcaggaaacctgcatgggatttacgtaggtgtaagattgttaaacgattaaagagtagcttaaaacccacccaggttgaagtccatgtccaggtagtacggcgccttctggttgatcatcctccaggccagtcggacacaggcactgacgtagtgcgtcaacggggggcaggactccaggcaggggtactcgtgcagagtagatagcacctggttgaacaccgaccgctcgatctcgcccaacgggaaactctcggcggtctcgaagaggtgctggcgaacggatctgtccagggacaaggtggtctcactgctgctgtccaaggggcaattcaggactcgccgaacttccaggacctttcgctcccgcattccgtggcacaggcggaaggagagctacacaagtaccaataagttaagaaaattatcaattagatgactatctaattagacttacttatgaatgaataaatagtttttcgaaaatcataaatatgtgacttattattatcaactaatcttgatggtaccatttccctgcaaaagtgtcgttcatctgagatcgaaagtgattcaaatcccaagcgcctacgtaattttctgacaccctgggggctccactttccctcacattttcactgcaccaacgcctaatcatcctctagtgcgaattcgatcttgcaaaattgatattttgcaatcgcagtttgtggtccgacaggatttaaagcatccagagcccacgggcttggctggaaataattgatggccaagcacttgaaaattgaaagtaatcttcgctggatgaat

SEQ ID NO: 38993 - DNA, 591 bp, DROSOPHILA
atgtgctgctggtgtgcacgtgtctactggacggttctgcacaatctcctggctcgcatgatggacagcctgatggaagtcagatcgcccaccttctgtagctgctgcttcggttatcagcggcaggccagtcaggaaggtgacgtcgcagaacgggtttccagcaccgacgacgatccacaacagcagccccgtgaggattacgtcattgtggacgatgccgatgtcaactacgcggagattgaggagaggcatgtggaaaaggagcagtactacttcacagtggatcgtcctacggcggagcgaatgctccatggacgagaggacgggtcctgcctggttcgacctttcaaggcagccgaccagtggatccgttacatagtgagcatctgggcggcggatcagtactatcacctgttcataaggcaagtggataggagacaacgctatgccattggtcagaagaagtctcaggagcgctgcttcggatccccctcggaaatcgtggagttctacacggagcatccacttctctgcaccaacaaggtccggagccagtgcgtccaactccgtcccatcagttacgcttag

SEQ ID NO: 38994 - protein, 196 aa, DROSOPHILA
MCCWCARVYWTVLHNLLARMMDSLMEVRSPTFCSCCFGYQRQASQEGDVAERVSSTDDDPQQQPREDYVIVDDADVNYAEIEERHVEKEQYYFTVDRPTAERMLHGREDGSCLVRPFKAADQWIRYIVSIWAADQYYHLFIRQVDRRQRYAIGQKKSQERCFGSPSEIVEFYTEHPLLCTNKVRSQCVQLRPISYA

SEQ ID NO: 38995 - DNA, 3544 bp, DROSOPHILA
cctgcaatggctcctcaggggtgggctgtcgcttagaccaggctgcgtccagtttggtggccaacttctcgctatctacggtctggatcatatgcagatttggcacagaaaggatctaaataaacaatgagatcaataagataaagagaggtgctgataagagataaacgctgttatccgatcttggttatccaattgaccttgttgatcttgttgctttgcatgtggcctatgaagtgccacctgatgtcggggcacttggccagaatgtccgggtggcggctcttctcctccagctcctgtacatagttctcaccgaagtctctttgtccgccctcgtaagcctcgattacggcctccgctggctttgttttgcttacagcaacgagcagcggcctggcagcttgaacttcctgtgcgagagataaagtttttcatttaagaggtcattaataagtgggtcttaagttaacttactttgggccgctggaggagcacctcgtctatgcgcttcaacacgtgctgcaggccggctttgacgtcgaattccgccattgtgcgtcttagcatttaactaaaaaatgcgagatgaataatattctttatatataagtacagataaatagtagttattgttcttacaattggttaactcaatgataagaaacagcccttgcaaaaataaaaacaaaaccttcgagtcgatcagctgttcggcagtgtgacctgagtttactgaatataccaataaaatacttttagttttgaaaatacagatgaaggcggggagttttaaaagtaatttaacgcctaacaccaaagaggatattgtttttaaggcatatgaataaaatatttagttttagctttagctaagaaaaagtcgaaatccaattgcctttgctttggcagtaagtttcgccgcactttagctttcgaaaaccctgtgccggggagaaatgccttcactgggacgcacacagactcctcgacttcagccatggctgacgctattaggtgcgcctgcgagtcactgaactccgcgctgggctacctggtcacgatgaggatctccgaggtccgccactgcttcgagctcctcggagtggcgcacgtagaggtgctcgcaggtgtgattgttttcattctgatgcagttcaccaagttcacggccgtcctgatgttggccattctcctggcgtacggcattttctacctggtaagccaagtgttactactgctactgagccctcctaacgaaaccatccgcagtgggacaccttcttcccagaaatcagtcatctcggtcgcaggggaatgaagatgttccgaaacgtgcgcacctccgccaacttgcctccatttgcttcagacactgaggagacgcctggtaactaaaactagaactaaactacatcttacgaaatagcctcatatataacgtttatttctccaggagagtaccagatccgtccgaggagccagcactacaccactggcatgataactcccccgaacaccatcaacatgccgatgctcctgccgatggtacaaacgaataatctcaggacgacaagcctgcaaacggatcgtagaaggcaggaggaggagaacaggaggggatcccgtggaagaggacactcggcacatcaggaatcgcaggacacggataggaagcaccgaagagagagacccaactggcgatctgttcactccgatattgaaagggagcaaccgtctacatccaagaaggctcatcatggatccagtggcggaggtgagtccaggcggatgtccaatgtagtgaaaaccccgaccattaccagcggaatggtggacaccaggagactttccaacgtgaccagagaccaactcaagcgactgcccaacatcacgagcggagagtcgcggaggacagccaaggaagcaggtggcgccaacaatttcaagaagttgcaccacataaccagtggggagctcacggagtcccgaaggattccgagaataaccagtaataccactgaatccagatggctacccaggggggaaatgaaagaatcgcggaggatccaacagataaccagcaacaccaacgagtcccgaagattacccactgtaaccagtggtgaggtgaaggaatccaggaggagttcgcatccccacggagatggagagtaccgtcgcacttcaaacaatcagagagatggtggcggtggtggggagtccagatcccgtcggtctgccgagaaatccaatcctgcccaaagccgcaggcatgaggagcaatctaagcagcgaagaagcagcaatggacatcccggagtgaccaagcggcaatttccggatgatcatttcgagcggttgaagctggagaatcgggagttccaggcccggcgccttcaagcgagtggagctgcattccggcaaagtctaagtaatcccacctccgagggcgctctgctcaccaaacaggagaactttattgaaaaccatcggcagtacgacaggcgggacgtcccgagaaacagcaagccaagtgagtaaacagggagttttttatcatttgcttaaatataaacaaataaccttttgttaacatagataatccaaacaaagatgccagtcatcggaaccgaactcataatcgcaaggttaatccgatactttaaaatggatggacacagcgtgcgaaagaagccctcatttgcaagctgtgaagaaaggtaaaattttgtccttctatagaattttccatttaaataatccaccttagcccctctacaaccagcgtagattcatgaaagaccattcaatttgaggaatatcccaagacagtggagattgatgacgtcactaaggaaagaccaagcaggaggccagcagagctaccgatcgaaagcgattcgaaagttcccatacgtaggaatacacctgttgaaaacccacaaatcgaaagcgtggaatccagccgtgagcatgtgaataatccagaggagtatccctatgttgtggagatacccgagcaggaagaaaaaaaaccgcagaagggtagccaatctgcgaaatccaaaatcaaataaagcgaagaaatggagaaaagaactgctctctttttctatgttatccaaattattaatttttgtaagatattaaaattcaaaataaaaacgtaacgttttatgggcagcacttgccaccacagcgcatacagcctaccatcatcagctgttttggtatttttctaccgatttgaaggaggttggcagcacctttcgaatgtttttgttttgcatcggaaattgaagtaatttgcattccataacttcgccagaaataactccctttcaaggctaatgccattccaaatagccttagcaagatgaccatctttaacctgtacatattcgacaagttcggaacactgctccactacgcagaatggaatcgcaccaagaaatcgggcatcacacgcgaggaagtaagatcataattcagaaaagtaacttgtttcaccaaatatgtttgtttttaggaagccaaactc

SEQ ID NO: 38996 - DNA, 1425 bp, DROSOPHILA
atggctgacgctattaggtgcgcctgcgagtcactgaactccgcgctgggctacctggtcacgatgaggatctccgaggtccgccactgcttcgagctcctcggagtggcgcacgtagaggtgctcgcaggtgtgattgttttcattctgatgcagttcaccaagttcacggccgtcctgatgttggccattctcctggcgtacggcattttctacctgtgggacaccttcttcccagaaatcagtcatctcggtcgcaggggaatgaagatgttccgaaacgtgcgcacctccgccaacttgcctccatttgcttcagacactgaggagacgcctggagagtaccagatccgtccgaggagccagcactacaccactggcatgataactcccccgaacaccatcaacatgccgatgctcctgccgatggtacaaacgaataatctcaggacgacaagcctgcaaacggatcgtagaaggcaggaggaggagaacaggaggggatcccgtggaagaggacactcggcacatcaggaatcgcaggacacggataggaagcaccgaagagagagacccaactggcgatctgttcactccgatattgaaagggagcaaccgtctacatccaagaaggctcatcatggatccagtggcggaggtgagtccaggcggatgtccaatgtagtgaaaaccccgaccattaccagcggaatggtggacaccaggagactttccaacgtgaccagagaccaactcaagcgactgcccaacatcacgagcggagagtcgcggaggacagccaaggaagcaggtggcgccaacaatttcaagaagttgcaccacataaccagtggggagctcacggagtcccgaaggattccgagaataaccagtaataccactgaatccagatggctacccaggggggaaatgaaagaatcgcggaggatccaacagataaccagcaacaccaacgagtcccgaagattacccactgtaaccagtggtgaggtgaaggaatccaggaggagttcgcatccccacggagatggagagtaccgtcgcacttcaaacaatcagagagatggtggcggtggtggggagtccagatcccgtcggtctgccgagaaatccaatcctgcccaaagccgcaggcatgaggagcaatctaagcagcgaagaagcagcaatggacatcccggagtgaccaagcggcaatttccggatgatcatttcgagcggttgaagctggagaatcgggagttccaggcccggcgccttcaagcgagtggagctgcattccggcaaagtctaagtaatcccacctccgagggcgctctgctcaccaaacaggagaactttattgaaaaccatcggcagtacgacaggcgggacgtcccgagaaacagcaagccaagtgagtaa

SEQ ID NO: 38997 - protein, 474 aa, DROSOPHILA
MADAIRCACESLNSALGYLVTMRISEVRHCFELLGVAHVEVLAGVIVFILMQFTKFTAVLMLAILLAYGIFYLWDTFFPEISHLGRRGMKMFRNVRTSANLPPFASDTEETPGEYQIRPRSQHYTTGMITPPNTINMPMLLPMVQTNNLRTTSLQTDRRRQEEENRRGSRGRGHSAHQESQDTDRKHRRERPNWRSVHSDIEREQPSTSKKAHHGSSGGGESRRMSNVVKTPTITSGMVDTRRLSNVTRDQLKRLPNITSGESRRTAKEAGGANNFKKLHHITSGELTESRRIPRITSNTTESRWLPRGEMKESRRIQQITSNTNESRRLPTVTSGEVKESRRSSHPHGDGEYRRTSNNQRDGGGGGESRSRRSAEKSNPAQSRRHEEQSKQRRSSNGHPGVTKRQFPDDHFERLKLENREFQARRLQASGAAFRQSLSNPTSEGALLTKQENFIENHRQYDRRDVPRNSKPSE

SEQ ID NO: 38998 - DNA, 5921 bp, DROSOPHILA
agatgtttgccgggagcggcggtctcagtgccaccgatccatctaatccaaggtcgcgggaataggactgctctactgtgtcgtttggcgccatgtgctgctggtgtgcacgtgtctactggacggttctgcacaatctcctggctcgcatgatggacagcctgatggaagtcagatcgcccaccttctgtagctgctgcttcggttatcagcggcaggccagtcaggaaggtgacgtcgcagaacgggtttccagcaccgacgacgatccacaacagcagccccgtgaggattacgtcattgtgggtgagtacgcatcgatctctcggtttcaaaacaaagccaaatccccagagtgacggcatataaaccaaaacagaaagcacgatacagttcgtagagctaaatttaactcgaatttaagtttaaatgatcgaaatttgataaataatagataactacagaggcataaattaatgtagagtaatactcaattagaagattaagcggtaaataggtccaattactaatacaacatttttaattccgcaaagacgatgccgatgtcaactacgcggagattgaggagaggcatgtggaaaaggagcagtactacttcacagtggatcgtcctacggcggagcgaatgctccatggacgagaggacgggtcctgcctggttcgacctttcaaggcagccgaccagtggatccgttacatagtgagcatctgggcggcggatcagtactatcacctgttcataaggcaagtggataggagacaacgctatgccattggtcagaagaagtctcaggagcgctgcttcggatccccctcggaaatcgtggagttctacacggagcatccacttctctgcaccaacaaggtccggagccagtgcgtccaactccgtcccatcagttacgcttagctaggggtcaaatctttattgcataagagagggcaagtatgtacaaatggggttagcttaagacgatgctcaggtggccaccaccgccttgaaggcgcactggttgttctgcatcagggcgggccagaggaaggcttttatcagatccgatcgccggtccgcctggggatgccgctcgtgtttctcgggcctcaggaaacctgcatgggatttacgtaggtgtaagattgttaaacgattaaagagtagcttaaaacccacccaggttgaagtccatgtccaggtagtacggcgccttctggttgatcatcctccaggccagtcggacacaggcactgacgtagtgcgtcaacggggggcaggactccaggcaggggtactcgtgcagagtagatagcacctggttgaacaccgaccgctcgatctcgcccaacgggaaactctcggcggtctcgaagaggtgctggcgaacggatctgtccagggacaaggtggtctcactgctgctgtccaaggggcaattcaggactcgccgaacttccaggacctttcgctcccgcattccgtggcacaggcggaaggagagctacacaagtaccaataagttaagaaaattatcaattagatgactatctaattagacttacttatgaatgaataaatagtttttcgaaaatcataaatatgtgacttattattatcaactaatcttgatggtaccatttccctgcaaaagtgtcgttcatctgagatcgaaagtgattcaaatcccaagcgcctacgtaattttctgacaccctgggggctccactttccctcacattttcactgcaccaacgcctaatcatcctctagtgcgaattcgatcttgcaaaattgatattttgcaatcgcagtttgtggtccgacaggatttaaagcatccagagcccacgggcttggctggaaataattgatggccaagcacttgaaaattgaaagtaatcttcgctggatgaattggtctcacagtttgagagtcattgtgctgtgctaaatttccaaacgaaagcagtgcaagcagttcgtacgctgagctacttcaagatcaagtttatcagcttttgacctgccaaatgccaattggaagagttcgtcccaattttaaaacaatcgctattttttcacttttgacaagggctttattctatttgaatagccttaagaattgtatagaaaaatatctattagcattgtaaagttaaagtgttattgacatggaattggcacgctgaaagattatgaacgcccataataaattgaggctattcatcacaaataactccgtactgtcttgacaagtgaaaacgaaggagataattataaaagtaaaactatgttgctagcgatttatattccaaagacaagtgaatgattgactggcaataatttctcctcatgatttaatctcaaattctttctcagccacctaaagtttagcaacgaaattaaatacaacgtaatacaaataatggtagcgaacacacccaatagaaaacttacttatctcccaaaaaaaaaaaagtgaaaacaaggccgactcgcaattggcactaatttctcccgatcgaggtaatctcgaaatacgttcggcctctttaacaatccattattgagtgttcggacatatctactgtatctacaatctacaacccatcccaaaacacatacgaatgctaggtacttcagactcaccacgatcatggagaagagtatcttccccttgaggctgtgcgcgtgttttatctggggaagactgtccaacgcctccaaggcgtccgctcggttctcgacgtagagattccgatagagcgacaccatttcgctgtggagatagagaaatggaatcacaaatcagagtgtgggatgcgggcaggtgagagttggatgcggtcgcgatctgatttgactgagtttgtaatgtgggtgttgcaccttattggaactcggtcaagtgtaagaattaggttttgtatgtattctttatgtatgttttttacctgctgtcatcgcttccagagtcgtccgagtgatatccatcgctgcagctgctcgtgctagcgccgcctgggggagtggtctttccaatggagtgggaggagcccggaggacctccttcagggcccatcatgtggagcaccacctcgcagccgcgggagaagttcatcagcagaccggcggcagggcgtttctccacgagcgcctgtgcgtccagacgacgcacctgacccacgcaggtgagcacctccttgtcgttctccacccgcgtgctgaggttctcgaccagggtttggagctgcttgagagccggcttgtctagcattgtgagcagggtcttgttgtcgatcagtcgctgctgaatatccccataattgatggccaacaatcgttgatgggaggagtgagcagggtcttggttgacagtcaccatgctcagctcctccagcttgtgaatggccatcttgtaggtatccacatggcgttgcagctcggttttcagggctacatgtagggaaataagctgacccgaggcatcggtggtcagtccatggaccccaagaccttgtacagcgttatcaaaactgcgtcttctttccctcaaagtctgccggagccctggttcgtactgagccaaggcctgcaggagtcgagtgcatctctgccggagtcctgattcatggggattagcgaacagacgcaccaactgccaggccaccgtttcactaggcacatctggcttgggagtggtgttcagggtggtcaatctgtgggaaaattaaaaaaaaatagtaacgtttgatataaaacgaaatatttttagaagactcacaatattcaactttaataataactcacctggtaaagaaagactccagaaggtaggcactgtgaggcaggtgctccagcagcaggtccagcggaagctcagcgatcactgatctgagaaccgagggacccagtctgcccaccacgccagcagcctccctgtactgtctgccctccgagaggagcatcagccgacgaagaacctgacgcggactggtcaggaactcgcgaccatccctggagggtccacgaatccgttccctgctgtccgccatcgatgcggcgccaaaggacaggggaagcgacggagaatgaccgtggagctgcagaatagcgtcctgatgattcttcagcaggatctgcttgctggagtcgttggagatgcggattactctggttactcggttgtgggttaatggaatggctttgtacagatgcagatgcgaagtcagtgagatgcagatcagatgcagatgtagatgcggatgcggagtctaagatgcaagttcagtgggactgcttacagcatattgggtgtgggcgtgggttccatgacggtgcgtttgggctctctggtctccaactccgagggagggctctgaaaaggcgccagacacaatgccacaattaataacgaataggaaatctctttggcaagaattcgcgcacaaaacaattggcactttcaccggcgcaacaacaccagccaacataatttatcataagttatccatatgcgtgcataatacaatctacaatcgccagcgttgtcagttggttgtgggagtttccacctcaactatgacaactaggaaaatgttaggggccctaaacacacaaagcgactttccttgaggccgcgtctcgaatgccagccaatttcccaggtggccaggaaaatgccatttaacccccactcgcagtgaatataattgaatttttactttggagtgggctgggcactgttaggatgggttaataaataaacaaatcgcagaagatattttgagttagaacttcttgggcacctgcagcaccccctttttccaaagactgagtactttgatggggctgcagggaatcggacactggggcaaccaacccgaaccgaaaagagctgaccatgtttgtcttctcgagaatcgggctgaagagaacattaaatgtttgccaacaagccgaaaaatccggaaagcagccaaccacggcaataaggtaagtggctatcatatggatgcaccgagagaaatcagctacaccgcttgttataattgcttttgattactttaaaaacctttaggatatatacatagtacgccacatgcctttcaagtagctgacttcaattaataacattttgtgaagtgtctggtggcagtaccacttccagctaacagccgacttggagccggaggtgacagtgacccagctcggaaaggtcagacatcgtgcattaccgacttcttaaccggcttaacggacaggtagacgccttaattgaaggcccgtaagtaagtgcgctttggcaataccttccgttaccaggtggctaggaaggtgtgtctctcttggctgggaaagaatgttccactcgagggcgtggccctgtgggaaacagtttgtgccacagattttacagcggatttccgatctgcgtacgtgttgccaaaatagcatgcaggattatctgatcatcagtgttgatctgcacatgcagtgtgcgaaagacgagagataaacaaaagttaccgcatttcgcagagatcatgtagcgagaatccagacatgacggccacaaagaagggaccccgggattaccagacaattatgactacacgggcgacaaattgaaagatgccatcgtgcggagctgctgggaaagccatagaaacgtggccatgacacttgggatgcgcttcgctgggttagtgaagttgaaaaaaaaaaagaggtgggagaagggggtctgtagaatatgttatgtaagctggtgacaaatgagcgggctgagaacggaagccaaacttgtcgccacaactcgagaacaccactcttcccatataccatataccatacaccatcaccatctgtatctgtatctgtatctgtatctttggctgcggct

SEQ ID NO: 38999 - DNA, 1903 bp, DROSOPHILA
atggtcagctcttttcggttcgggttggttgccccagtgtccgattccctgcagccccatcaaaactccgcatccgcatctacatctgcatctgatctgcatctcactgacttcgcatctgcatctgtacaaagccattccattaacccacaaccgagtaaccagagtaatccgcatctccaacgactccagcaagcagatcctgctgaagaatcatcaggacgctattctgcagctccacggtcattctccgtcgcttcccctgtcctttggcgccgcatcgatggcggacagcagggaacggattcgtggaccctccagggatggtcgcgagttcctgaccagtccgcgtcaggttcttcgtcggctgatgctcctctcggagggcagacagtacagggaggctgctggcgtggtgggcagactgggtccctcggttctcagatcagtgatcgctgagcttccgctggacctgctgctggagcacctgcctcacagtgcctaccttctggagtctttctttaccagattgaccaccctgaacaccactcccaagccagatgtgcctagtgaaacggtggcctggcagttggtgcgtctgttcgctaatccccatgaatcaggactccggcagagatgcactcgactcctgcaggccttggctcagtacgaaccagggctccggcagactttgagggaaagaagacgcagttttgataacgctgtacaaggtcttggggtccatggactgaccaccgatgcctcgggtcagcttatttccctacatgtagccctgaaaaccgagctgcaacgccatgtggatacctacaagatggccattcacaagctggaggagctgagcatggtgactgtcaaccaagaccctgctcactcctcccatcaacgattgttggccatcaattatggggatattcagcagcgactgatcgacaacaagaccctgctcacaatgctagacaagccggctctcaagcagctccaaaccctggtcgagaacctcagcacgcgggtggagaacgacaaggaggtgctcacctgcgtgggtcaggtgcgtcgtctggacgcacaggcgctcgtggagaaacgccctgccgccggtctgctgatgaacttctcccgcggctgcgaggtggtgctccacatgatgggccctgaaggaggtcctccgggctcctcccactccattggaaagaccactcccccaggcggcgctagcacgagcagctgcagcgatggatatcactcggacgactctggaagcgatgacagcagcgaaatggtgtcgctctatcggaatctctacgtcgagaaccgagcggacgccttggaggcgttggacagtcttccccagataaaacacgcgcacagcctcaaggggaagatactcttctccatgatcgtggtgagtctgaagtacctagcattcctctccttccgcctgtgccacggaatgcgggagcgaaaggtcctggaagttcggcgagtcctgaattgccccttggacagcagcagtgagaccaccttgtccctggacagatccgttcgccagcacctcttcgagaccgccgagagtttcccgttgggcgagatcgagcggtcggtgttcaaccaggtgctatctactctgcacgagtacccctgcctggagtcctgccccccgttgacgcactacgtcagtgcctgtgtccgactggcctggaggatgatcaaccagaaggcgccgtactacctggacatggacttcaacctgggtttcctgaggcccgagaaacacgagcggcatccccaggcggaccggcgatcggatctgataaaagccttcctctggcccgccctgatgcagaacaaccagtgcgccttcaaggcggtggtggccacctga

SEQ ID NO: 39000 - protein, 539 aa, DROSOPHILA
MADSRERIRGPSRDGREFLTSPRQVLRRLMLLSEGRQYREAAGVVGRLGPSVLRSVIAELPLDLLLEHLPHSAYLLESFFTRLTTLNTTPKPDVPSETVAWQLVRLFANPHESGLRQRCTRLLQALAQYEPGLRQTLRERRRSFDNAVQGLGVHGLTTDASGQLISLHVALKTELQRHVDTYKMAIHKLEELSMVTVNQDPAHSSHQRLLAINYGDIQQRLIDNKTLLTMLDKPALKQLQTLVENLSTRVENDKEVLTCVGQVRRLDAQALVEKRPAAGLLMNFSRGCEVVLHMMGPEGGPPGSSHSIGKTTPPGGASTSSCSDGYHSDDSGSDDSSEMVSLYRNLYVENRADALEALDSLPQIKHAHSLKGKILFSMIVVSLKYLAFLSFRLCHGMRERKVLEVRRVLNCPLDSSSETTLSLDRSVRQHLFETAESFPLGEIERSVFNQVLSTLHEYPCLESCPPLTHYVSACVRLAWRMINQKAPYYLDMDFNLGFLRPEKHERHPQADRRSDLIKAFLWPALMQNNQCAFKAVVAT

SEQ ID NO: 39001 - DNA, 3286 bp, DROSOPHILA
aatgtggacattagaatggcaacgatcgatgtgttccaagtcaggcgcaaagtttgcttaaaccaagtttgatgagcaaacatcggagcagaaggagaatgggttgggaaaaaggcttctgggcactggacactgagtgcggagtcaatattgacgaatcaatcagcgacacagccactgaacacacattgcgtatggctaataaaatcattaagcgcaacccataaacctggctcaaaagcacctgatgccgaaaataacatacgcatatgtaaatttatcccgatatccaaccgattcgagcatgggaaagcaaacgaacctattgccaaatgatttggcatctgcaaataaacgaaagtaaaataagacgggtcgaaatggaaatacacataaaaaaaaaaatacagaaaatactcctgatataagtaatacacttaagctgttttaaatacaaccttaggtcaccttcaccataataaaagcattattcattcccatagaagttttctcatatgagaattttagttattttcctcagattacctgtatgcatctaatgtaccattcattaccatgaatcaaacatagttagcccccacataacccacttttaagtcatccaaagtatgattttaacgcctacacaatcgaatttcgtattaagaaataagcgatattattttctctttgtgtgagtgggaatgcataattagggcgacctgtgatttgtaagctagattgtttactctcggccatgcccactggttgggcatttcatcccacttccatctccagctccctcgacatttccagttccattcaagcccacgaaaatgccacgaagttcgacctgcacctctgtttgctatgtttttatgctgaccaataattaggctcacagtttactttacccgccctttccgaggcggttaatttatttttacgactgccgcgtccatttgtcgcaccgttttagtgggccgatgatgcaatatgctcacataaacttctcccggttgaggaaatggttggcgggcagggcgttttcctccagctccacttgttcctcgatgcactcgacgatcggacgaccagtctccaccgccttggtcagtccctggcgaacggccacggatccaatggtcttcagatccttggcccagtcgagggcggcgaacacgcggatcatggaagacccaatgccagaggcatagttgccgtactccccactctggtagtccctgggcagcagatagtggtactgcggccagtaactctttgtgatcaggaagatactgttggaatcggtgggcttaaagcccttgtgaatgctccaaataaagtgggatgagtgaaccaggtttcctaggttgataacgatcagactgcgcagccagaaacccacgaacatggaggtggctagggagtccccaaagtactggaacggagtgttcaccgatagcagtacgtttaggaagatgtacagcaggacatagaatctgaaaaatatataggatatccagttagatagattaagagatcagacttgatgaaatcccacctcttctgaaacatgaccacaggatcactttccaggtccgacatatccacatccttgagcagttcctcctgctgtggcgagtacttcagaagaccgccgcgcacctgggcgtacatgaagctgtgtttactgtagtagggatcctcgtcctgctggaacttggcatgatggaggcgatgggcctgaaccacactgtagatggagccctgaaccggaaaaaatatacctaagctatgaactcatccgaccaggttcgtgtctccggtgaaaccaacaaagcaagagctttcaccagaggcgtagcgagtaaaagctcttgggggattcgctcacctgaccggcggtcgtctggcagaacatgaggaaaaccttcaggggcttggaggcggtgaaggtcctgtgcgcccacaaacgatgaacgcccactgtcacgcccaaagtgccaaggagggtgagcagggcggctgagttggagatattgagacagatatttggggttaagaagccagccacttgttatgcggcacgtggagctgattagcccaaccgaactcactgaataaaatcgtggcccacgacgcgctagtgagcagaacgtaaatcccatagacaccgaggatatttaagtggatatagaagagaaccagtggccagatggcatcacgtttcttgtggatggagtccccactctgatccggctccttcactttagttgtctccattgtggcttcccaagtcctttgggttcctattttgtatcccaattggttccgcctttcgtggctgccctgactgtactgaaagcccgccataattacaaaatccaatggagcgagggttctggattattcatagacccattgcctatgcattagcctcaggtggtgttcaagggtgttcagagtcgagtggtgttataatacaaaacatagtttattgaaccgcaggtaagtaacgaaagcaacgatgggagattagcttgcctaaacggcgatcccagagatcctggtggtccgggatggcatgggatggtggatgggcgttgggtgatgggtcatagcctagtttagaggatctgagtcacatatgaagactcaggtcccgataaaaaacagagcataaggcatggcttggtgctacaacttaatactaggaaaaccacaggctgaaaacataatacacggcctagcttagttctgcatcttggccagctccacgatatcctctcggggaatgtccttgtccccgaagccccacaccggatccttgtgggcatggtcgtcgtccaggaagcgagttccatcgccgcatttcttggctctcctcaagaccatgtcaggggataccgatttacctgtaagtatgtaagtatgtaaataagtatggattcattgtgtcttgtaagtagataaaactcacgtcctttggccaggcctagccaggcgcaaaagtcgatgaagccggtggtgatgttgaggctgtagttgccaaactcgcccgtcttgtagtcccaggggaaaacgtggtggtaattgtgccatccctctcccatggccagcagggagacaatgggagcctcagtggacatgaggttcctagagtaggattagggattagtttcgctaacttgggtacactgatcccacttacttgtcgtacggcttgttgccgtacatgtgcgccacgctgttcacgaagaaggccacgttgagggtccaggtg

SEQ ID NO: 39002 - DNA, 1005 bp, DROSOPHILA
atggagacaactaaagtgaaggagccggatcagagtggggactccatccacaagaaacgtgatgccatctggccactggttctcttctatatccacttaaatatcctcggtgtctatgggatttacgttctgctcactagcgcgtcgtgggccacgattttattcaccgccctgctcaccctccttggcactttgggcgtgacagtgggcgttcatcgtttgtgggcgcacaggaccttcaccgcctccaagcccctgaaggttttcctcatgttctgccagacgaccgccggtcagggctccatctacagtgtggttcaggcccatcgcctccatcatgccaagttccagcaggacgaggatccctactacagtaaacacagcttcatgtacgcccaggtgcgcggcggtcttctgaagtactcgccacagcaggaggaactgctcaaggatgtggatatgtcggacctggaaagtgatcctgtggtcatgtttcagaagagattctatgtcctgctgtacatcttcctaaacgtactgctatcggtgaacactccgttccagtactttggggactccctagccacctccatgttcgtgggtttctggctgcgcagtctgatcgttatcaacctaggaaacctggttcactcatcccactttatttggagcattcacaagggctttaagcccaccgattccaacagtatcttcctgatcacaaagagttactggccgcagtaccactatctgctgcccagggactaccagagtggggagtacggcaactatgcctctggcattgggtcttccatgatccgcgtgttcgccgccctcgactgggccaaggatctgaagaccattggatccgtggccgttcgccagggactgaccaaggcggtggagactggtcgtccgatcgtcgagtgcatcgaggaacaagtggagctggaggaaaacgccctgcccgccaaccatttcctcaaccgggagaagtttatgtga

SEQ ID NO: 39003 - protein, 334 aa, DROSOPHILA
METTKVKEPDQSGDSIHKKRDAIWPLVLFYIHLNILGVYGIYVLLTSASWATILFTALLTLLGTLGVTVGVHRLWAHRTFTASKPLKVFLMFCQTTAGQGSIYSVVQAHRLHHAKFQQDEDPYYSKHSFMYAQVRGGLLKYSPQQEELLKDVDMSDLESDPVVMFQKRFYVLLYIFLNVLLSVNTPFQYFGDSLATSMFVGFWLRSLIVINLGNLVHSSHFIWSIHKGFKPTDSNSIFLITKSYWPQYHYLLPRDYQSGEYGNYASGIGSSMIRVFAALDWAKDLKTIGSVAVRQGLTKAVETGRPIVECIEEQVELEENALPANHFLNREKFM

SEQ ID NO: 39004 - DNA, 5123 bp, DROSOPHILA
tcgctttcgatctggttggttgtgttttttggcttctctctgcgtgcgccgctcgtggtgggaaaaaacggaaaacaggagaactagcaaaaccgaataaatcgaagaggaacactccagtttacaattgtcctgcgactaaaaaccaatcggaaatttacactatcctctaatcctttttgtttgccggcaaaaaaataagaggcgcaaagaaataaacgcagaaagcgaagcaaaatgtgaaaaattgccgaacatggcgccgcgtgtgtgaatgagagcgaacgatcgtgtgagagggagatagggacgaagcgaagataaacaataaaaaaaaaacaatttttgatacttaaagttctacaacaacaataaactcagctcaggtacaacaacaaaacagaaaattacgcaaaacacaacagactgcattgacgggaatttttcgaagtatttttgatacacacagcaaggaggtgtacaatttttaaagcaataagtgaaagcaattacccatcaagttaaaaataataccaatctcggtagaaacccactcggaaaatccaactgaaaacaattgaaaaaggcaaccgaaaagttaaaacctaaacagactaaatcgctaaaataacaagcatttactatacacaaaaaaattaaattccgtataaaatcagacttttgtctgcaaaatttctaaaaatttacaaaaacccactaaaattcacgaaaactcactggatctgccaaaaccatcagttgaaatatattctggaatcggttcaaaaataaataaatatatgccagcagcatttatatagaccgcaaatcgcaccataaaatcgcgaaaaaatcaacaagcaatattttgaaattcataatcgttggcaaaatgctgattcgaaatagagattgaggattctcgaggacagccaacccagccaaccaaccaagtttttcgccgcaacgagtgcatattaagaggaaaaaacacaaatttatggctccgcgtcgcaacagcaacatcagcagcagcggcaacagcacccagcagcagcaccagcaacagttgcagcagcagcaccagacgcagcagcatcaactgctgcagttctacgcggagaacgtgaattcttcaggcgtcctaatggcgcccatgcagggaaccggtggcgttggcggcgttggcggcgggggcatggtccactgctgcctgcccagcggagactgtcgcaaactggacaccctgatacacctgaacgagctctccctggcggactgcatccgtgtgctgtgcaacaacgagaactgcagcgcaggccagtacatgcatcgcgagtgcttcgagtggtgggaggcgagcgtgctgcaggcactgaaggccaacggtcgtgctcgatcctggtcggagcggcagcgtctgcagcacctgtggaccaagaagggctacgagctggtccagaaggcctgcagctgcaagtgcggcaggggacaattgcgcaaggacctcgactgggtgccgccgagcagccagggcgtcatatacctcaacgggtctggcaaccggcccactctggccaatggcagcctcagcgaggacgacgacaagaagaaggccaagaagaagaggaaccgcaacaacaacaacaacaacggcggcggcggtggtggtggtgctggtgtcaatggcaacaccaaaacccccttgagcaacaacaacggcaacagctacgccggactcacgcccaatcccaatgtgggcgtcatagggtcgggtttgccccacaacaacggcaacaccgccagcaatggcagcagtggcaacaacggctcctccggcgttctgcagaccagtgcgctggccactttcagcaacatcctcaatacgaacaatgtcctcggcctggacctgcgcgccagggctggcagcctatcctccagtggagctggcagtggatccacctcgccctcggactcccagtccagtggcgagatatccgtgtcgccggtgcagcaattgctgccacagcagcagcagcaacagcagcagtcgctgctgatccagcctctgggtccagctttcggcagcaaccttttgcaaaatggattgggcttgtccaagaatctgctgattgctccccagcagcagcagcagcagcagctgcaacaacaacagcagcagcagaataacctgcctgctttggccaatatcagcaacttcaagccattggccagctacgagcagcagcaacttgtgcagcagcagaagaacaaggaggtcgaactctattccgatcgagtgcgtgcaataactgcttcaagatgctaatgcatccgcagcagcgtctgagcttctacagtgactactcgcacggagtgacctgtccgtattgcaacacgcaggacacgcacttcgttaagccgctgaccttctgctacgccaagaccacggcgacgcggctgccgacgctcgcataacatgaggccccgttggagtcgcccgtgggaacaggtgccaccaccactcaggtgccaaatgcccagggctctccaacggcctccggctgcagcagcaacaccatcgccagcaagcagccaccgaagcagccgctctacaatgccgccatcgattactcggcaccgctgcagcagcaaattaatccggacttgattggagcccatccgcatgcccagcagcatcagcagcaggtgcggcagcagcaacagcagcagcagcagcagcaaccacagcagcaacaacaacagcagcagcaacagacacaacaacaacagtcacaacaacaacagcagcagcagcagcagcaacatcagcctgtggtcagcacttttcagaggggcaacttccctcaacagtcccataaaaccatgaacatgatggccatggcggatgtgatgagcaagtaccagcagcagcagcaccaacagcagcagcaacagcgccagcagcaacacaacctgcagccacagcagcaacatgcaacgcagaaaggactcgagggccttctattgaccaacacaaacacaagcaacaacaatagcagcagcagcagcagcagcagtattagtaacttaatcattagccataattcagccagcaatacaggcaacaaaatgcagcccacttggggccagagtgatgccatctcggcattgtggggctgctccagcagcagcagcggctgctcctcgggcagtggatcgcagccctcgttgagtccgacggccagcagcaatggcaacgatggctccaagatgatgttgtgggcggcccaaagttcgccacaaaatgctgcaacactcagggatggattcaaggagttgcagcgccagcagccaccgcagcagcaggtgccacagcaacagccacatgcagcctcgcccacagcttcgctgaccagttccagttcctcctcgaacggatggagcgcctcgcattatggcaagcccaacatctgggagctgccaggatccaccgggcaaaggacaccggccagcagccacgacatcttcaccgatctcctgtgcaacctgagcatcagtcaggacaacagcagccagcaggccagcagcaaggctgatgcctccgacgtcagctcgaattcctcctcgtcggccggggaactcctggaggcggccaatatctggaggtttccagagtacgccagtagtcagctctacatggaggagccaactggcggcgcagctgcctgcatgcagctcttcaacgactatctcaacatgaactaaaacgaagaattgggagccacaacagcctgccgcatttgttactctagctaaattgaaaaacaaaaattgaggaaaaaggagtaagcaggcggaggagaggccgtatacgagccaactctcctgaagcgagtgttttagttttttaaaatcatttgattttttttatatacacacacacaacacacatctaaaaccgagagaaaacaaagcaaactaaaaacgaatttcttgttatttttgttgagttttttagttctttgtttacacacacctacctaaacgaaaaaaaaagcaatttttagttttattttataaagcaaattttttatacattttaccaaaaaaaaaaaaacaaaccgaaacgtaaaacaaaaaaaaaaaaggaaaaaacgagtagagatatgaagggtcaaaaaaagaaacatttacatcacgattgagggaaaagttttatttagcaaaaattgaaggcagggcattaaattgtttaaacaaatcatgataattgctgtgctgctcaataacacaaaaaatcattaaaataaaaggagaaggagtagagtaggagagtaaaacaggaagagagatggggagatcatgaagaaacatttgctacaatttatgaaacgtaaaattacaaaacctaaatttaaaaacaacataatcgataagttgcacatctttacctaagcgattggtaattattcctagttttagtaagcgaaaggagaacctctggaaccgatttagtttctcgctccagttcataaaaaaaagttcagttagtcctcagagtaattcaatacaccctgcaaagcacccacccacccatagcagccaggcggcacatgcaacaaggtcaccaacaccaacaccaccccctttcaggagtatttcaagcaggcgacccacacccacgcccccaaactcttagttaagtcctcgaaaaaacaaaaatgaaaagaaaacaaaatataatacaaatacttttggcgcagcgtgatcattaattattaagtctaagtgttaggttatagcgatcttcttgtatatgtctagggttcttctctttgtctaaatagcagagcagccgtatgtgatggatctctaaaggtagagtgaggaccccgcaggtgcgagcaaaccacatgcaggcactcactatcgatttagtttagtaagttgttgtaaggtcgatttttctaaattttaaatatggtatgcaagcaaacatccaacaatttatagagcggttcaatgtttcctgttttgtgtttattccgtgcttagaaaagtcaccaaaatcctggggtataagtccttcccaatctctcagtccccccccaaacccccaa

SEQ ID NO: 39005 - DNA, 3598 bp, DROSOPHILA
atggctccgcgtcgcaacagcaacatcagcagcagcggcaacagcacccagcagcagcaccagcaacagttgcagcagcagcaccagacgcagcagcatcaactgctgcagttctacgcggagaacgtgaattcttcaggcgtcctaatggcgcccatgcagggaaccggtggcgttggcggcgttggcggcgggggcatggtccactgctgcctgcccagcggagactgtcgcaaactggacaccctgatacacctgaacgagctctccctggcggactgcatccgtgtgctgtgcaacaacgagaactgcagcgcaggccagtacatgcatcgcgagtgcttcgagtggtgggaggcgagcgtgctgcaggcactgaaggccaacggtcgtgctcgatcctggtcggagcggcagcgtctgcagcacctgtggaccaagaagggctacgagctggtccagaaggcctgcagctgcaagtgcggcaggggacaattgcgcaaggacctcgactgggtgccgccgagcagccagggcgtcatatacctcaacgggtctggcaaccggcccactctggccaatggcagcctcagcgaggacgacgacaagaagaaggccaagaagaagaggaaccgcaacaacaacaacaacaacggcggcggcggtggtggtggtgctggtgtcaatggcaacaccaaaacccccttgagcaacaacaacggcaacagctacgccggactcacgcccaatcccaatgtgggcgtcatagggtcgggtttgccccacaacaacggcaacaccgccagcaatggcagcagtggcaacaacggctcctccggcgttctgcagaccagtgcgctggccactttcagcaacatcctcaatacgaacaatgtcctcggcctggacctgcgcgccagggctggcagcctatcctccagtggagctggcagtggatccacctcgccctcggactcccagtccagtggcgagatatccgtgtcgccggtgcagcaattgctgccacagcagcagcagcaacagcagcagtcgctgctgatccagcctctgggtccagctttcggcagcaaccttttgcaaaatggattgggcttgtccaagaatctgctgattgctccccagcagcagcagcagcagcagctgcaacaacaacagcagcagcagaataacctgcctgctttggccaatatcagcaacttcaagccattggccagctacgagcagcagcaacttgtgcagcagcagaagaacaaggaggtcgaactctattccgatcgagtgcgctccacatctggctgcaatgggatcttttcgcgtcgcctggacttttcgtcgttcaatttgctgccaaagactcgtttgaattcttatcaagtcaagattgaggacgagggcaaccacggcaacgatgagacgcgcctgttcatcctctcatcgctggcccaatcccagatgagccgggtggcctgcattctgtgcgaggagccgctgctcgtattcgatcgctatccactggttgatggctccttctttctgagtcccaagcagcattccagcggctgcatcgaggttaaatacgagggacgcactctctacttgacctgtgtttgcatgagctgcctggacggaacctccagcagccgggccatcaactgcagattctgcaaggagccgtgggatggctccagcctggttttgggcaccatgtacgcctacgacatctttgcggccatgccctgttgcgccgagcggttcaagtgcaataactgcttcaagatgctaatgcatccgcagcagcgtctgagcttctacagtgactactcgcacggagtgacctgtccgtattgcaacacgcaggacacgcacttcgttaagccgctgaccttctgctacgccaagaccacggcgacgcggctgccgacgctcgcataacatgaggccccgttggagtcgcccgtgggaacaggtgccaccaccactcaggtgccaaatgcccagggctctccaacggcctccggctgcagcagcaacaccatcgccagcaagcagccaccgaagcagccgctctacaatgccgccatcgattactcggcaccgctgcagcagcaaattaatccggacttgattggagcccatccgcatgcccagcagcatcagcagcaggtgcggcagcagcaacagcagcagcagcagcagcaaccacagcagcaacaacaacagcagcagcaacagacacaacaacaacagtcacaacaacaacagcagcagcagcagcagcaacatcagcctgtggtcagcacttttcagaggggcaacttccctcaacagtcccataaaaccatgaacatgatggccatggcggatgtgatgagcaagtaccagcagcagcagcaccaacagcagcagcaacagcgccagcagcaacacaacctgcagccacagcagcaacatgcaacgcagaaaggactcgagggccttctattgaccaacacaaacacaagcaacaacaatagcagcagcagcagcagcagcagtattagtaacttaatcattagccataattcagccagcaatacaggcaacaaaatgcagcccacttggggccagagtgatgccatctcggcattgtggggctgctccagcagcagcagcggctgctcctcgggcagtggatcgcagccctcgttgagtccgacggccagcagcaatggcaacgatggctccaagatgatgttgtgggcggcccaaagttcgccacaaaatgctgcaacactcagggatggattcaaggagttgcagcgccagcagccaccgcagcagcaggtgccacagcaacagccacatgcagcctcgcccacagcttcgctgaccagttccagttcctcctcgaacggatggagcgcctcgcattatggcaagcccaacatctgggagctgccaggatccaccgggcaaaggacaccggccagcagccacgacatcttcaccgatctcctgtgcaacctgagcatcagtcaggacaacagcagccagcaggccagcagcaaggctgatgcctccgacgtcagctcgaattcctcctcgtcggccggggaactcctggaggcggccaatatctggaggtttccagagtacgccagtagtcagctctacatggaggagccaactggcggcgcagctgcctgcatgcagctcttcaacgactatctcaacatgaactaaaacgaagaattgggagccacaacagcctgccgcatttgttactctagctaaattgaaaaacaaaaattgaggaaaaaggagtaagcaggcggaggagaggccgtatacgagccaactctcctgaagcgagtgttttagttttttaaaatcatttgattttttttatatacacacacacaacacacatctaaaaccgagagaaaacaaagcaaactaaaaacgaatttcttgttatttttgttgagttttttagttctttgtttacacacacctacctaaacgaaaaaaaaagcaatttttagttttattttataaagcaaattttttatacattttaccaaaaaaaaaaaaacaa

SEQ ID NO: 39006 - protein, 650 aa, DROSOPHILA
MAPRRNSNISSSGNSTQQQHQQQLQQQHQTQQHQLLQFYAENVNSSGVLMAPMQGTGGVGGVGGGGMVHCCLPSGDCRKLDTLIHLNELSLADCIRVLCNNENCSAGQYMHRECFEWWEASVLQALKANGRARSWSERQRLQHLWTKKGYELVQKACSCKCGRGQLRKDLDWVPPSSQGVIYLNGSGNRPTLANGSLSEDDDKKKAKKKRNRNNNNNNGGGGGGGAGVNGNTKTPLSNNNGNSYAGLTPNPNVGVIGSGLPHNNGNTASNGSSGNNGSSGVLQTSALATFSNILNTNNVLGLDLRARAGSLSSSGAGSGSTSPSDSQSSGEISVSPVQQLLPQQQQQQQQSLLIQPLGPAFGSNLLQNGLGLSKNLLIAPQQQQQQQLQQQQQQQNNLPALANISNFKPLASYEQQQLVQQQKNKEVELYSDRVRSTSGCNGIFSRRLDFSSFNLLPKTRLNSYQVKIEDEGNHGNDETRLFILSSLAQSQMSRVACILCEEPLLVFDRYPLVDGSFFLSPKQHSSGCIEVKYEGRTLYLTCVCMSCLDGTSSSRAINCRFCKEPWDGSSLVLGTMYAYDIFAAMPCCAERFKCNNCFKMLMHPQQRLSFYSDYSHGVTCPYCNTQDTHFVKPLTFCYAKTTATRLPTLA

SEQ ID NO: 39007 - DNA, 4419 bp, DROSOPHILA
ctggctgcccactgtgctatactctcggctgctgttatgtggctcttcacggcgtatatctactctgtgccccacctgctctttattcgcaatgaaaatggcgtcacttctcgggaatcttttgttgttgcgtctgcctgcggaggctgctaatcctgcctggtaatcccctgctaatcccgcactgggtgcgctcctgctctcagccgatcctgaacactcacagcctggcctggacttcggctggcatctcacaacgctgcttcaattgcaattatcgccctgcctcttcgaatatttataaatcactcgcttgtgcagtgtgaccatgcccgggcggtagtggtggtgcgaccagtcagatggacttcgctcagtactcgcgtacggtaacacctattcgcttgggcggcaaaaattgaatgagttaaaatatttgtttcaacgtataatgcaagccttttcgaaatctgtttcgtttcgaatgaaacaatgaaaaacacgattgctatggttgagttatattcatttacattttgaaaaagtgtatacttaatttgatttcttgttcaataagcaaaaacgatctcaagaactttgtttatcatttatacttaaattagcaaagcagatatgataaggttcatcagtttacactataggctctggcttctttgaatcataaagtatctagttaaaaagggaaagttatatcgaaatatgtaatatgacttattaattgcctatttgtggtgaatggtcaaaaatggtaatttttgcgatatgattatttagaaatctgccccaccggaggcagattgtggccacttctcatgccaaaaatataatcatataaaagttctactattcgagattaggctaatctctgccatgaatgcgttttccggcctggttaatggggtggccattggctgagagataaccgaaagctataaatggccccacacgtggaaactatgctccagttgctctgcgaaccatgaaagcaatcggaatcctgctggcgatcgccttgacctccgggttcctggtggtctccgccgtaaacttgccgggagtgcccgtggacttcgacctggacgaccacatcctgtccgccattgcagacgacatagccgagcgtctggccagggagtacatcaccttcctgaagaccggagtggagacggcggagttcttgaagctcaccaatcagctggccaagtcgcacagtgagaaggatatattcaccaggaacatgcccgatctagagcccagggatagcttctttgcgtgcgtggcctgtcgctcggtgacgcgggttttgattcgcaccattcgcgaggaggacggcgagctccacggggagaatagctccgttctgatgaaggaattcgctatggacgtgtgccgccgcttgaatctgcaaacggaggaggtctgcgagggattgatcgattccaacctgccctccgtggagtacatcatgaggaactccgagagtgattcccagagcttctgctccttgttcatggagtttaacttctgtaacaccggtacaaatcaagattacaattggaccttgactatagacaatactggagaggcttcggctggccccaagtcggacactcccacctttcaggactcggacatcaggatctgccagttctccgacattcaccatgatccctactacacccccggcagcctggccacttgtgcggaacccatgtgctgtcagaggaacaaggagaccaccgagggtacgtcggatgcagctggatactggggcgactaccgggactgcgatctgccttggcacgccttcgagtcagccttggacaacgcggtggccaactccaagtgcgacttcatttaccagactggcgacatagtggaccacatggtgtgggccacttccgtggagaagaacaccatggtgctgaccaaggtcagtgagcggctaaacgcggccttcggagatgtacccgtatatccctgcatcggaaaccacgagcctcatccactcaacctgtaagtaggggatccttaaaatctaaattttgatatttataaattgcatgaattgggattcctaatctcagattatcccggatgtataagtggactaataatccttatctttattttcgcattgcatagcacccgataatttattatgttttcaactattttcaattcattcgcttatctatttcgactattggactattgcagcttcagtcccgagggcgttccagatgagatcagcaccaagtggctctatgagcacctgtacaacgattggtccaagtggctgccggctgaaaccaaggaaaccatccttaaaggaggttactacacggtggtgcccaggaagggcttccgtatcatcgctctaaacagcaacgattgctatacggacaacttctggttgtatcacagtggcacggacaagattccccaactccagtggttccacgataccctgttggaggccgagaagaacggggagtatgtccacgtgctgacccacattccttcgggcgatggaacctgctggtccgtttgggctcgggaattcaaccgctgcgtatcccgcttcaggtccacaatcagtggcattttcacaggacactcgcacaaggacgagctattcgtttactactcggaggatgaaggacaccccaccgcagtggcgtggaacggaggtgctgttaccacctactccaacaagaaccccaactaccgagagtacgccgtcaatcccgaaacttacactgtgaccaaccactggacgtggatttacaacctgactgctgccaatctgaagccagatgaacagcccgagtggttcctggagtacgagttcatcaaggagttcacggaagatatgagtccggccggaatcagcaagctgctcgatgagttcgccgagaatcccgaattgatgagaaaggtaagttaatatcatctgaagaatatcatctttacggtcaccatatcatatcattaatacccgtttcatctgtagtactggcgctaccgagtgacctcagcagatccccaggtgaatggaggttgtgatcgcagctgcttggcaggatctctttgccgagctgctgtgaccatcaattccgagcgagaacgctgcgaggagctgcgtgagaagttgtttgcctcggtaagttactttctggataaatctctcgatccacaactaagtgatgattcccttccctcagctggacaatgaggagagcacatcgtcgtcgggaagcactgaagccaccaccccaagtcccagcaccccagggggcaacgatgacaacgacggtggaggatcctccactttgggactgctcagcgttagctccctgctggctatagtcctctccatccgcctagccttgtagtaatcctcatttgtaccccctaagttatataaaccgaatggattccattctaaaagtaaccgctctcaagtggcaaatagaagtatgcgcttatccctatcgaaactaatctggatgatttttgtggagggactttgtttttcagccggctgccttatcgcctaatggcgattagcgaaaattagcttattaaaccgtgctggccataaaacaagcagctggctacagttttttttttgccgaatattgaactacggataagtgtaagcacgtgcacacgattcttttaggtaataatttacgacacaccgattatggtcagaatcgtgatcaaatgtcgattatcgcgccatgatctgactcactaatggaaacacttaaaaaaaaactctgtaaaatgtatgatcttacaagcctaataacaacttgtattgttacaatgttatgaatgatatatgtaagaaaactacttaatggaatcttaggctaactcgaggtcagctgtgtaaatactaccgattggatagatgctttcgatcttcttcatttcactatgagtttataatcgtttcatacatctactttacagaccgtaaatgtaattagtagtttagctgtcagatatcatcccttttgtaaagtggtcaagccaaaagcagttaaagaacttcagttagtataggcagttgactgtggaaatttcgttgtgcgatatcatcgcatttgataagtggaggagctgattgcggtgatatgaggctataagtaaggggctcgactttaatcccttaagcagtctcgccatgaagttgatccggggcacaactcttttgggcatcggcatattattcgtcgggtgcggggcgttcagcctgccctccgtttacgatgtcctgtctaaggatcagcaggccacatcctttgtatcaggtgggttactgcttgtagtactaaccttttgagcttattggtatcagtatgaattaccttttgatgtgtg

SEQ ID NO: 39008 - DNA, 2079 bp, DROSOPHILA
atgaaagcaatcggaatcctgctggcgatcgccttgacctccgggttcctggtggtctccgccgtaaacttgccgggagtgcccgtggacttcgacctggacgaccacatcctgtccgccattgcagacgacatagccgagcgtctggccagggagtacatcaccttcctgaagaccggagtggagacggcggagttcttgaagctcaccaatcagctggccaagtcgcacagtgagaaggatatattcaccaggaacatgcccgatctagagcccagggatagcttctttgcgtgcgtggcctgtcgctcggtgacgcgggttttgattcgcaccattcgcgaggaggacggcgagctccacggggagaatagctccgttctgatgaaggaattcgctatggacgtgtgccgccgcttgaatctgcaaacggaggaggtctgcgagggattgatcgattccaacctgccctccgtggagtacatcatgaggaactccgagagtgattcccagagcttctgctccttgttcatggagtttaacttctgtaacaccggtacaaatcaagattacaattggaccttgactatagacaatactggagaggcttcggctggccccaagtcggacactcccacctttcaggactcggacatcaggatctgccagttctccgacattcaccatgatccctactacacccccggcagcctggccacttgtgcggaacccatgtgctgtcagaggaacaaggagaccaccgagggtacgtcggatgcagctggatactggggcgactaccgggactgcgatctgccttggcacgccttcgagtcagccttggacaacgcggtggccaactccaagtgcgacttcatttaccagactggcgacatagtggaccacatggtgtgggccacttccgtggagaagaacaccatggtgctgaccaaggtcagtgagcggctaaacgcggccttcggagatgtacccgtatatccctgcatcggaaaccacgagcctcatccactcaacctcttcagtcccgagggcgttccagatgagatcagcaccaagtggctctatgagcacctgtacaacgattggtccaagtggctgccggctgaaaccaaggaaaccatccttaaaggaggttactacacggtggtgcccaggaagggcttccgtatcatcgctctaaacagcaacgattgctatacggacaacttctggttgtatcacagtggcacggacaagattccccaactccagtggttccacgataccctgttggaggccgagaagaacggggagtatgtccacgtgctgacccacattccttcgggcgatggaacctgctggtccgtttgggctcgggaattcaaccgctgcgtatcccgcttcaggtccacaatcagtggcattttcacaggacactcgcacaaggacgagctattcgtttactactcggaggatgaaggacaccccaccgcagtggcgtggaacggaggtgctgttaccacctactccaacaagaaccccaactaccgagagtacgccgtcaatcccgaaacttacactgtgaccaaccactggacgtggatttacaacctgactgctgccaatctgaagccagatgaacagcccgagtggttcctggagtacgagttcatcaaggagttcacggaagatatgagtccggccggaatcagcaagctgctcgatgagttcgccgagaatcccgaattgatgagaaagtactggcgctaccgagtgacctcagcagatccccaggtgaatggaggttgtgatcgcagctgcttggcaggatctctttgccgagctgctgtgaccatcaattccgagcgagaacgctgcgaggagctgcgtgagaagttgtttgcctcgctggacaatgaggagagcacatcgtcgtcgggaagcactgaagccaccaccccaagtcccagcaccccagggggcaacgatgacaacgacggtggaggatcctccactttgggactgctcagcgttagctccctgctggctatagtcctctccatccgcctagccttgtag

SEQ ID NO: 39009 - protein, 692 aa, DROSOPHILA
MKAIGILLAIALTSGFLVVSAVNLPGVPVDFDLDDHILSAIADDIAERLAREYITFLKTGVETAEFLKLTNQLAKSHSEKDIFTRNMPDLEPRDSFFACVACRSVTRVLIRTIREEDGELHGENSSVLMKEFAMDVCRRLNLQTEEVCEGLIDSNLPSVEYIMRNSESDSQSFCSLFMEFNFCNTGTNQDYNWTLTIDNTGEASAGPKSDTPTFQDSDIRICQFSDIHHDPYYTPGSLATCAEPMCCQRNKETTEGTSDAAGYWGDYRDCDLPWHAFESALDNAVANSKCDFIYQTGDIVDHMVWATSVEKNTMVLTKVSERLNAAFGDVPVYPCIGNHEPHPLNLFSPEGVPDEISTKWLYEHLYNDWSKWLPAETKETILKGGYYTVVPRKGFRIIALNSNDCYTDNFWLYHSGTDKIPQLQWFHDTLLEAEKNGEYVHVLTHIPSGDGTCWSVWAREFNRCVSRFRSTISGIFTGHSHKDELFVYYSEDEGHPTAVAWNGGAVTTYSNKNPNYREYAVNPETYTVTNHWTWIYNLTAANLKPDEQPEWFLEYEFIKEFTEDMSPAGISKLLDEFAENPELMRKYWRYRVTSADPQVNGGCDRSCLAGSLCRAAVTINSERERCEELREKLFASLDNEESTSSSGSTEATTPSPSTPGGNDDNDGGGSSTLGLLSVSSLLAIVLSIRLAL

SEQ ID NO: 39010 - DNA, 4913 bp, DROSOPHILA
actaagtgatgattcccttccctcagctggacaatgaggagagcacatcgtcgtcgggaagcactgaagccaccaccccaagtcccagcaccccagggggcaacgatgacaacgacggtggaggatcctccactttgggactgctcagcgttagctccctgctggctatagtcctctccatccgcctagccttgtagtaatcctcatttgtaccccctaagttatataaaccgaatggattccattctaaaagtaaccgctctcaagtggcaaatagaagtatgcgcttatccctatcgaaactaatctggatgatttttgtggagggactttgtttttcagccggctgccttatcgcctaatggcgattagcgaaaattagcttattaaaccgtgctggccataaaacaagcagctggctacagttttttttttgccgaatattgaactacggataagtgtaagcacgtgcacacgattcttttaggtaataatttacgacacaccgattatggtcagaatcgtgatcaaatgtcgattatcgcgccatgatctgactcactaatggaaacacttaaaaaaaaactctgtaaaatgtatgatcttacaagcctaataacaacttgtattgttacaatgttatgaatgatatatgtaagaaaactacttaatggaatcttaggctaactcgaggtcagctgtgtaaatactaccgattggatagatgctttcgatcttcttcatttcactatgagtttataatcgtttcatacatctactttacagaccgtaaatgtaattagtagtttagctgtcagatatcatcccttttgtaaagtggtcaagccaaaagcagttaaagaacttcagttagtataggcagttgactgtggaaatttcgttgtgcgatatcatcgcatttgataagtggaggagctgattgcggtgatatgaggctataagtaaggggctcgactttaatcccttaagcagtctcgccatgaagttgatccggggcacaactcttttgggcatcggcatattattcgtcgggtgcggggcgttcagcctgccctccgtttacgatgtcctgtctaaggatcagcaggccacatcctttgtatcaggtgggttactgcttgtagtactaaccttttgagcttattggtatcagtatgaattaccttttgatgtgtgtataggaacagcattcgaataagttgaagtgtctatcaatatataaaaggtgtggattagatagttaaatgtttggtgtgttttttgaaaagataatcccaactgacagtttgaagggcacccattgacatctgtgattgcgttttgcagccagcatagcggaagagataagccgtgagtacctgaagtaccaccgaactggcatcgagacggagaggcttcgccagctgggaaaggacatccggagtagtcacagcaagaaggccattttcacggaatccatggccgatctcacctcaacggaccagttcttcgtctgcaccctgtgcagatctaccatcaacgtgtttgctcgaactttcaccgagggcgagctgagtggtccggaaagggatgatgaggcgaagaaattgatgctgggcatgtgtgactactttgctatcagcacccaggaggtgtgctccggattattcgatctcaactggccgattctggactttattctgaacgaaactgtggcaaagtcgaacaccttttgcagcatgctgcccatcccaatttgtcaggtgaaacaggatgagtacaatctcaccttgtccatccagggagacttgccccaggaatcgaactccaacttgcccgccaagacctccgaggatattcttgtcctgcacctgaccgacatccactacgatcctgaatacgccgagggcagcaatgcagcttgcgatgagcccatgtgctgcagaaattccctgcccgaaggatctgactcgtcggcagctgctggcttttggtctgattaccgtgattgtgactgccccaaacgcctcatccttagtgctttcgagcacatcaaggaaaaccacaagatcgagtggatataccatactggagatgtgccgccccacaacgtgtggtccaccaccagacagggcaacctggatatgttgtccgaaatcgacgaactgctggccaagtatttcccggacacgcccatctacccatgtcttggaaaccacgagccacatccagcaaatgtgtgagtacccgtaatttgcagtccatcaacattattaatctaatgacgcagaagggaaaacttcaaagcgacgagaccgcaagtgccttgaattaggcacaacctctcgataatacttggttatttggacttatgctgacccaaaaaaccaaatttggttatatcccaccactttttatagaacttttatatacttccttaaatgtatgaaacagttgatggtacttagaagaccattgatagtgtttttaacacagttaggtataaaattataccactgttatttagataaatttcaattgagtgtacttctgtttatcgatactattctacaaagagaaagcgaaacaatcatggttttggaacttctgtattttccactcagataaagtttattgcaagaattagccacaattgctcccctcgggaaacccataaaatgttattcggtgcccatagtaaatatttacaattactaattggacaatttgaaaggtaggtggtattagtttaaaaataatccactcaagtttcaagtaattggtttttacgcgattgtaggttataaagctggagctttttgaaattgaatgtttatatcataatcctattttatcacatcatattttcaagtttcggaaacgacgagattcccagctcccttagagttgactggttgtatgagcacgtgtggagtttgtggtccaagtggttgcccgccgaggcggaggagactgttcttcgaggaggatattacactgcatccccgagcaaaggacacaggattgtggccctgaacagcatggactgctacctgtacaactggtggttgttctataatgccacgttgattcaggagcagctgcagtggttccacgacactctattgtctgcggaggaggcgggagaatcggtccacatcctgacccatattcccgctggagatggagactgctggtgtaactggtctcaagaatacaatagggttctcacccgattcaatggcatcatcactggagtcttcagtggtcacacccacaaggacgagatgaacttgcattactccgaggacggctatgccacggtggtcaactggaatggcggtagtctgacctcctactcgaacaagaaccccaactaccggctgtacgaactccacccggagaactggcaggtcctggaccaccacacgtacacattcaacctgacggaggccaacctgacgcccgacgagcagcccaagtgggagctggagtaccagttcaccaaggagtacaccgaggacaccagtcccgcgggaatcgatcgcttgctgttggaaatggctgagaagcccgacttgctaaggaagttctggaggaacaagttcaccaactccgatcccaagctggcagagggctgtgataacgcatgtttgagcaagacgatttgcaggatagccaccagtaattaccaggagcgcactcgctgcaaggaactccaggccatcctggctgagagcgtgagtacttaatgggattacccctttaacttaccactgatcggaaatcgcattttcagttggaaaacgagccggatacggatgataataatggcggaggtgctgctggactatctgccctcagtttggcctccctgctggcgcttttggctgcatctaagctccttggataagccttatcaatgccccccgtctattcttaacccctgttatcaacgtcgataatcgcagcccataaaatgggttataaaacagtataaaaaagacccaaagtctttacagattatggaataccaagagaaataaacacacacgtttcttgtagtcaacactcagaatgttcgatatacatgtatatatatatatatatattacctaagatgcctctcgggtagcgaatactttgcgaattagctggattaatttaagagttaagtttaagcactacgatggagtccgggaaggagtcgtccgtccaatgctctgggcttcttttcatttttttttacaaacatgtacatttttggacagcgtcccacctcgccaagctaacttagagcgcacagatgagcgtggcgatctccatgtccggcacatccgccttgcgcaggacaatggccgcctggttctgatagcgaccggaggacaccagccgcacggtgctcacgccgcaaaagatggcctgctcgggacccaagtcactggaggcaccgcacacggcactggcctgctccattccaatggcatccagaccggcggctccaccgatttctaagcgatcgctgggcaattgacactagttggaagaaaggaggttagctggttaacgcggttactcaagttctgcacctacatcgtagttgactttcggctgggcccgcacactcttgccgccaatccgcaaactggccagcgagaccacagccggaaagagcgccgagatggtgcagttgcgagcctgcccaaagttggtcatcttgtacatggcggccgtgtcctggaccaaaacgttacaggctaaaacaaggatgagtatgttttcttttagcattgtgatgtcaagagctgctgtactcacgttgcgtgatcttgtggaaccgcacattggccacaaaggagcctcgaacgggaattcggtattggagcaaggcggcattctggctcgagcggaag

SEQ ID NO: 39011 - DNA, 1917 bp, DROSOPHILA
atgaagttgatccggggcacaactcttttgggcatcggcatattattcgtcgggtgcggggcgttcagcctgccctccgtttacgatgtcctgtctaaggatcagcaggccacatcctttgtatcagccagcatagcggaagagataagccgtgagtacctgaagtaccaccgaactggcatcgagacggagaggcttcgccagctgggaaaggacatccggagtagtcacagcaagaaggccattttcacggaatccatggccgatctcacctcaacggaccagttcttcgtctgcaccctgtgcagatctaccatcaacgtgtttgctcgaactttcaccgagggcgagctgagtggtccggaaagggatgatgaggcgaagaaattgatgctgggcatgtgtgactactttgctatcagcacccaggaggtcatgctgcccatcccaatttgtcaggtgaaacaggatgagtacaatctcaccttgtccatccagggagacttgccccaggaatcgaactccaacttgcccgccaagacctccgaggatattcttgtcctgcacctgaccgacatccactacgatcctgaatacgccgagggcagcaatgcagcttgcgatgagcccatgtgctgcagaaattccctgcccgaaggatctgactcgtcggcagctgctggcttttggtctgattaccgtgattgtgactgccccaaacgcctcatccttagtgctttcgagcacatcaaggaaaaccacaagatcgagtggatataccatactggagatgtgccgccccacaacgtgtggtccaccaccagacagggcaacctggatatgttgtccgaaatcgacgaactgctggccaagtatttcccggacacgcccatctacccatgtcttggaaaccacgagccacatccagcaaatgttttcggaaacgacgagattcccagctcccttagagttgactggttgtatgagcacgtgtggagtttgtggtccaagtggttgcccgccgaggcggaggagactgttcttcgaggaggatattacactgcatccccgagcaaaggacacaggattgtggccctgaacagcatggactgctacctgtacaactggtggttgttctataatgccacgttgattcaggagcagctgcagtggttccacgacactctattgtctgcggaggaggcgggagaatcggtccacatcctgacccatattcccgctggagatggagactgctggtgtaactggtctcaagaatacaatagggttctcacccgattcaatggcatcatcactggagtcttcagtggtcacacccacaaggacgagatgaacttgcattactccgaggacggctatgccacggtggtcaactggaatggcggtagtctgacctcctactcgaacaagaaccccaactaccggctgtacgaactccacccggagaactggcaggtcctggaccaccacacgtacacattcaacctgacggaggccaacctgacgcccgacgagcagcccaagtgggagctggagtaccagttcaccaaggagtacaccgaggacaccagtcccgcgggaatcgatcgcttgctgttggaaatggctgagaagcccgacttgctaaggaagttctggaggaacaagttcaccaactccgatcccaagctggcagagggctgtgataacgcatgtttgagcaagacgatttgcaggatagccaccagtaattaccaggagcgcactcgctgcaaggaactccaggccatcctggctgagagcttggaaaacgagccggatacggatgataataatggcggaggtgctgctggactatctgccctcagtttggcctccctgctggcgcttttggctgcatctaagctccttggataa

SEQ ID NO: 39012 - protein, 638 aa, DROSOPHILA
MKLIRGTTLLGIGILFVGCGAFSLPSVYDVLSKDQQATSFVSASIAEEISREYLKYHRTGIETERLRQLGKDIRSSHSKKAIFTESMADLTSTDQFFVCTLCRSTINVFARTFTEGELSGPERDDEAKKLMLGMCDYFAISTQEVMLPIPICQVKQDEYNLTLSIQGDLPQESNSNLPAKTSEDILVLHLTDIHYDPEYAEGSNAACDEPMCCRNSLPEGSDSSAAAGFWSDYRDCDCPKRLILSAFEHIKENHKIEWIYHTGDVPPHNVWSTTRQGNLDMLSEIDELLAKYFPDTPIYPCLGNHEPHPANVFGNDEIPSSLRVDWLYEHVWSLWSKWLPAEAEETVLRGGYYTASPSKGHRIVALNSMDCYLYNWWLFYNATLIQEQLQWFHDTLLSAEEAGESVHILTHIPAGDGDCWCNWSQEYNRVLTRFNGIITGVFSGHTHKDEMNLHYSEDGYATVVNWNGGSLTSYSNKNPNYRLYELHPENWQVLDHHTYTFNLTEANLTPDEQPKWELEYQFTKEYTEDTSPAGIDRLLLEMAEKPDLLRKFWRNKFTNSDPKLAEGCDNACLSKTICRIATSNYQERTRCKELQAILAESLENEPDTDDNNGGGAAGLSALSLASLLALLAASKLLG

SEQ ID NO: 39013 - DNA, 2427 bp, DROSOPHILA
aagagcttgcaccacctccagagccttttctctggtcagccctccatgaagagcctttcgcagcagcttcttttgcctggttttcagcctgacaaagccaggacccgaatccactgaaggatttcggttgggtgatgcttctggagcagcatcagactcatttacttctaaactattcatttggttcccacgagtgcacgggaaaggaggtcgcccacggcagagcccgaggtgccgcaagaagtccgagttgaaactgcgggtggacaggtgcgcagagtccgccagctagagaccgagttccccctcggccacacatccctcgacgctgtctgttccgtcttggattggggtaatcttccagagttgtcttctcttcgcccgactaccattcgccaggagccttcggcagagacatgaccttgccgaaggacctgtttccggccgccctcacggggagagtgtagtcgcacttccgggtgtacagacagttacggcacgtccatcgggcactgtagctccgaatggtacgcgtagttccccctgtccatcacccggctgacggccatttagtagttgcacctattatttttcaggaaactttaaggattcttctttagtgatatgggagcatttgtttcaaattgtattattggcttgtaacagttaaaacgatttatagttaatgggttttaagaatttaaaaataaataagtgcacaaaaatcaataatacagaaaacttatttataaaaaagtaaatttaagtacttataatacataaataagaaatccattggaagaccatagaaaaacatggttaggtaacattttttataagaatataattgtgaaaaacaatttgttaaattaaaattaaagtaaccctactctaaaagtaaacgtttttatgtacactacatatatgtatgtgtagatgaacaactgattgtgaggctggggaagtgttcctagtgtagcatagaggtcctgcgactcacttagttgcgtttcatctcctcgatctgcttcagtaagagctgcatgcgatccttcatcaagggctgtcccttttgggtccttttgctgatggccttggttttctccaaacgtttctttttataggccttcacctgggcatcccggtccgctctaactttctcccgctccgcagcctcctgggcagccttttccttgcgtttcatgttccgaatttccggtttatttggcttttcctgggaagataatgcaaaaacatgtgtggtgtataccatttcagagtacatacttgattttctcgcttacccctttggccttttggttgttcttgttcttgaagtagggtttctggttgtggcccaccttaccagcgcctctgtttggttttccattgggttttccttggcttttttgcgatctcggtttcatttttgtgttttattaaatataaattaagctgcgaactaatcgatttatcgatggttgcacgcatgttacaatctggaatttaccagcactgccgaacagctgttcacagctacacggagtagtaatcgatatcgttctacgataacacgaggtaaatattggaaataaaaatatttagcatgttgaaattaggaaagtttctggcacaaaatggtgagtgaaacagttgatctatctattgaagtcgtaataattattaatttaatagccacgttggtcaatctggtgggcagacagcagctgggaaccgtcagccgcctctattcagctgccccggagtcgtccgacttggatctgccgatcgacataaagaatccctatgaaaaggacccccagcagtgcatcctatgcaagcacagcatcgagccgcactacaagaacgtgaagctgctctcccaattccaatcgccatacacgggtcgcatttacgggcgtcacatcaccggattatgcaagcgccggcaggagcaagtggagcaggccattctgcgtgcccagcagtgcctgctgatgccgggataccacaaggacctcgacttcctgcaggaccccaagctctttgatcccgagcggcccgttcgcccacacaagtactagttttctgataacttttagtttcctctttgttgcaatgggaatatagagtttcttaatgttaaatcttaaagctatgtttaactatggacactcctcctccagatagcgtagcatctcgtggggaatgcccagccgagtaaggagatcgcttcttgagagtcctggctccgccatagttagtaggtcacccacagaagctttgaatccctgccgccagatttctatatcgccctgtagctcaacgattttactgctctgtggactgttttcaagctggttcttctggttgccgtgctcctgtatctcctctggcgcatcaagagcctcttgagcatcattcctt

SEQ ID NO: 39014 - DNA, 357 bp, DROSOPHILA
atgaaaccgagatcgcaaaaaagccaaggaaaacccaatggaaaaccaaacagaggcgctggtaaggtgggccacaaccagaaaccctacttcaagaacaagaacaaccaaaaggccaaaggggaaaagccaaataaaccggaaattcggaacatgaaacgcaaggaaaaggctgcccaggaggctgcggagcgggagaaagttagagcggaccgggatgcccaggtgaaggcctataaaaagaaacgtttggagaaaaccaaggccatcagcaaaaggacccaaaagggacagcccttgatgaaggatcgcatgcagctcttactgaagcagatcgaggagatgaaacgcaactaa

SEQ ID NO: 39015 - protein, 118 aa, DROSOPHILA
MKPRSQKSQGKPNGKPNRGAGKVGHNQKPYFKNKNNQKAKGEKPNKPEIRNMKRKEKAAQEAAEREKVRADRDAQVKAYKKKRLEKTKAISKRTQKGQPLMKDRMQLLLKQIEEMKRN

SEQ ID NO: 39016 - DNA, 2567 bp, DROSOPHILA
ctccgcagcctcctgggcagccttttccttgcgtttcatgttccgaatttccggtttatttggcttttcctgggaagataatgcaaaaacatgtgtggtgtataccatttcagagtacatacttgattttctcgcttacccctttggccttttggttgttcttgttcttgaagtagggtttctggttgtggcccaccttaccagcgcctctgtttggttttccattgggttttccttggcttttttgcgatctcggtttcatttttgtgttttattaaatataaattaagctgcgaactaatcgatttatcgatggttgcacgcatgttacaatctggaatttaccagcactgccgaacagctgttcacagctacacggagtagtaatcgatatcgttctacgataacacgaggtaaatattggaaataaaaatatttagcatgttgaaattaggaaagtttctggcacaaaatggtgagtgaaacagttgatctatctattgaagtcgtaataattattaatttaatagccacgttggtcaatctggtgggcagacagcagctgggaaccgtcagccgcctctattcagctgccccggagtcgtccgacttggatctgccgatcgacataaagaatccctatgaaaaggacccccagcagtgcatcctatgcaagcacagcatcgagccgcactacaagaacgtgaagctgctctcccaattccaatcgccatacacgggtcgcatttacgggcgtcacatcaccggattatgcaagcgccggcaggagcaagtggagcaggccattctgcgtgcccagcagtgcctgctgatgccgggataccacaaggacctcgacttcctgcaggaccccaagctctttgatcccgagcggcccgttcgcccacacaagtactagttttctgataacttttagtttcctctttgttgcaatgggaatatagagtttcttaatgttaaatcttaaagctatgtttaactatggacactcctcctccagatagcgtagcatctcgtggggaatgcccagccgagtaaggagatcgcttcttgagagtcctggctccgccatagttagtaggtcacccacagaagctttgaatccctgccgccagatttctatatcgccctgtagctcaacgattttactgctctgtggactgttttcaagctggttcttctggttgccgtgctcctgtatctcctctggcgcatcaagagcctcttgagcatcattcctttcctttttatccttttttgctgttttcttcactatttcccgttcctcgtccttaattccgtgggccgcagcaaactctagcttcttcttggacaagcctgtcctgcttttggacaatcctatcctgcgagagctcagcgataaaggcggtgcccgcggagtctcctgttcactacattttggtgtatttgcagcggaatcgtctctctgaagtcttattaagggcgttgactggcaaccacgcctactcaatccgagtcggggtctccgtccggattgaggcgtgttatttgcctcaccaggcattaaaaattagaaaaaacgtactaaccaaaaggattttgaaatatcgcagaacagatgtgtaatcagctgttctcttcgatatcgataacacgcgaaaggagtagtactaagagagtgacagtagagggcgccacaaaggaatgtaggttaccatgaagagaatgtaaattattatgtaaaaaataacaaattagatttttttgatatataacgtaaaaaataattcttaagtgagaaatgtaaacatattaaaaaccactattttgttttatttatatttattgagagtagtgataaaaaaatacacattgcataaaattatgcacaattatttccgattcaaaattaacaataaccggtacaaataaagcaattacaactaaaactaatttaaaattttaagcttttcgacaatttcaacttaacagaaacacattttgtttaaacgagtttaaaaaacgcaatgaatgccaaactgtggaatatatcgctactactctccattgattacacattggacttaggttttattgtactttattctaggtagaattggtatgaatatataaactcgcgctgaacgatcctgtctttcggggactgtatataaagtgtctacaaaaactaggcgcgcactctctattgctaatcggtaatccgtaatctgctctatgactaaacgtgacctgatactgatacatactgccgaatcgggagggactcgcgcgtgtacacatttggcttaactgcgattttgcgattctgcgaccagaccgactctgatatgactataaactaacgtagacgaggcctaggggctaaagcgattgactggcttacaaactgaaccggatggggagaaccaaactcattgcggcaatcgacggaaggcggtcgattgggagatgtacggggaagctcttaaggatccagcttgtggtagcgctcgacgtcggcgcagcggaagaatactttgcacacgcactgctgatcctgcgag

SEQ ID NO: 39017 - DNA, 567 bp, DROSOPHILA
atgcctggtgaggcaaataacacgcctcaatccggacggagaccccgactcggattgagtaggcgtggttgccagtcaacgcccttaataagacttcagagagacgattccgctgcaaatacaccaaaatgtagtgaacaggagactccgcgggcaccgcctttatcgctgagctctcgcaggataggattgtccaaaagcaggacaggcttgtccaagaagaagctagagtttgctgcggcccacggaattaaggacgaggaacgggaaatagtgaagaaaacagcaaaaaaggataaaaaggaaaggaatgatgctcaagaggctcttgatgcgccagaggagatacaggagcacggcaaccagaagaaccagcttgaaaacagtccacagagcagtaaaatcgttgagctacagggcgatatagaaatctggcggcagggattcaaagcttctgtgggtgacctactaactatggcggagccaggactctcaagaagcgatctccttactcggctgggcattccccacgagatgctacgctatctggaggaggagtgtccatag

SEQ ID NO: 39018 - protein, 188 aa, DROSOPHILA
MPGEANNTPQSGRRPRLGLSRRGCQSTPLIRLQRDDSAANTPKCSEQETPRAPPLSLSSRRIGLSKSRTGLSKKKLEFAAAHGIKDEEREIVKKTAKKDKKERNDAQEALDAPEEIQEHGNQKNQLENSPQSSKIVELQGDIEIWRQGFKASVGDLLTMAEPGLSRSDLLTRLGIPHEMLRYLEEECP

SEQ ID NO: 39019 - DNA, 3158 bp, DROSOPHILA
ttgcattactccgaggacggctatgccacggtggtcaactggaatggcggtagtctgacctcctactcgaacaagaaccccaactaccggctgtacgaactccacccggagaactggcaggtcctggaccaccacacgtacacattcaacctgacggaggccaacctgacgcccgacgagcagcccaagtgggagctggagtaccagttcaccaaggagtacaccgaggacaccagtcccgcgggaatcgatcgcttgctgttggaaatggctgagaagcccgacttgctaaggaagttctggaggaacaagttcaccaactccgatcccaagctggcagagggctgtgataacgcatgtttgagcaagacgatttgcaggatagccaccagtaattaccaggagcgcactcgctgcaaggaactccaggccatcctggctgagagcgtgagtacttaatgggattacccctttaacttaccactgatcggaaatcgcattttcagttggaaaacgagccggatacggatgataataatggcggaggtgctgctggactatctgccctcagtttggcctccctgctggcgcttttggctgcatctaagctccttggataagccttatcaatgccccccgtctattcttaacccctgttatcaacgtcgataatcgcagcccataaaatgggttataaaacagtataaaaaagacccaaagtctttacagattatggaataccaagagaaataaacacacacgtttcttgtagtcaacactcagaatgttcgatatacatgtatatatatatatatatattacctaagatgcctctcgggtagcgaatactttgcgaattagctggattaatttaagagttaagtttaagcactacgatggagtccgggaaggagtcgtccgtccaatgctctgggcttcttttcatttttttttacaaacatgtacatttttggacagcgtcccacctcgccaagctaacttagagcgcacagatgagcgtggcgatctccatgtccggcacatccgccttgcgcaggacaatggccgcctggttctgatagcgaccggaggacaccagccgcacggtgctcacgccgcaaaagatggcctgctcgggacccaagtcactggaggcaccgcacacggcactggcctgctccattccaatggcatccagaccggcggctccaccgatttctaagcgatcgctgggcaattgacactagttggaagaaaggaggttagctggttaacgcggttactcaagttctgcacctacatcgtagttgactttcggctgggcccgcacactcttgccgccaatccgcaaactggccagcgagaccacagccggaaagagcgccgagatggtgcagttgcgagcctgcccaaagttggtcatcttgtacatggcggccgtgtcctggaccaaaacgttacaggctaaaacaaggatgagtatgttttcttttagcattgtgatgtcaagagctgctgtactcacgttgcgtgatcttgtggaaccgcacattggccacaaaggagcctcgaacgggaattcggtattggagcaaggcggcattctggctcgagcggaagaacttcttgttactaactcggggcctggacaaagataggattagcacacaaaacacagagctcaacttccacccaccattgtctgtagttgttgcagaactcgtaaacgcgctcctccagcggtcgatggtgatccttaatgcccggaaagtactcgccattcagctcccagccgtcgacaaactatcgaggaaagtgcgttacacttgggcacaatttagtggcacccccgagcacttaccgccattagggctcctgtctcgcagttcgcatcgtagtgcttcattgtaatctccacaatcgtgtctggctccccaatcacataaagcccacatacctccggctgcagttcctggacatctgctgccgttccagctcctgctcctgcccctgccgctgcgccctcccccggaacaacacccactgccgcagctcctgccacctccagttcgagcagggcggcctcccggttgagggccgagttgagtgggttgagcttcttgaagatgtagtcacctgcctcggaggccacatgcatgcaatctgaggaaggggtaaaagcaaggggtgggttttaatggctcagcactgggggaaatcagttactaggagtggtttctacgaaaagtacaggactgacgtatatgtatgaaattccagttagaattccttgcagtgcacccaatgcactggatgccttcgagccgaatccgaaaccaatttgtcttggcgaatttccaagttaccctggagaagaccggcgattaggggtgggctattgaaatcccctttgattgtttccaacttggctcctgggcaacaattaatttatcatgcgcatccacttaatgccggccatagttggctgatttatggccagcattattagccgggtcacacactcacacgatttttatgacctcctgctctctgacatcccccaaaccgggccgaaaacaattaaactgctatttgacttcttttttgttccactcttgacatgcatgtcacatacttcgagtgtacttgtgtgggctttgtgggatgtactcgtacgtgaatcccttgatggggaataaggtcctggcaggatggaggaggtgggtcctgccgcttggcgccaatttgtttatgacactcgctaattgttttcaagaatgacggctttcggcctctcaacatatctatatgattaccattctagcacacaataaaacagctctgttcataagtaattaggcattatgattaaataatggtacgcaaagtggctgctagttaataaataatcataaactattaagctgctttattgggctggcaaaaagtgagaggggaattacagtacctattatattaccgctttcagcggaatatcagttaagtccttttttttgtactatgctttgagtttgaataaaaaagttcacccggaagcctttcaattatttcgaatagcatgttgaacttgcttttccgaacattttttttttcataattgtaactttttctgtaactgcaaaatatctggaagaccc

SEQ ID NO: 39020 - DNA, 930 bp, DROSOPHILA
atgcatgtggcctccgaggcaggtgactacatcttcaagaagctcaacccactcaactcggccctcaaccgggaggccgccctgctcgaactggaggtggcaggagctgcggcagtgggtgttgttccgggggagggcgcagcggcaggggcaggagcaggagctggaacggcagcagatgtccaggaactgcagccggaggtatgtgggctttatgtgattggggagccagacacgattgtggagattacaatgaagcactacgatgcgaactgcgagacaggagccctaatggcgtttgtcgacggctgggagctgaatggcgagtactttccgggcattaaggatcaccatcgaccgctggaggagcgcgtttacgagttctgcaacaactacagacaatggccccgagttagtaacaagaagttcttccgctcgagccagaatgccgccttgctccaataccgaattcccgttcgaggctcctttgtggccaatgtgcggttccacaagatcacgcaaccctgtaacgttttggtccaggacacggccgccatgtacaagatgaccaactttgggcaggctcgcaactgcaccatctcggcgctctttccggctgtggtctcgctggccagtttgcggattggcggcaagagtgtgcgggcccagccgaaagtcaactacgattgtcaattgcccagcgatcgcttagaaatcggtggagccgccggtctggatgccattggaatggagcaggccagtgccgtgtgcggtgcctccagtgacttgggtcccgagcaggccatcttttgcggcgtgagcaccgtgcggctggtgtcctccggtcgctatcagaaccaggcggccattgtcctgcgcaaggcggatgtgccggacatggagatcgccacgctcatctgtgcgctctaa

SEQ ID NO: 39021 - protein, 309 aa, DROSOPHILA
MHVASEAGDYIFKKLNPLNSALNREAALLELEVAGAAAVGVVPGEGAAAGAGAGAGTAADVQELQPEVCGLYVIGEPDTIVEITMKHYDANCETGALMAFVDGWELNGEYFPGIKDHHRPLEERVYEFCNNYRQWPRVSNKKFFRSSQNAALLQYRIPVRGSFVANVRFHKITQPCNVLVQDTAAMYKMTNFGQARNCTISALFPAVVSLASLRIGGKSVRAQPKVNYDCQLPSDRLEIGGAAGLDAIGMEQASAVCGASSDLGPEQAIFCGVSTVRLVSSGRYQNQAAIVLRKADVPDMEIATLICAL

SEQ ID NO: 39022 - DNA, 4846 bp, DROSOPHILA
aattcgagtgttgccacggcggaaattagttctgccttaaatgccttggctttcccctgctccccgatttatgtcgaacatattgcattcgagatttatgcacgagttctgcccgaacggaattgaatagatggcataaatttcgcgcaactgctgccacatgatgaaggaaatttatggaaattagagggatcccacgaagatattggggcataagatatgaggccttctaatccagactcaataacagctcacaaaggcccgaaaacattataggggtagatagaacttgatcttaaagtccaatcacatcatgttgcatacttcacgttacgtaccttcataagtgaactcccttgtaagcgtaagtattcatgttcgaaaactgagtagaacaaagcggtatattccattcaggacattctcctaagcacccaatttgtggctggtgcaattaggggtcacctccgaacgcttaagcttatcttaccatgtcggtccgctccacaactcgctttccctctgttgcaaccgatgacattcatgttttaattgttgtcgttctcacatgttgccagagtgaaaaacgaagctgcacgggaggaaatagaggaaaaacaggaaaatgcggacggaaatgggacagcaggggtgtggctgtcatgtcctggcttaaatggctgtaaagtgccaaagcgtcggtgtcaacattaagcgcacatcaagtgcaggactcccaggcaatcgagcaggatgtggatttgcgcaagtggcagagggggcggaaggggcggaaggttggcaccgagtgttgaaaatctcgtccatgtccaaagtgagtgaccacggaaggaatgagtcagttgcagtttcattgccttcgattcgctgggctttccgcccatgactgtttggtttttgccaccgcccacggcgcaatggcaggtgcgaaatttacatttatccttggccagtgaagtggattgccaacgtcctggcttcacgactctgcccacaaagttgccattaaacaaacatatcgcaggttcttcaggtgatggatggcaggagccaggagtgagaagtagaaccctaatcgtccagcagtttccaacattttcaaatgccttccgtctttggcaggctaacatgacaaatgtggttatactaatatttgaatatcctttttgcatgtgtaatattgttttcatttctgatcgcaataacttacattactcagagatgaatcatatttcagtgctgttctactgctgttctgtgaaattaaattcccaatcatttttcacccttttccatttatctcaaccacgctcctgaaaagatggattcgattcggctatttcaggcgctgctatcttatctgtcttggagcagtctcaatcataattagctggttagccagcagaggttctatttttgtttcggctgcaacaaatgtcacgggaacttttccactgattgggccattaccaaatcgaattaaatattcatttgcgacgtgctactatgctactttgacccgctgacccgcttggacttccataaattgattaccaactagagtttgcaacgtgagcctaatgaaggtaatcagttctagcataagccagaactgaaaggctgccgaaaagttttgcaataacgccgacagctagaatcaatcaatctggccaaaaaaatctgggccgagagaaattagatcaagtcattagaacaacgaggaaacaaaagttggcccaacttgttgatcgaattacaaggagttacacgcgtgacttcgtcttctattgatacacagggaataaaaatgtatatttatgagacatttttctggcttacagatggcttccaatggaataaactagcactttttaaaaacaatagttttgttcaactcacgaaaggcaaatatttatgtttagaaatataattatgtggtgattaatatttttctgtgttacatctttcaatcgacactcacctggacgcccagcacaatcatggagaaatagagatagacaaccaacttcatcgcgattttcgattggcgaaacctaaggagaaaatggccaatccccgcggggagattgaaaatcagttgacaaagtttgaggcgacttttcaattaaccctcgagttccggtgcgccttcttttgatcctttggcctgaccggagctatgagattagaccaggaatcacgcacccaataacttcattagagcgtggaattagcgacggaggcacgcgatgcttactgggcacacgatgcgtatacttgatgcgggtttgaaattgcgccggggaaagcgtttttgtttcacagggaaaaagaaaccaagaaaccgttgcaggacgaaaacaaggacgatgcgtctacgctgccgctcgacgaccgagtgttggtccttatcagcgccgcatttccttttatagccagtcgtccttgccgagctcccagtttttttttacacttttcgtatgtggtttcccctaaggaaactttatgttttatgtttttgtgttaatgaagttggtctttgcattttcataaaacatactattctttattatgttccctgctcctgtattattattatttcgcttcgatttccactgcctttttttgaaatacttgccgctgtttggttactcaccaccatcggctgttctggtgaatttcccggcgagcattgccaacagaaatggctgaggaaaagcttaggagaaaagctctttcaaatggaaatccgactttatttgaaaattaatcgtatgaaataaatctaatcttaaatcaaagcggaacttaggttgtgctctattcgcgtataaactataaatatatatttgttaaacgtttttatcgagtttttcgaattttcctatatgaacttttaaatgtatactttaaggcagttctatgtatgtttaaaattcctacttcaatcccatatccaaagtgggcgccactgctacgggaataggcacatttctggggtgactcacatcccctcggtcgtagtaacctcctaaatgttctccaggtacgtggtacagtccatagtgcaatccattgttggccacctgcaagtgaatatggaaaagatttagattaaaggtctacaaataccctaatacccacttaccctctttaagccattaatagaggctaagagcagagccatcttggccagtaatagagcttttccactaactatcgaaagcatttgaaagcccatgggcactaagatggctcccaaagcagtcactccaaacatcatggtaatgatcatgttgtaacgatgtcttctcacccgggcacttcccacaggatctgggttagaagtatctaagatattgaccatcaatgaataatgaatgaagtatgagctaaccaaaacccaccactacttagatatctctcggtcagttttcccaagttcacttgcaaggtgtgtgtggttaagcccttggccaaactcactgccaattgatcgaaccaggttaagtgcttcaaatccttcctctcatcgtcaggccttgtagcgttatcagtactattcggagcagccaccaggcgcactccatcgtaaatggaaatctctggggaagacatgatgccctcgaagatgtgcaagcttcttgagcggaagcaggaccacagactttggtgtattccagactgatagcagtctcgaagatcactgcgtagctttttcatctgggatatccacgatttgtctgctagatcttctccagccgcgtaacgatcaactaggatcactcccagtaggaatgtaaccagaaccgacggaacacgcattgttcgcccttcgaaagccaaaatgaaactgcatccaataagttgccatcgatgcactttttataacccatcgctgaccagtgatcggcgaccgatctcgtccagtgcacccggtcattggggcagatgtggaaaccctcttctgggatccctaacggtttcttttagcggtcatggtcggcggacagcattgttgatgacttcgaaaccgagtctgggcaacccagaaaagcaaatgggcagtgctaaaataaacttgtcaacagcgatttgcaaatgcccaccatcgcacaattctaatcagatgcgtttcgaccctgtttagtggcaattggccatgaattagacgctcgattgagttggcaagcagtttccatggggcgtgttcttttatctgtgggctagtttcaatgggagtaggaaagtgggcttgacgttgttttctaaattgatttcaaaagatttacgaaggcataagctcgttgaaatggtaagggaataaaataataaaatatagtgcatacaaaaacagttgttttgcttagcaattaaaagcccaacccaaaaacctttaggagtgacaactctctttccgaaaatgcgattgtttttaatattgacttttatttaattattcattattagctaagaggtcattcattgcatttcctttgcttgataattgttttgaacaaattcgtactaagattaaaaggttttatcgctttaatagttacattgagtgcaaaagttgacgttcagtgattggttgatgctctagactttaaactagttaacaaagtttacaaaaacagttctacacttgcctaaatatatacgcaccatggccaaaatcgatattctatactctcaaatgggcttttctttacttttctctaggtttttcctgtgtgtggtaaaaacagttgctcagagctgggtgcccaggaacccggctgttcagatacaatagtactatagatacggcgctgctcctccc

SEQ ID NO: 39023 - DNA, 828 bp, DROSOPHILA
atgcgtgttccgtcggttctggttacattcctactgggagtgatcctagttgatcgttacgcggctggagaagatctagcagacaaatcgtggatatcccagatgaaaaagctacgcagtgatcttcgagactgctatcagtctggaatacaccaaagtctgtggtcctgcttccgctcaagaagcttgcacatcttcgagggcatcatgtcttccccagagatttccatttacgatggagtgcgcctggtggctgctccgaatagtactgataacgctacaaggcctgacgatgagaggaaggatttgaagcacttaacctggttcgatcaattggcagtgagtttggccaagggcttaaccacacacaccttgcaagtgaacttgggaaaactgaccgagagatatctaagtagtgatcctgtgggaagtgcccgggtgagaagacatcgttacaacatgatcattaccatgatgtttggagtgactgctttgggagccatcttagtgcccatgggctttcaaatgctttcgatagttagtggaaaagctctattactggccaagatggctctgctcttagcctctattaatggcttaaagagggtggccaacaatggattgcactatggactgtaccacgtacctggagaacatttaggaggttactacgaccgaggggatcctgccaaagacggaaggcatttgaaaatgttggaaactgctggacgattagggttctacttctcactcctggctcctgccatccatcacctgaagaacctgcgatatgtttgtttaatggcaactttgtgggcagagtcgtga

SEQ ID NO: 39024 - protein, 275 aa, DROSOPHILA
MRVPSVLVTFLLGVILVDRYAAGEDLADKSWISQMKKLRSDLRDCYQSGIHQSLWSCFRSRSLHIFEGIMSSPEISIYDGVRLVAAPNSTDNATRPDDERKDLKHLTWFDQLAVSLAKGLTTHTLQVNLGKLTERYLSSDPVGSARVRRHRYNMIITMMFGVTALGAILVPMGFQMLSIVSGKALLLAKMALLLASINGLKRVANNGLHYGLYHVPGEHLGGYYDRGDPAKDGRHLKMLETAGRLGFYFSLLAPAIHHLKNLRYVCLMATLWAES

SEQ ID NO: 39025 - DNA, 3486 bp, DROSOPHILA
cgagatcgccacgatcattttgctgctcgtctatctgatctaaaaatcttcgatgcaaaaataaacatttttgtattgattgaaagatattttaatgcttaagatcacctttttaagttctcctgttcttgctgagccctttcaagatattcatcgaacttttctactataaaagcctccacgtcgagtagtctttccagctcacttatagccgagtagtaatctccattgactgggaatacgcagagcaacgataaaataatacttagccggaacattttgactgttcagtgtcccatttaaaactgttctggatttctggattccagatagacaatttcgttgactgtctgcctaccaccatgagtgcagctaaacaaacattgacacagttgggtatttttcggcatttctaatacaaaagtaggggttcccgatcagcatcccataataaaacagagagctacacgcttgagatcaacataaaaggaactaaaacatattattagtaaataagttttcatctttcatctggcttggagaattaagtgaaatcagagcataaaaaattgatttccctcactgaaggcgataaatatagtatattccgagttttatcgatcagtttagcacgagatgccgaagctactcatttcactagccattttgtacttactagttttagttaagagtcatagcaaaccgaaaatattggaaaataactatgctatatctatatacgacatgagtaaacttatcgactatgagcactatctactgaatatcttacagaagtttgcaaatgcattgcagaaaagagtggacacattagaatagtaagtagaaactgtaacttaagagattatttatgagatcttatcactaaagctacttggaaatgactgattacgatcgagagaagaatcttgccgaagatcctattaagcattttcggatcactcgccgcttgcactcggattacgtaaactgggtgtggttcatggaggagcagccatgggggagtaggtaatattagtgcgtagaagtgattcaacattttccgattttctagctcttgttaaggatataattgcgattgctccggaaatgccaacattaaaggacgttgaggaggccattagaggattgagactcattcagtggacttattcactgccaactgccgaaatggccaagggagttcttcaggacatccatcacaagtaacacttaaatacgtttacctttccttttaatcgtaatattattttctaagtacatcgctggatggaatgcagtgtattacgattgccaggcacatggtaaattataaggactttattcgtgccaaggagtggttgatggtaggtttaaagatgtacgaggcagatgaagaaatcgagtatatctattcccaactcggaatgcccttggtcgatttttacgagcttttcgtcgagattcaagatgaacttggtaggattttaagcattaagcatgtatatagtttttgctgtgctcataaagttctataggttctcgatacttggccatgagtgaactgcaactcgctattaagaattggccggaaaaggtcagtctgcaaagagccctttctcggctaaagatgaatattcgcattggcaaggagccagcggaaaaggtatacggtaattgtattactaaactattaattaactcctttttatttagaagaataagtccaaaagagtctataagaaatgctgcagttcggaatgtcgacctaccgcgaaactttattgcttgtacaaaacgacatcctcgtatttccttcgattggcccctctgaagatggaactgctgtccctcgatccctacatggtgctctttcatgatgtagtttctgacaaggacattgtcagcattaggaacctgactaagggcaaacttgcccgaaccgttaccgtgagtaaggacggaaattatacagaggaccccgatcgcaccaccaagggtacatggctagttgagaataacgcattgatccagagattatcgcaactgacacaggatatgactaatttcgacatccacgacgcggacccctttcaggttttgaactacggaataggcggtttctacggcatccactttgactttttagaggatgcagaagtaaggccattttctttagttggtttccctgataaattttaatcttcaccagttggacaacttttcggatcgcatcgccactgccgtgttttatgtaagtaatacatgttatagggtgaatgtttttaattcttcccaatcatccaaagttgagtgacgtgccccaaggtggggccaccatattcccgaaactcggactctccgtgttccccaaaaagggctcagcacttctgtggtacaatcttgatcacaagggcgatggtgataatagaacagcccactcagcttgtcccacagttgtgggttctagatggggtaatatagtatagacaaatcgcgatatgctcagttaaataatttatttttgcagtcatgaccaagtggataaatgaaagggaacaaatttttaggaggccctgtttgacaagcatttaaaataatgaataataaaatatataaaaaaggtggaaatattattgagagaggttttactatttagtttgtcacgctacgggtgacttaagttttggttcaaagtaatgtattattttcctacctcagtcatgtggagcgctcttggtttttcgcctcttttggctgttttgattttacccaaatgggcctcttctacaaagatgaaagcctatttagatctcgatacccgattaaagacacaattacggggctactcggaagacctgcaggatcacattagtaccttaaatcggtaaatagatgaaaaatatataaaaatctataacacttttcgttgtgcagttatatagatgatcgaaaatctgagctagataaagtgggaaaagatcctgaagtgtatctgggcaatcctcttaatagcttctctttattacaccatttgcactttgattggccagcttggagaaagctaatggaaaagcccttagccacaggtaaataaagtaatgattatcctacaatcgacagaaagacaataacctgcacactagagtacataaccgagattcaagagatgtggagcgagatgccaacgaaagatgaatatacgaattccattaaagctgccaaggatttccataagaacgaaactcagggaaattttgaatttaggtaaggtacgaatctatatcaaataatactacttcctttcgtttaatagtcctttggagtctctgcaaatcgctctgcatgcatacgacaagaaaaactatacggaggcggagaactggctaaatattaccttaaatggttataaaaacctcagtctccaagaaaaggatctttatgaagttctaagtcctgttagtgagagtcaggtggaggatctttata

SEQ ID NO: 39026 - DNA, 1125 bp, DROSOPHILA
atggaggagcagccatgggggactcttgttaaggatataattgcgattgctccggaaatgccaacattaaaggacgttgaggaggccattagaggattgagactcattcagtggacttattcactgccaactgccgaaatggccaagggagttcttcaggacatccatcacaatacatcgctggatggaatgcagtgtattacgattgccaggcacatggtaaattataaggactttattcgtgccaaggagtggttgatggtaggtttaaagatgtacgaggcagatgaagaaatcgagtatatctattcccaactcggaatgcccttggtcgatttttacgagcttttcgtcgagattcaagatgaacttggttctcgatacttggccatgagtgaactgcaactcgctattaagaattggccggaaaaggtcagtctgcaaagagccctttctcggctaaagatgaatattcgcattggcaaggagccagcggaaaagaagaataagtccaaaagagtctataagaaatgctgcagttcggaatgtcgacctaccgcgaaactttattgcttgtacaaaacgacatcctcgtatttccttcgattggcccctctgaagatggaactgctgtccctcgatccctacatggtgctctttcatgatgtagtttctgacaaggacattgtcagcattaggaacctgactaagggcaaacttgcccgaaccgttaccgtgagtaaggacggaaattatacagaggaccccgatcgcaccaccaagggtacatggctagttgagaataacgcattgatccagagattatcgcaactgacacaggatatgactaatttcgacatccacgacgcggacccctttcaggttttgaactacggaataggcggtttctacggcatccactttgactttttagaggatgcagaattgagtgacgtgccccaaggtggggccaccatattcccgaaactcggactctccgtgttccccaaaaagggctcagcacttctgtggtacaatcttgatcacaagggcgatggtgataatagaacagcccactcagcttgtcccacagttgtgggttctagatggggtaatatagtatag

SEQ ID NO: 39027 - protein, 374 aa, DROSOPHILA
MEEQPWGTLVKDIIAIAPEMPTLKDVEEAIRGLRLIQWTYSLPTAEMAKGVLQDIHHNTSLDGMQCITIARHMVNYKDFIRAKEWLMVGLKMYEADEEIEYIYSQLGMPLVDFYELFVEIQDELGSRYLAMSELQLAIKNWPEKVSLQRALSRLKMNIRIGKEPAEKKNKSKRVYKKCCSSECRPTAKLYCLYKTTSSYFLRLAPLKMELLSLDPYMVLFHDVVSDKDIVSIRNLTKGKLARTVTVSKDGNYTEDPDRTTKGTWLVENNALIQRLSQLTQDMTNFDIHDADPFQVLNYGIGGFYGIHFDFLEDAELSDVPQGGATIFPKLGLSVFPKKGSALLWYNLDHKGDGDNRTAHSACPTVVGSRWGNIV

SEQ ID NO: 39028 - DNA, 2237 bp, DROSOPHILA
gatcggaacgaaggcaacaaaaaacttttgaaacgcgacgaagatcaacgttcaaaattgagcagacgtcagcagcggcagcagatcggcagagaactgagagtgagagtggaggagagagtgtggagaattgctggcgctctcccgagcgctgggggtctcgggccgtcccgctcgcacctgcggctaacacattgggggcctctgccccactagaccctccggaactcagaccgtctcgctctgctctccggcgtcggttccggtggcagacggcagaagattctaactagaagaattagaagaagctaggacggaggcagcaagtagaagacccgtgatcgtgtaattcgcctcgtgtgcgttccgttgttccgtaattattccggatttgttttcgaaacaggctgaagtgatgtgatgggatttcgatagctccatctttcaacttgtttcgctttatccgccttttgtcaccacggctctacgttattccgttgtcccattgttccgttcttccgtagtcccattgttccgtaattctccgttctccgttgttgtcgcgcctttcgtggccgctggtcgacgttacgtttttacagttcgataatcgagcacttcccgagaggatcgaaggctccaggcatctgcgtaaaccacgaaggatctacagtacctctaaatataccgcccttaggtcgaaaacaagttactaaaaaaccagcgcgccgtgaaattcctcttgtttatataataaccagcggctgccaaaagcccagcggaatatacaaaaaatattcatttttctagctctggtcgtttgtatttttcaggctaaaagaaagaaaataagaaagaagaaaacccaagcaattctgcgtgttatgtgttatcgttgtgatcagtgatccagtgatcaagtgaaagtgaacacaagaacgtgagagaaagccaagtgaatcagctcgactccaatcgaaaaggatataaatcagagacaatgtcggacattgaggatgttttcggtggctccgccgaggagaccaagcccgaacccgatgcccagagcaaaaccagcgtggtcaccgagcacaccgaggaggtgattcccggcgagaccgagaaaatggtaacggagaccatcgatgaggatggcgatgtcgtggaggaaaccaccgaagttacccgcaaaacggtgaagcgcaccatgaagatcactgaggtgagtgaactctgacccatggatccatctaatagccgccattatccattaactaacttattgtgcgtgtgctgagtacaaacataattcgaatagccatgaaaatcaatatgtattctgaatttgaaaaccgttcaagaagctataaaaattcgggaacttgggaaattcttaatggaaactatttccaaaagctttaatgttaagtgcatattcgcaatcaacttaaagaacagttcgttaaaatttattaagcatggaaatttttataaaaatattttcgattcaagtattgtttaccaagcttttggtggggggatatatgccgcaaaacaacatcttgtttttgcattgaatttatataaaaacatcgcatatttttgcgaaagtaaatgacattccattttacatatttccgaaaatattcttacggaactacaagtttaaaccaaagaatccgcccaaaactgaatgatttcctcaatagttggccacccccgatcgtttggcttatgaaagactataaatcattattctcatattctgaagggatcttctgccgtactggtctcctcgcttgtgaaattggccaaaacatggcgaactctggctatacattatttataccaagtgccatttctctatgtgcgtcttagcgaattgtttatacggtcccacgaatattataaatcttcccatacattatacatcacacacaccgcggcacagatatagacggacatataggcgattatatacacatatacatatgtatgtatatgttcggccacactttctataggcgacgttgccgggggaaagccaacaaaaaatacaaattttgcagctgtttgatttcggcgcaaattatcacaaaagatttcaaatggcatggcgtataaaaaaagctgggaattaaattattattaagcagaaatcacttaaatactcgatgccgagctatgccaaaaaatccccacactcgaagagaaatggcaaaaaaattaaatgcaat

SEQ ID NO: 39029 - DNA, 237 bp, DROSOPHILA
atgtcggacattgaggatgttttcggtggctccgccgaggagaccaagcccgaacccgatgcccagagcaaaaccagcgtggtcaccgagcacaccgaggaggtgattcccggcgagaccgagaaaatggtaacggagaccatcgatgaggatggcgatgtcgtggaggaaaccaccgaagttacccgcaaaacggtgaagcgcaccatgaagatcactgaggtgagtgaactctga

SEQ ID NO: 39030 - protein, 78 aa, DROSOPHILA
MSDIEDVFGGSAEETKPEPDAQSKTSVVTEHTEEVIPGETEKMVTETIDEDGDVVEETTEVTRKTVKRTMKITEVSEL

SEQ ID NO: 39031 - DNA, 2228 bp, DROSOPHILA
cacacaacaacagaccaaatttaaccacaagctcgtttccttggaaataaaataaactcatctaatatttaatcttaataaaatgaaatatttgtcaaatacatacgaaaaacttgtcttcgtgatttgtagagaaattcttagccaactgcataaatatttttatggttttacattatcgttctaaattcaaaatgaagaacacaatatggaatatatacatgggtataaaaataatttcttatttttttttcaattgtgtaactgcggtctcaaatcctttttcaaaagcttttaatttctggatgaatcctttacacgaaattccattaattgagatgtggtttatgaatatttctttcttaaattgcggaagcaatttacttaattatcgaaaaagttttcgcctatactctgggtaaaggatagaagtgtacgctgcgggaagaggtcgcctttccataattcatgaatgtcaaatccgtatttaatttatggatgaatccccacgcctctggcggatttataagttcataaatctacgtccattgccgtttatttacaaataattacagaatttaattgccgcccaagtttggcgcacgatttgcactcgaaagtgttgctgatgttgttggtgaacgcgtttaattaattatagccaagcatttcacttttcgggccagctgcagcgataaattctccgggagaaagagagatctgcgaagaaataacaaaaatcagcgctcgtagcagataaataaataaataataaataatattttattcatatgcatgcgcagatataaaaacaaaattcaaatgtgtttccagtgaaaatgagcgagagaagatgttagtgactcacactcaggccgtaggaaaaaattcaagaaaaattatacgataatatttgtgcagagcagagtgagaaaagagcatttatgcaaagaattcggggctagaaaggattacagcactcgagaacacacgcatcaccatggcagacactgccaaagacaaggacgtcatcgaccaggaggacgtggaggtggaggagcaggaggagaccaccaccaccaccacgacgaccaagaaaacctcccagtggcacaagactcgcaccaccaaggtacgaaatggaagtgtagaaaagtgggaaagtgggaatgtaggtgggaaattcgcccccgccgcctgtcaaactgacaaatgcccgacggattgaaagttccactcgtcgttgatatttccgagagagcgtcattgtgtctttaagaaattcttcatattttcttagtcgtggaaaagggaaactgtctgggaaaaacataagcgaaaatcctattttattgggacgttttgtgaatttactgggtaaatagtcacgagattttagcgaaagccatagcgcttattgtttatcaacttgagttgtagactccttaggcaacaaggtatgttaaaatattgtcctcccctctacacacaatcctttacagcaagaaggataattatttaaagcaaggttgcgattcttctccctggcttattcatcgatggctaattaactaaggcatttagtgacgcttttgcgcctggctgagttcccgaaaataaacaaaaaccgagacacattaatcaccatcgaggcagagaatttcccccaggtctcgactaatgtatgcacatactttcccggcgagcaggaaattctgggaaggaacagctcgaccactaaaagggttcccagtttgaaaaggcaggaagatgaagcatttccaggtcgctgcgtttgaggagccttttttttgggggggggggctgcgagatgtggggggtaatctttttggggccgagaatggccagcccacaattgccgttttgattgtagccagccacatgggattcaatctggtggtttcgtttgctttgctttcgaggaaaaccctggtcgcataaattacttggtggtactatccgagtttagggggtggtaatttcggagctacttaggtgtaagagattctggcccacctgtcgctaccggaattcaaaacgttgaaggagcaatcaatcaagctgtaaagtatttattaaacgatattatggggcttacctgccgctggtaaaatgcagaaattgagggaggaaaatcacctttccacttcacacgtacatgtggaaaacggagcagcttacatatttttttttttaatagcttcatt

SEQ ID NO: 39032 - DNA, 228 bp, DROSOPHILA
atggcagacactgccaaagacaaggacgtcatcgaccaggaggacgtggaggtggaggagcaggaggagaccaccaccaccaccacgacgaccaagaaaacctcccagtggcacaagactcgcaccaccaaggtacgaaatggaagtgtagaaaagtgggaaagtgggaatgtaggtgggaaattcgcccccgccgcctgtcaaactgacaaatgcccgacggattga

SEQ ID NO: 39033 - protein, 75 aa, DROSOPHILA
MADTAKDKDVIDQEDVEVEEQEETTTTTTTTKKTSQWHKTRTTKVRNGSVEKWESGNVGGKFAPAACQTDKCPTD

SEQ ID NO: 39034 - DNA, 9316 bp, DROSOPHILA
ggcaccatatcttgaaatccgtcactacttactaagctttaacagggtttcagcatataccatccgcacttcatttttggaaatctcaagcggagcagccatcgaaaaggcctccatcaatacaacggactgatagatccagctagcagctgccaaatagtttttctggtcaaataagatttgtcccatggcataggtatccaatacagtgagactcacactgcaaacattatggtttagtgggttatcaataaaggaatgtttaactagctcaatcctacttgtactgtttgccattgaggaatccatgggagatttccggcactttaaggccataggtgctttgaatgcgatccaaggcagtgacagcctcctccacatccgtgtgggtgggcatgtgttccctcaactcctggattcgctccacctgagaaatacccaccggatcgtccatgtagagttgccaaataatccagtcgcgattcatgcgacgaatgagggaaaaggagttcaggggattggataagtactcctccgtggaactgcgggctttgtcattttccaaacgcagacttgttatgctcctaaagaaaaattaaatagaaagatggtttggaagtcgaattttgttaagtgaaagtgaagggacagtgaaagaagctagtagcccagtaccttcttacggtctgcagtttcttctccagctcgacagcgtaatcctctaggttgtcgatcagctgcgcctccaaatcgagcagcttgaccattcctgccaccgaggtgcagtggctctcctcgcctttcgcctggcggaggagtagaagcagcacctggtaggtgagcagcaccctcaccggaagcagccacttcgaagagcgcatcgtgggttacctttctggtcgaagttctatgtgggtctacgtgccggagccaactgccagagccaaaatagtcggagctggcaagttaacatcgagccgagataaataataaccgtagttcgtttatagcgttttgttcggctgctgataagcggcgcattgatagcggcacgcagcgatttaattaacccgagagcaccggaacaaaaatattgagttggcactacgtgctcgccatttggaaaagagctgcgtcatcaaagaacgtgctctcgcccagatcactgaccaccgccaatacaatgtgtgcaatgagcaactgcttatgaagagtcagccaaagacctacgatggttggaaaagctatctcaggtgaatcgcttaattcgctatcttttagatagacatatatttatctgaatcgattaataataacatttatgtagaggttgtaggtacatattattataagataagatatcacattaaatcgaagctcttgttaaagggttgtatgtattccaaagccattctttgcatttacaatttttaaacaagatttttctttttccaagacccttgggacatatacttcaaggtcttgaattcaacttttgccctaaaattctttctatcgaaaggagttctcacaaaattcaattcaatcaacatgaataaactatatttgtattccaccgccgatttactgctcatccaacctggagcagtacgtccggcgctcttcctattctacaccttggagacgattttaaacatgatctgcattggatatcacatcaccggattccagcccctcgagtggaaagggcaggaggtccactacctgtgcctgcttatctttaacgtcttcatggtgatgaacttcttccagagcatcgcgatttgcacgggacgcgtgcccaatgtcttgatggagatatggaaagcatcggtggcagccttcgctttcatcctgatatcctttctcaccatgtgggacgtggagcagcagttctctgtgttcttcgtgagatctagcgagcaggtccggggcgagcacaaagaactgcctcccgttcacccgatcatccggtacaagacgggtcagtccatttgctcgctgttttgtggactaatctacatgctccacgccgtaataatgttcgacgtcaggctgacctccaagcttattgtcagtggatcacggcacttgcccattcccctctttgtcctgggtcgcgcttttcatagaaagatttatgcctacgaatggttcaaggagttttgcgggaataataccattgaagtctagtagatcctttttttcggcctagatcataaatccttttttcggctaaaatatatgtacataaatgcataaattctcgttgaatgtccctgggtatcatgttgttgaatgtataccctgggaatagtgtcagttttataagttattttgttcagttttgtaatgtctggagcggagtccctttttacttgggtgtacggaccgggtgtcacgcgagggggcagtgtggtggggcatcatcagcccgaggccctgcgacccgtgctctttctgttctataccctggaaaccatcttcaacatgttctgcatgggatatcacatctcgggctttcaggccatcgaattgcatgtgttcgaatgggatacggtggctattcactacttctatctcatgaccttctacttttttatggtggtgaccctcttgcagagcgtcaatatatgcacaggtaacacacccgccgtcgtcacggagatctggaagtcctcggcggcagccatcgtctttatcctgatatccttgagcacaatgtgggacgcggagcggcagttttacgtgttcttttttgcgagcgagcttggcgataagaattcacatgcatttgtggaagaccgcccaatacacccgatcttccactaccttcgtggtatgtccatctcctcgctgacctgcggaatactctacctgctgcacgccactatcatgatcgacgtcaagcttaccaatgaccggaaccaaggagagagcaagggtacctatatgcccatacctcttttcgtcctggggcgattcatccacaggaaactaagcgcctacgattggtttcgggagttctgcgagaacgatatcatttacttgtagccggattctcggaacatttattcaatgcttcaaatttattcaaattgcagtttcacatttttaaatatcgcactttctaaattttgtaagtaattggttgatgtattcataatgaatatgaaatgtatacttttataagcaatacttcaatctgtaatcagtaaagcttttccaattcgttatgtagttaagcgtactttgaacaccatttattttattactttatgcatataagggacaatgaaagtgtcgattacttggccctcgtaattaatttgaatcttccgggtgcaacaatgtaaatcaaaatcggatatctcacggtcggggcactcgaccgtgcaattcttactggttaatgttcgcattactgaacaattgctatctgcttccgccatgagtgaatccattgaaagggtttttgtggaaacctaaatgccgctttgtatagggcccacttgttgtgtgtgtgcgtgtgtgtgtgccaaggtatggcacaaaaaaggctttaaattttacacttttatggagcggccagcgggtgatatggctatggccgcatacggacggggtcgggtcatatgtcctgccgttgatatcggcttaactttgccataaaactgtcagcgtcatgccttttgcggggtcgggttgctggacaaatgaaataaattttacagccaaatggacagggcagccaaacaaaaagtccaatgcatggagacccagagatttgtgtgcgtgtagtagaacggaaaggaaaatctaatgcggacaacaaaagcacctgtgacctggaaaatgtcctgccggccgcactgagtttatgtccgtgaccgtagactcctggattcgtgattctgaattccggctggctctacgggtgcactgtcaacagctggacgggcctttaagctgcttttgggccactttaagccagacatggcaaatatttgctcaaagcattgcggctcccgaaggcaggaggatgttcatcaattaagtgtcatcaatcattggcgcatggatcaaaatcagcgactacggcgacgggcaaacatgtcacggtacaaaatattgtttaacctagaatgccagcaccacaaaacctatttacttcggtaatgtgaaattgccgtttcggaaaatcagaacctcatcccccatcgcccatcacccatccgccatccctcattttacttaaccatttggaacacctaaacacacaaagctaatgcattttcgggggaaggtctgcagtggcaccttcaaaggcatatcaatttccattggtgacccactgaaatccatcgcggctataaaactgtaaaccgctaaactttgaaaagttttagccttgctttatgggactgagctcaaatcaggcggaaactcaaacacttggttctcgaaacgacttgtgaaacaatgctccattaatggcgcccagtggtcgaggatgccgcccgccaatcttcttctccaatccacatccaattcgaaatcaatgtcgagcggttgcagttatgattattgcagttgtcaaaagttttcagaggattggtgctgctcgatgataatgggctgggcaaacagagaggaaaggtttatgcaaatgccggcagggcttttatacactggcaaacagacagcgatggctcgctaaaaaatgcttatgacttgtgtaaacaatttggccacgcagtccttgctcctcgcatatccttttacgtgtaggtatgtccgaccccattcgcaggactttgctgctgctgctgctcctgctccagttccagttaggaaagaccgaaggaatatctccagatctagatctggtgtgtaaaaatattttatggactttggcatttggctggggaaaagttactttgcccgataagcgagcatgtgtgtgacttccgtttgtccttgcatgtccttccttggcgagaagcacacacacatttttatgcattttcttagcggccatttttatgcccgcacacgttttccattagacatcaacaggactgtcatttccctattttccccagcgttttccacgcctgagcccccagtctcagcatgggtgaaagtcgcagtgcgcggcacgggattttggaaaagcttgagacttgagacctgtcactcccgctcccgctaattgaaaactgggtcaattgccgggtagcacattaatcaaattcagaagcccgcctcgctttgcattcgtcattaaagcaattatcatgttgggacaattactctttgttagaatcgaagtgaaacttcaagctgcgaaacttcaaactgcgaatcggctgacttaaaactgcgccaaggtggcattaatcttcataagagtgacaagttcattagaatagcaaacacggcattcatttcctactcactgtggccccaactccggaaaattttaccccttgatgggccgctaattgagaatgtaagttaagctcatgctgagcatccagttcaataggttgtttataatgaacgaaaaaatggataactctatttagggaaatatttacatattttaaggtaaggcccttggccctttctggtatgagatcataacgatttaattgcaatcgtacaaagtgttaccttatcccttacggtcacgacttttatttatgttgttaagcataagcataaagagtgagtaaaaataataccgtatccctttattcctcccactaaatcccgcctattttccaccgtggcttgcataattccgcggatataattttttagcgaggcgctggagcgcgacgcgtataatgcgcataatttctatgccacgttggtcacccgaaaagtaaatgtagacacagccatgtccttcggagatgggcagccaccgaggtcgacctttgtgccagcatcccccactactaacacaactacgccaacaacaacagcgaaggcttttggcactggttttccgaaaggggggggggggggaagtggcaatggtggggggcttttcaactgggagctgggcccatgaacaaaagaggtacatgcgaaaaataaaacctattaccggaatcataattatcttttatggccgcgtctgtcatgacgacattatggcgtggtctgctcctggtccccatcccctctggcttatcccatcaccctctcttcctcagtacagtgaaagaaatcacataaaaccttcgattaatgattttcaaattatgcaaacaaggggaactacgtgtttcgttacgaatcaaatggactggttgactctttatatagtgatgtatatttctgtgaagggaattatgagtcctgctaactgattttccagtgcagtgtactgtatcttgttctctgtcgctctctccgcacgtagcaataaaaaaccgcgaaatgcggccaagtagcggcagaaaaaagtaacataaattactcgcaaaccccaaagcccattgtggggttaaggaagatggggggccgatgcgtgttcgggggtcccacaaattatgtagtcggaataatattttcattacggccaggaaaacagtttcgattccccctcgcagacatctgtcgccacgtttgcctttggccggctaaaaacaggtgtttcctaatttattggcctggcctgcagacattcatttcccatcccatagtagttaccattcctcctgcgaaatgattattacaactgggatgggggcggaaaacaatgtctgcggctggcagacaaatcaaagtgccaacattgcttgtcatgtgttttttaatttctaatatttcacgcgtcacactaccacaaacggggagtccttgccaccccgcagtaatgctaatgtcctgacagagggctctgccattgttgtgcactttgctgcaaattatgcgagacacgtcgccccagccgcattattcgcagctgaacagatcgaaaaaggccaggactccggaggtctggaggtgtgcccgaggtgcatttcttcgtggagaagatggcggaggaacaggaataagcaaggggagtccgacttataccccaggccaactggcatggccagtctacgtgtgataatcctagcaccgctaaagttttcccaactcaagaaatcagcttataggaacaatatataccactttcgaataccctttcggatgaatttcaagtcacctataaaaatttactctttgtgttgcatagctttatactggccgagaatagatttcagtgttactctagaattttcaaatatagagcacatacctatttccaaccacttttgataccgtgtaatggaagcacagtctgctgcggtggctgttcatttcgcccaaggccaagtgtgtggcattccccttgttaaaaagcgcaaaatgcacgtgctgcctttgtgcgaatcctgctgttgttgctgtaattgctagacgccgtctgttgacaggatacttcaactattgtttgcaggacacccgactcctgtttaattcagcatgaaattggtttgtattatgattttgcagtcgctcgcgccctgggcgcttctgcacaaacacctcagcgagtgtcagcggtcttaaagctttaacaacactcctagatgccaaaaggatccataaaatattttcctatatgggtatttactgcggaaaaagttcgctttgatgctgctttaattaaaaactgcgcgcttcgcgtaactagcacttgattaatttttggttgcacgcaaaagtaaagcgaaaaaatgcaaagcaaaacagagacagaaccgcaaaaagcagcaggaaaaaaggattcaaattaattatgtccgtgctgtgctccggggttccctgtgccggcttccaatccggatttttgaaccggaccggactggaccgcttccactttacgttatcagcgcgtgctccgcatacgaggtggatatggatgtaaaggaaaggagcgaaggcaccgagcccaggacccaattcaggatgaggacattgcatgctgttcgctggcattcatttgggtgaactttgcagcttagtgggcggttggcagtgatattgaatttccgcgaaatgaaatacggacactgaccacgggcagcacggatgttatagtccaaaaatgggcggatcgccgattcagtgtgatttacagaacagggggatatagcacacacaccaaatgttcgaagaaggaggaacttagcactgattgaaagttcgtattcgaaatcggtgcctcataagttgtttaataaaacactgatattaaaacccaaattatatataaacataagtaaattaaaagaactttccgaggttaaagtgcagacacgttttccaaaagatactttaccttttgctgagcaaacacgatttcaacgtttgacacttgataaagtcgcgacatgagtgcaaatcctttcagattccatctgttttccgtgcccacgtagacgtcaaacctgagcacacgcactcacagatacacttaaccacatacagagtcgcagatacaaactcacatacagatgcagacgctcttcatttggcttcgtagacaaaggacacaatgcccgtccccgctgctcaaatattaaacacaatattaataatctcacatgtgcatatgggtgggggtggatgcttggttcacgggtgactttgggtggcttttcgggtgggtgtgtcgacagcagccgccaagagccatcagtcatccactcagccacacacacgcgatttttaccttactggggaataaatacttctagactttgggccgcagactggcgccaggccaaaacaaagagccatcaacaaaagcgagatatgtcccacccccagccttataaatgcttcgatcccattccgaaagcagccaacaatcgctaatgtaaatgtttgtctgctatttgaattttaattacttttcgccgcgctggcaagaactatttgatatccccgccgagctgagccaaaccgaactcacctaaacgtaaactttttaatggaattcctggccagaagaccagaaaaactttccactccccccattcgccgccattcggaacttgagggccaatcggtggaccaggcccaaagccaaagagccaagatcgtaatgcgccttaattgaaataagtccccaaccaattgttagacgcacagccacttaagctcgtcgaagacaaggtggaacttgcagagagaaaaatatagtacaaacatctttgaaactatctttccggaatacttt

SEQ ID NO: 39035 - DNA, 1435 bp, DROSOPHILA
tcgtttatagcgttttgttcggctgctgataagcggcgcaatgaataaactatatttgtattccaccgccgatttactgctcatccaacctggagcagtacgtccggcgctcttcctattctacaccttggagacgattttaaacatgatctgcattggatatcacatcaccggattccagcccctcgagtggaaagggcaggaggtccactacctgtgcctgcttatctttaacgtcttcatggtgatgaacttcttccagagcatcgcgatttgcacgggacgcgtgcccaatgtcttgatggagatatggaaagcatcggtggcagccttcgctttcatcctgatatcctttctcaccatgtgggacgtggagcagcagttctctgtgttcttcgtgagatctagcgagcaggtccggggcgagcacaaagaactgcctcccgttcacccgatcatccggtacaagacggggggcagtgtggtggggcatcatcagcccgaggccctgcgacccgtgctctttctgttctataccctggaaaccatcttcaacatgttctgcatgggatatcacatctcgggctttcaggccatcgaattgcatgtgttcgaatgggatacggtggctattcactacttctatctcatgaccttctacttttttatggtggtgaccctcttgcagagcgtcaatatatgcacaggtaacacacccgccgtcgtcacggagatctggaagtcctcggcggcagccatcgtctttatcctgatatccttgagcacaatgtgggacgcggagcggcagttttacgtgttcttttttgcgagcgagcttggcgataagaattcacatgcatttgtggaagaccgcccaatacacccgatcttccactaccttcgtggtatgtccatctcctcgctgacctgcggaatactctacctgctgcacgccactatcatgatcgacgtcaagcttaccaatgaccggaaccaaggagagagcaagggtatgtccgaccccattcgcaggactttgctgctgctgctgctcctgctccagttccagttaggaaagaccgaaggaatatctccagatctagatctgaatcgaagtgaaacttcaagctgcgaaacttcaaactgcgaatcggctgacttaaaactgcgccaaggtggcattaatcttcataagagtgacaagttcattagaatagcaaacacggcattcatttcctactcactgtggccccaactccggaaaattttaccccttgatgggccgctaattgagaatcgcgtgctccgcatacgaggtggatatggatgtaaaggaaaggagcgaaggcaccgagcccaggacccaattcaggatgaggacattgcatgctgttcgctggcattcatttgggtgaactttgcagcttagaataaa

SEQ ID NO: 39036 - protein, 462 aa, DROSOPHILA
MNKLYLYSTADLLLIQPGAVRPALFLFYTLETILNMICIGYHITGFQPLEWKGQEVHYLCLLIFNVFMVMNFFQSIAICTGRVPNVLMEIWKASVAAFAFILISFLTMWDVEQQFSVFFVRSSEQVRGEHKELPPVHPIIRYKTGGSVVGHHQPEALRPVLFLFYTLETIFNMFCMGYHISGFQAIELHVFEWDTVAIHYFYLMTFYFFMVVTLLQSVNICTGNTPAVVTEIWKSSAAAIVFILISLSTMWDAERQFYVFFFASELGDKNSHAFVEDRPIHPIFHYLRGMSISSLTCGILYLLHATIMIDVKLTNDRNQGESKGMSDPIRRTLLLLLLLLQFQLGKTEGISPDLDLNRSETSSCETSNCESADLKLRQGGINLHKSDKFIRIANTAFISYSLWPQLRKILPLDGPLIENRVLRIRGGYGCKGKERRHRAQDPIQDEDIACCSLAFIWVNFAA

SEQ ID NO: 39037 - DNA, 6429 bp, DROSOPHILA
cagtaacactagtccacgcattgtatggttgcactatatatcctttagggttctaattaatatccttgctgtgtatatgcggtacgttcttgaagatctgcaagtccggcgatgttcgcggcttgtggcgaactgatcttggggccatcttcgagagacattcccagagatgcggagagcaaaccggcggcgagaataaatttcgcatgtgtgatggcgaaactagttgcggtggcctatgatttgaagaaaactgttttattagccagttctgtgcatgttccgatgcggagaagttggcaagaggagcgtacgggtttcttttcggcccggtgtgttttatggcttgttttgcgctgatttactgatgcttatcggcctggcgagctcgtttcgaattcttaattctgaattcgattcgcattcgaatcggattcgaatcgggcattgtctttagctagagttagaccagccaggcatattaatactggctaattggcagttagctgtttgatatttaagactgcagttcgactatttagcagctccggccagcgctgattaacatttcgcatccgactgttgcgacagttcatattggcttgcggtctattgtttatgaattgttatggatgataattcccccgcaggctgccaatttggagcaatgatttgttaatgagccgaccatcataactcacactgttgtgatccgcaatctttgctgatttacggacttcagaggcggcggccagcacacttgttttatggcccagtgtttgagtagcgggcttcctcttaacgacaaacaaacaaacaaacaattatggatggcagcctttgtttgcccagcccattcacaccgtcggatgggcactcccaatgggaaataacgcaataaaaggctgatttttaatcaagtgccaaggtcaactttatttgattccccagctggcaattaatgcacatgtcgcggggatcgggaaaccatgaaaacccatcaggcctcgctgcccacgtcaattgagtcctgtccacgcggctgaatgcgaaattgagatgaataaaaatggaaattagcaaagggaaagtgaatgtcgaccatgcgataccctgtaaagagttcgtctccaaagaaatgactgtgagaatgtgcagttgttggaaagagtaagccatgtaaagaattgatattacttttaacgacgataaaaatatttttgtacgaatattttgtggagaacttatataccccatacagggtatctcgcagcacgttcgactgacaagcgatgacagcttgttttgggatgtggtaagtgcgactgggtcgcaaactgaatcccggcacgcaggcgaaatccaaccacgccgcaacttacacaactggacgcccaggagcacgggacagatggcctggccactgcggtagtcccactcggatgacgagcccccggcgaatcgtgtgcgccagtggagcagcgagccacgtgggacattcacggcgagctctagctgcggaaacaccactgctcctcccattccgggtgcctgcaactgagccgcggggatcggaaattaattagtgacacattagtcatttaattaggccgcgctggataacacgtacgttcaacatgagacgtgccacatgcttcagctccgagctatgctccaacttggtgatgtgctcgtgaccatggcgacgtccggtccagggatctagttctaaaatctcaagtcccaggagacgactaatccttccaagcttcttttgtgccagtttggatagcttcagcgattgatagctaactccttttgtatcctcctcctcatctataagttgcagcaattcattggattccttcggcgtcaatacatcgtgatgcaaaactatatatggatctgaactgacaggctccaatctggagggctggaggagcaaccagggcgaacttccatccaactggcagtggttgaagcggcttcctgttgtgacttgctgttttgctccgcgacaaatctcctcaatgagcagctgctccgtggacttggatatctaggtaaaagaataacatatttttgttattagtctaatatttaatcactctttaataataaatcttactctctgactccttgaattgacactacctgcggctaaaatgtattttgcatctctgattcacccacttacttgtttctttgccttcgacttttggccccttcccttgggcaattccttcttggccatggctttttcaatctttcttttggctttttgaatgccttggttcattggtagcagcagtaggagctcctcggcagttgccagggctcgggaaagctcccctggaaaataaaagaaacgaaattgggaattctgtccgagatgttgcacttaatcctaggccaacctaccagcgcggtattcaatgttgagagttgcctccaggatgtgcacacgtccgctttcccgttccctctgcgattccgtggagttttctgaggcggagggcagcttctctaaagcagattctagccagaacctggccacaggaaagtccgacttgcgagccacttccaggcagtcgccccaggacatggaggagctaaaattatgcaaacaatttttgattgctttggtttttccattttctgggcttcagctcaccccagcttaaatccattcaccacgcccaaggagaggctattcgagtccaattcgtagacggattgcagatgtagcagatgattcagggactcctcgtagtcctcctcgctgggaagggttaactgcctgtcggacaatcgttctccgaacaccatctccagagtggcattcgccttctgctccaatccgggccatacactctcgaacctcttgagaataccaaagacatttaatggattacccatgtactcctccacactatccacttgactgtggatctcctcgatggccgaggtctcccttcggatctcctccagctgacgctccaatcgctcgatataatcacgcaacccatcgatgagctgcgtttcggtgtctagcagagcctgcagttgctcctctcccctggcgaaattagctccagcaacggattccaccagcagaaacagctgaagcagccacaaaacactaaaaaccaccggcatttgcataatcagatgtcttcgggcgttttttcagtcttttcgctcttcactttggtcttggccctcgggtcaatgactagagatattttctatattatgtattagatcgtatttcgaaccgactggagaacgctcgactgaccggcttgaatcgtggggctaaactgaggccaaggcccccatttcccatatatcttaggaaagtggtgagattagttttttagtcattcgattgaactttgtttatctaccaaatgttatttaacctttgtggtgagtataaaatggctactggatatctattggattaatacaagtatttatttgaaaggattacattataattttactgctgtttttatatgtccttcaagtgcaaaaactttccctcatcactgctcaagccacaaggtcgcctgaattcctgggcacccacatggaaccactcattgcaaactaaaagatagaatatctcacatcggaaactaaaacagtttttgctttacttactccactttgatccttgaagaacggggcaaccagcatgcttcgtgcgaaagtccttgtgggtggaactgtgcagattgtaccagattaaaagacttcccttcaccggcggaacagccaatcggaggaagggaaaggctgtggctcctcccagagcaacatcatttagctgaagaaaaagatgatggggtttcagttgagtttgaatttaatggcagaaggcttacgtagaaaagagctgtcaacaggcggttgcccttccagctgaaaacactttgaccatcgtcctgaaaaatgtacagaaaagtgtggaagctctgtcatctcacatactggatgagctcacctccacgaagtcaaagtgcggctcatactgtcccccaattccgtagttgaccagctgcaggggctccgcactttccgtgctcagtccggtgacatcctccaatcgctgtttaatcttggaaagccatggattcgcatcgtaccatagccaggtgttgcgacttatccggacctcacttgtggtagagttctcactttgacccacctttgaacgctccatattacccttgccgtgctccatgatcgtatctatctcgctgtcccacagaacttcgtgaacgtaggcgacataagggtcgacattcaattgctcgattttgaaaggggaaagacgatagtagggaactccctggtggtagagccagcacctcaaattccgctgctcccgcggagattgatggagttctcctcgacaaacttgcgtatatagcttgtagctctccttttgttccttatgaattgggtcagagttttatcataattttagtaaggaatgtattgtacttactttttctgctatctgaggcagttccacttgctttctgggagcaaaacttcgctccctagccaattggccttcgtacaatatcttgttcttgagagcctcctcatgatcaggcttcttatccaatatttcattatttaatttataagctaattttagatttcccaaaccattgaaggcggatgaaaggtgctccagtatctcgacatcgctcacattgggtgatataaaacctaatggtttcccgtgcaatcgttttctggcctccaatagccactcggaaccgtaagagtactccttaatctcgcagagattcttgcctaactcaaaacagtcacttgcactcaacgaggtgcccagtgcgtttttctcgccaggatggagaacgccagaagctaggtggtccgtgtttagttggtacatattctgcagccgaagaagagcgcgggtggctccatgtagatcctcttgggtgggtcctttgaagttgatcttctcgagcgaatcacttaagttgttcttgtaggtctcaaaattactggagtcaaacacaggatcaaatacattgaacttccagtcatgaacgaggcgtttaatggtgatgaaggcattgattggatttccaaagtattcctcgagatcgccacgatcattttgctgctcgtctatctgatctaaaaatcttcgatgcaaaaataaacatttttgtattgattgaaagatattttaatgcttaagatcacctttttaagttctcctgttcttgctgagccctttcaagatattcatcgaacttttctactataaaagcctccacgtcgagtagtctttccagctcacttatagccgagtagtaatctccattgactgggaatacgcagagcaacgataaaataatacttagccggaacattttgactgttcagtgtcccatttaaaactgttctggatttctggattccagatagacaatttcgttgactgtctgcctaccaccatgagtgcagctaaacaaacattgacacagttgggtatttttcggcatttctaatacaaaagtaggggttcccgatcagcatcccataataaaacagagagctacacgcttgagatcaacataaaaggaactaaaacatattattagtaaataagttttcatctttcatctggcttggagaattaagtgaaatcagagcataaaaaattgatttccctcactgaaggcgataaatatagtatattccgagttttatcgatcagtttagcacgagatgccgaagctactcatttcactagccattttgtacttactagttttagttaagagtcatagcaaaccgaaaatattggaaaataactatgctatatctatatacgacatgagtaaacttatcgactatgagcactatctactgaatatcttacagaagtttgcaaatgcattgcagaaaagagtggacacattagaatagtaagtagaaactgtaacttaagagattatttatgagatcttatcactaaagctacttggaaatgactgattacgatcgagagaagaatcttgccgaagatcctattaagcattttcggatcactcgccgcttgcactcggattacgtaaactgggtgtggttcatggaggagcagccatgggggagtaggtaatattagtgcgtagaagtgattcaacattttccgattttctagctcttgttaaggatataattgcgattgctccggaaatgccaacattaaaggacgttgaggaggccattagaggattgagactcattcagtggacttattcactgccaactgccgaaatggccaagggagttcttcaggacatccatcacaagtaacacttaaatacgtttacctttccttttaatcgtaatattattttctaagta

SEQ ID NO: 39038 - DNA, 3021 bp, DROSOPHILA
atgttccggctaagtattattttatcgttgctctgcgtattcccagtcaatggagattactactcggctataagtgagctggaaagactactcgacgtggaggcttttatagtagaaaagttcgatgaatatcttgaaagggctcagcaagaacaggagaacttaaaaagatttttagatcagatagacgagcagcaaaatgatcgtggcgatctcgaggaatactttggaaatccaatcaatgccttcatcaccattaaacgcctcgttcatgactggaagttcaatgtatttgatcctgtgtttgactccagtaattttgagacctacaagaacaacttaagtgattcgctcgagaagatcaacttcaaaggacccacccaagaggatctacatggagccacccgcgctcttcttcggctgcagaatatgtaccaactaaacacggaccacctagcttctggcgttctccatcctggcgagaaaaacgcactgggcacctcgttgagtgcaagtgactgttttgagttaggcaagaatctctgcgagattaaggagtactcttacggttccgagtggctattggaggccagaaaacgattgcacgggaaaccattaggttttatatcacccaatgtgagcgatgtcgagatactggagcacctttcatccgccttcaatggtttgggaaatctaaaattagcttataaattaaataatgaaatattggataagaagcctgatcatgaggaggctctcaagaacaagatattgtacgaaggccaattggctagggagcgaagttttgctcccagaaagcaagtggaactgcctcagatagcagaaaaagaacaaaaggagagctacaagctatatacgcaagtttgtcgaggagaactccatcaatctccgcgggagcagcggaatttgaggtgctggctctaccaccagggagttccctactatcgtctttcccctttcaaaatcgagcaattgaatgtcgacccttatgtcgcctacgttcacgaagttctgtgggacagcgagatagatacgatcatggagcacggcaagggtaatatggagcgttcaaaggtgggtcaaagtgagaactctaccacaagtgaggtccggataagtcgcaacacctggctatggtacgatgcgaatccatggctttccaagattaaacagcgattggaggatgtcaccggactgagcacggaaagtgcggagcccctgcagctggtcaactacggaattgggggacagtatgagccgcactttgacttcgtggaggacgatggtcaaagtgttttcagctggaagggcaaccgcctgttgacagctcttttctacctaaatgatgttgctctgggaggagccacagcctttcccttcctccgattggctgttccgccggtgaagggaagtcttttaatctggtacaatctgcacagttccacccacaaggactttcgcacgaagcatgctggttgccccgttcttcaaggatcaaatgttttgtggctgcttcagctgtttctgctggtggaatccgttgctggagctaatttcgccaggggagaggagcaactgcaggctctgctagacaccgaaacgcagctcatcgatgggttgcgtgattatatcgagcgattggagcgtcagctggaggagatccgaagggagacctcggccatcgaggagatccacagtcaagtggatagtgtggaggagtacatgggtaatccattaaatgtctttggtattctcaagaggttcgagagtgtatggcccggattggagcagaaggcgaatgccactctggagatggtgttcggagaacgattgtccgacaggcagttaacccttcccagcgaggaggactacgaggagtccctgaatcatctgctacatctgcaatccgtctacgaattggactcgaatagcctctccttgggcgtggtgaatggatttaagctgggctcctccatgtcctggggcgactgcctggaagtggctcgcaagtcggactttcctgtggccaggttctggctagaatctgctttagagaagctgccctccgcctcagaaaactccacggaatcgcagagggaacgggaaagcggacgtgtgcacatcctggaggcaactctcaacattgaataccgcgctggggagctttcccgagccctggcaactgccgaggagctcctactgctgctaccaatgaaccaaggcattcaaaaagccaaaagaaagattgaaaaagccatggccaagaaggaattgcccaagggaaggggccaaaagtcgaaggcaaagaaacaaatatccaagtccacggagcagctgctcattgaggagatttgtcgcggagcaaaacagcaagtcacaacaggaagccgcttcaaccactgccagttggatggaagttcgccctggttgctcctccagccctccagattggagcctgtcagttcagatccatatatagttttgcatcacgatgtattgacgccgaaggaatccaatgaattgctgcaacttatagatgaggaggaggatacaaaaggagttagctatcaatcgctgaagctatccaaactggcacaaaagaagcttggaaggattagtcgtctcctgggacttgagattttagaactagatccctggaccggacgtcgccatggtcacgagcacatcaccaagttggagcatagctcggagctgaagcatgtggcacgtctcatgttgaacgcacccggaatgggaggagcagtggtgtttccgcagctagagctcgccgtgaatgtcccacgtggctcgctgctccactggcgcacacgattcgccgggggctcgtcatccgagtgggactaccgcagtggccaggccatctgtcccgtgctcctgggcgtccagttgtctgtcatcgcttgtcagtcgaacgtgctgcgagataccctgtatgggccgcgtggacaggactcaattgacgtgggcagcgaggcctga

SEQ ID NO: 39039 - protein, 1006 aa, DROSOPHILA
MFRLSIILSLLCVFPVNGDYYSAISELERLLDVEAFIVEKFDEYLERAQQEQENLKRFLDQIDEQQNDRGDLEEYFGNPINAFITIKRLVHDWKFNVFDPVFDSSNFETYKNNLSDSLEKINFKGPTQEDLHGATRALLRLQNMYQLNTDHLASGVLHPGEKNALGTSLSASDCFELGKNLCEIKEYSYGSEWLLEARKRLHGKPLGFISPNVSDVEILEHLSSAFNGLGNLKLAYKLNNEILDKKPDHEEALKNKILYEGQLARERSFAPRKQVELPQIAEKEQKESYKLYTQVCRGELHQSPREQRNLRCWLYHQGVPYYRLSPFKIEQLNVDPYVAYVHEVLWDSEIDTIMEHGKGNMERSKVGQSENSTTSEVRISRNTWLWYDANPWLSKIKQRLEDVTGLSTESAEPLQLVNYGIGGQYEPHFDFVEDDGQSVFSWKGNRLLTALFYLNDVALGGATAFPFLRLAVPPVKGSLLIWYNLHSSTHKDFRTKHAGCPVLQGSNVLWLLQLFLLVESVAGANFARGEEQLQALLDTETQLIDGLRDYIERLERQLEEIRRETSAIEEIHSQVDSVEEYMGNPLNVFGILKRFESVWPGLEQKANATLEMVFGERLSDRQLTLPSEEDYEESLNHLLHLQSVYELDSNSLSLGVVNGFKLGSSMSWGDCLEVARKSDFPVARFWLESALEKLPSASENSTESQRERESGRVHILEATLNIEYRAGELSRALATAEELLLLLPMNQGIQKAKRKIEKAMAKKELPKGRGQKSKAKKQISKSTEQLLIEEICRGAKQQVTTGSRFNHCQLDGSSPWLLLQPSRLEPVSSDPYIVLHHDVLTPKESNELLQLIDEEEDTKGVSYQSLKLSKLAQKKLGRISRLLGLEILELDPWTGRRHGHEHITKLEHSSELKHVARLMLNAPGMGGAVVFPQLELAVNVPRGSLLHWRTRFAGGSSSEWDYRSGQAICPVLLGVQLSVIACQSNVLRDTLYGPRGQDSIDVGSEA

SEQ ID NO: 39040 - DNA, 2873 bp, DROSOPHILA
cagtgcacattcaaattcatactttgattatgcgtttcgtttttttttatataattaaaatcctctcccgaatgcactttgcgggcgtggctctggcctgcttttctcctgtccatctggtggagatggcccaagataaaccgcagagcaaaggatgcgatattagtgtgtgcaagatattaacagcatatttgacataacaatatggtgagtgttctgcgaaggcagcagcatcgccaacaggaagcaatttctcatcgtttactagtttttattagcccactcagaccacacgcattcacatccgcccaccaagaagcattcatggcatccttataaggattcttggcttcggccaggacatgccgggcagctcataagacaacataaagtatgacagacattttggcaacactttgcagaccgttagcagccccggctttttaaattgttaatgcggctacttgggggtgtggcgtcctatttccccggaaagacaaaggagctgtcataattcgctgcaaaatattgtcacccaaccagatgcactctcatatggggccaatttgccttggcctggcacttcttggcttcgttttctggcaaggcattagttggccattatacgggctcattcggtccccaaattctcttcacttgcccggaagtacgcgccattctccaatattgcaacggaagcaattaatatgatcgtaacaatgcgagaaatcccagcaacagccgtcttaatggtaatgctcttcatcaagctctcgttatgagttggaagtgcaagagaattgtggagtcaggatgtttatcctttgaagagtacaaatacaagggttacaacaaagttactatcataagaaaaataaaatatttccaaaacgaagtaagctcactcacacatattgtgtttatttttgaattaccccacgtcaagttgcgaaattttttaaatataactcatagtcagtcccaaagccaagttagcgagatgtcctcgcccacagatttcgaccgttccatgctggtggagtacagtgccgcatttatgtactacattgagaagcacaagctgatggaggtgatgagtcgtctcctggccgagatttccgtggcggatggagtgacagatgtgcgaagatggatgggcgagaacataaccaggatcggcgtagagatatacaccaaatcgatggacgcctttcatcggggagtaaggggtgatttctaccagctgcccaggagcttctaccaccgaatagtgctgcacggcaagccaggatctgggcgaaggtccttggcatatgtgctagcccagcgctggaatctgctaatattggatgccgatgtgctggcctatcatagcatcaacaaacaggaccaggatgagccgtccagattgctgcaggaagccattgaaaaggattgtgtctacaaacgttcgcaggcagtgggcaatctcatcgagaacagactcctccaggaggacgcccttcacaggggttggattctgatcaattacccgaacaataagtgcgaggctgaggaactcttcgagggcttcactgtgccaccgaatcgattcgtattcctacaaatcgacgagcgtctggctcgcatgagaatcctgctcaatagctactcgccaggacctcaagctcacgtcagttttgtggaccgccagatggcccagttccggaaaagtgaacctgctctaagctcctacctcagccagcggagagaagtggtctatgtggatgcgtcaccttgtttcgagcaggtcaagtgcgggatcatctcggagctcaccaaaactccctatgtgctgggtaaaaaatacggcgaggcaaatgccaaaatctgaatttgattccagccactctgcatccaaattgagtaacaatgtgttcttggagtcctttctgtgattactctcgttattattattatttgctcaagtgtctgtcgttgtttgtgttattattgccttgcttttttggggtcaggcctatcagacttctgaccgaaacccccattcccatccaacgaaaaaatattgcgacgttttcgtttaggtaaacagtagaagcaaaagagaaacgtgtggctagatatgccgactataggatacccatcaagaacattttccagcgaatacggtataactagttccgcttaatatttctttttcaaccaaaaactggtaaacaaatccccaccaagcaaatcaccatccacgccttgaaaacgctgagtagcaaaaagtgattttctatttgaatttccaccactgaaaaatgtgaacagaaaaacaataaaacgcaggaaaaaatgagaggagaataagagaaaaaacaaatgattttatgaccacaacttaagtgctcaatttttaattgtttgacgatgctgataagacccgtggaggaaagctgccgagggcggggagactttttaatggcacccaaaagttcaatcaaagttttatacattttcattctgcccgaggcatccgggggttcaaattagtcgccagcaggttgatgattattggagtaaatatctttattccttgaggttttccccagtgggccgtaagccggctcacttataattaaaaaaaacgcaccaaatcgttaacagaaaataaatgcattcgccacaatcaggggagcagccaatatagctccttgtattttaagaaacttgcacatcatttaaacatcacggtaatttattttatttgggaaaaaaggtatatttcactatttaatttagtgctcatgcagcgtgggcacaaatcagcgcaccaccttaatgtcgatggtgaagcagcagcgcttctgggagacgggatccttcag

SEQ ID NO: 39041 - DNA, 873 bp, DROSOPHILA
atgtcctcgcccacagatttcgaccgttccatgctggtggagtacagtgccgcatttatgtactacattgagaagcacaagctgatggaggtgatgagtcgtctcctggccgagatttccgtggcggatggagtgacagatgtgcgaagatggatgggcgagaacataaccaggatcggcgtagagatatacaccaaatcgatggacgcctttcatcggggagtaaggggtgatttctaccagctgcccaggagcttctaccaccgaatagtgctgcacggcaagccaggatctgggcgaaggtccttggcatatgtgctagcccagcgctggaatctgctaatattggatgccgatgtgctggcctatcatagcatcaacaaacaggaccaggatgagccgtccagattgctgcaggaagccattgaaaaggattgtgtctacaaacgttcgcaggcagtgggcaatctcatcgagaacagactcctccaggaggacgcccttcacaggggttggattctgatcaattacccgaacaataagtgcgaggctgaggaactcttcgagggcttcactgtgccaccgaatcgattcgtattcctacaaatcgacgagcgtctggctcgcatgagaatcctgctcaatagctactcgccaggacctcaagctcacgtcagttttgtggaccgccagatggcccagttccggaaaagtgaacctgctctaagctcctacctcagccagcggagagaagtggtctatgtggatgcgtcaccttgtttcgagcaggtcaagtgcgggatcatctcggagctcaccaaaactccctatgtgctgggtaaaaaatacggcgaggcaaatgccaaaatctga

SEQ ID NO: 39042 - protein, 290 aa, DROSOPHILA
MSSPTDFDRSMLVEYSAAFMYYIEKHKLMEVMSRLLAEISVADGVTDVRRWMGENITRIGVEIYTKSMDAFHRGVRGDFYQLPRSFYHRIVLHGKPGSGRRSLAYVLAQRWNLLILDADVLAYHSINKQDQDEPSRLLQEAIEKDCVYKRSQAVGNLIENRLLQEDALHRGWILINYPNNKCEAEELFEGFTVPPNRFVFLQIDERLARMRILLNSYSPGPQAHVSFVDRQMAQFRKSEPALSSYLSQRREVVYVDASPCFEQVKCGIISELTKTPYVLGKKYGEANAKI

SEQ ID NO: 39043 - DNA, 15308 bp, DROSOPHILA
acatttcatatttagtaaaacaaatgccaaatctagttcaactatcagtggctgatgggggggacttgtattctatttatttttgttatcaatttccatctaaacgtttctacatgctgacaatatcacgctttaaagttcacgcttagaccttgcaccttggcctgctatacaaaatttttttattcaaaatagcttaacatctattacttttgttatggttaaaataaatattggggaccaaatcaattttgccttggttcatgtctttgctaatatatcatagacacattttacattttactttttatgtaaaataataagcttcgatcatgttgaagtaatttaaattgttaataagtaattaattaaatcaggaaaataaaaatatgcgtgaatattattttttttccatatttccatattttattcttaagaatatagatagaatctagatataattaaactgtataaaattctggacttagaaatcagctttggtcaagtgtccacgcgacatgacttcaagccatcatcaaatgtgcgaatcttggcgagcacaaactgatcgagagagtctgactttggggagcgatttgtttgctggcggatttatgtttgtacttgcgctttttgcttcgcctttcgtgttttcggtttttgccttggcacttggctgtgttctgttgtgaatgtggcttaaacctggtgtttgagccaagtcgtacgcgaccgctctcggagcttttcagcctggcttcttgggcgacttatcagtttctgatcgctgtgggaattcagttaattgtggacgctgtagccaaacggacgcatgcgcggcgctcgagagactttccgagtttttcctgaataaaatcactacgtgtttctggtcgtgaaagtatctttttcagttaggcagtgcactctgcagtggccccacccttcccccctatttctcaagcctcaagtcaaaacagaaacgcgagcaaacacagctgaaaacctatttaaggaccgttccaaaaaccaaggatacatttcaaagacctctttcgatcaagtcagttaaatacagagttttcagagtgtgtgtctgtgtgcgtgtgccagtgtgtgtctttcaagtgtgtgccttaatccattcaatgtaattaaacccaaatcaaaacaaagtatagtaagtccgcgaaacgagcaaatacaaatacttttgaaagagccataaacaaatcgcagtctgcgaaatccgttcaaagctcgcgccaatattgctccaatttgagaaaacggcttagcaacaattgcattgaacagtcgaacacaaaaactgaagcctaaaacagcaacaaccacccgtaaatatagaaagcttaacaatcaaatccaacaacaacgacaacgagggattaaagccactaacagctataaatgtggtgggtgcattattggtaagctcggcgggtttggtaaaaagtaacggttaataatatgccacacagtaaaaaaaaagtgacgaacattacggatttgcaaagatgtgtatttaaattttaacgccaccaaatacgtgacttttggagcatcgagaaaataatatttacactgtaactatttaaaatatttattaaagcacatttaaatgttttataatttctaaaagcaaatgaaaactggtgttgattttattcttcaattttctgaatataattttcgcattattattattagttatttgagagaataattcaaaagtaagctgatatctgaaataacgtatctttttattagtgctacgaaaattttgtctgtgcaggaacaaaatcgcaaagtgtacatatagatcgctatactgccaaatggctaaaattggccaaatccaaagagtttttatgcgcaaacgcgttttttatgtttttaggattttcctcccgctttttgcgaattttttttttgttggttttcgtttgttttgcactcggtttgttactcaaattttttgctgctgagttttaatttttgttacagttttttctgcattttggtagagttttttgtgcttggtctactgccttgctcaacgagcggctttgttattgttattgtttttgttttcgatttggccacaaagtggatttgtcttcatgccgtggaaatctggcggaaaggcggtgggcagagggcggtgggcggtgccggttgggagatatgtcggccagtcgcctcaaggtcacggatgaaagtctatcggtgtgagtcagtcaattggcatgcaagtgcattagtgtttgggttttgaaatcacacaaaaaaaaaaaaaacgacggaaagaccgaatgaaagagcatttgtttcttttgtccggctcgaattcgaattcccgatttttaatggacgggcgtggattaaggcattaatttatttcgcaggcagattcatatctctcattcgcgcgatcgacaaacgagactttaatggtccccatacatacatatgtatgtatgtatgtagctcattagtttagacgccctgcttattccgaacttaccgaaataattaacggttcgcttgtaattgggcgttgatttagtgacccactgtcccagctggccattcggattcaaagtccgaaaaaaaaaaacagaaataaatcgccgtggagtgaattaatttcagatttgtcagattgaaagtacgctgccagctgaatgccaaggaaaagcttgaatatccatccaagggcagtaattgtgtgcaatggattgtttgaaggaaaatttatggcagcaatttagcggcataatttacagtcttattttcaatggacccagtgctgaaacaatacaattcgatcgagattatgattgaatttgtattcaattaatgaaatcataacagggagaccacaacacgtctgtaaaccaaccattccaattgccaaattgcttcaaattagaacacattcgacaaacgaggtgcttggattaataactaaacacaaatgaccgcataaacaaaagagctaaatcttatttgattttattgaccatacgagtaatgaattaatcaattttataacaaatttttacatatactttttattcaaaacgtcggttttcaagtgggaaattcaattagatagatttccactttgaatactttttacttcctgtatgcattcaaagaaaaccaaactcctggcgatcattatttaatgactccatcaagtttttgtgttttatttgcaataaccaagcgaagtacttgcaatcgccattaagtaaacactgatgtcattacgctaagttttcgtagcctcaactcgacccttaatcaatcagatagtcatatcgataatgtctataatctaatggcccccacattctgagccagattgcaaaagtggaagcgttgccaaaccgttcaacatttttgcaacaaaattattattaagagcgtaattgcaccgcaaactgcctgcagtagtcgctgagctttggccaaaacaattaaaggctgcaaaaagttaaattaacaaattatatgctgcggctgagtaaaacgaaaccagcggcaaaacgctgacaaaacgcctcaaagtcgcgcgacctgcgacagataaacaaacaggttgggattgcactgttttggccacatttttagttttggtcacaacaacaatgcgatgacaaatggccaaaaggagtgcggtgtgtggagtgcaataaactcttcgaaattccatggaaacataaacacaaacagaaaacgctccaattagagctcactcgaatgtcttgtgtgactttggcagagttttgggctttgcattgactttgtgattgctttttatacccttgaagagggttgtttcatttgtgccatcgtgaacttgttttgttcaattaaagagcttatttaaatgttctagcttaggtatgcccttttcaaagtattttatttttcttactctttatcgagacaaattgcaaggcagaaatatattaatgctgttgaaaatatagcgcatacgacgtgtggcctctcccttcttttgcctttcggctttgagcctgtccgtccctcaactcaacggaattcaactcaagtcaaccgaactgaactcgaatcaactccacttcgattgttaatgaattgcaaccgtggtgcgacgttttctgagattgcgaatgtttgacaatttgtcacagggtccaacacttgtctcgtccccgtctgaatctcaatctgtttctgtttctggatctgaatcggaatcggaatctgaattcgaatcggagtgaattgcgggtgcgggccacgtttgtccatttgttacacattttcatttgatttcgccttttgtttgttttgtgtcatttgtacgactatgtattgtgtgtgtacttagtggcaatttatttgccattaccttttgcccgcagtgttcacttctggttttaaatcaagtttattaaccggaatctgtcagtcgcccattgtccaccgtcctcacctcgccgatctgcgatctgccagttcctcgggctctcgttttcagggcgtatccataactatcgattagcattctaatttatatactaactgaccgagagtgcgagtgtggcacaaatttagtaacgccaatggccattcacgagtgcgattattccattaagatttcaagaccaagctgcggttgctgcactaccaaagaaggcagattaataattgcagagaataaattgatgcagaattattttggacacatttgatttacaactagttacatcggacatcagtttgattgttctgcaaagtttataatggtccgaacccaactccattgctctatcacaaggcagactataattgcgaatccatcattaaaatatatatattttttatagatcttccaagttaccaacgactagttccaaagcccgaaaacttgtttctatctaaatatattattaccaagaacaaacttaattgcgattatacaagtatattctataggcaaagagtattccaagttcattgatttcccatattcccctgcagtggtttttggccttaacccaagtggtcgcagcagagatacctgctcccagcaaaagccagaactagaacatattccgattccgattcctatgacaagtgggtgcagctttagttatagtagttatagactagttgcaatttagagacgctaaattgtggataatgaatgtgtgaacaaaacggcgaacgtcagaacttttacttttctatgggcttaacaactgacttgaaaggccaaggaacttacagagtaacctaatgatgaacatctgccaacagggcagcaaaaaaaaatgacagagaataaaagaaattaggatgacgtcagagcgaaggctacgaatagagcagaaccgcaccgaacagaataaaatataatagatgccggcttaaatgggaggttctggcatttccatatgactttggctaattaatgacccctcacttggctaagaacgaaacttgaaaactttcgtttttaatgagatgcctgctcgccataaacatatttgttttccccgcagaattcctcagtaattaaatgctgtctggtaaaaaaaaaaaaaacgaactttaaaatatctatagagggccatgagtaattatatggcctgtgaagaaggcttgataagaattagaactggttttcgtctttctctgtctttctttcggcatttgtctagccttagttttttgccaaaaaaaaatatgattttttatgaatttgactttggctggagtttaattacgtggtctccgagtggcggaaatgcctgagaacggttaattaaattatgcctggccaaatcaaactcatcaccgtggatttcagccatcgattgcagcagctccggccaaatctcggtacccacttcaatggtacatgccaattgctggcaacaaaaagctatcaaaataccttgccattaattataaatatgttgaaactgcaacagacgactgagcatctgtctgggctatggatttttggttttgggcttggcttttggctctcgactccgcttttttttctggccagactctgcaacttgttggacgcttcttgaagttgccagttgttagtttgtgtggccaacctgctgccaatacaagttcaatgattcttctacacccaaaaaaaaaagaattcaagccctaaaaagtctttgaacttggtaagtaaacaaagaagcagaaggtggttaaggtgagtaactattaatagttactaattaaattcaaaaataaatatatatatgtgcattttaattcacaacttttcgctaagtgcattgaactaactgcggaatacgccgagaatcttggaactagttgcaagtgcttgcaactctcggcgatttctggtgtgaaatgcaccttgacatttggcttggatttttcccatggcttatcgatcgaacgcaatgaatttgttctcgtcgctcgatttgttatacgtttgccaagtatttttaatgggagataattttggtgccttctttactacctcgctggctaattaccactttttgtcctccctaattgcagccattaaccaaatccccagagacagtggccagaatgatcgcagagcagctggtggtcaaaagaggccccatgattcactgaggagccccaggaaagcgatccccattaagcaccgagaacaaaagaagcattaagcgcttgattaactggtggacaggtggactaaccgaaagcggaatggcacacttttgctggctccttaaattcggtttcttgctgctggtaagtgtcgcattaagttggttggttcacttctttatggccaggtgctcgcagaattccaggtaacttgctcagatttggtcaaataaacgcttaagttcaaggctacgatttggccaccttagctaccaaacaaactagtttacactccattccaagcacttccaaaagtggttagtaattgtctttatggtatgtaattccaaaatagtttgggtgctgttaaaaacaacaaaaaaaaaatatctggcattaactgctagaagctgtgataaattgaaaaaagcatttcaaaagcaaacaataaactgattttcatttcaacacagtcgaaagcaatcaatcaatttatctgatcttcaacttggaaagtttcgtcctccttccccacgacttcgacttcgatttaacaatccaacgaaactgattcaaatggcatcgttcgaaaactttaaactccaattgagacctcatctttatggccagcaattcccaggcacaaaaatgcaattgccaaatgcattcacatggggtgcaccattagcttggccaatgcgttttgaaaaatggtttaatggtgcgatcgcactccatttgtttgccgacttcggttttattagcccaaatcatccataattctgctgactgcttggccagcaaatgcattttggaattaatttttaccacacactcgcgtttctgtctggccggctctttattgactgctcattagacagaccaagttgattgtgagtaatgtggagcggagtaagccaaactaaagccgagtaaactaaataattgcacgcgatttaactgcagtcggtaaccactatactcagagaaaagatggcaattaaatatattttatgtgataaataattaaatattatagatctgcatgtgtgtaatccctataacgattgcaggtgtacttaagataatggtattttaattatttttgttcaaattttatttgcagttattgcataataacatattcctttttagttaacagttatgaaatgttattacctacttagggatttaacactatgaccttttcgtttattacttgggaatacttaaaaattatatttccaattaaatttcatcttgacggtttcatttgcgaagtgagaactgtccgataaaattaattacacatttttttgcgagtgtttgcttgcaactgacgtttggagtgcctctgttttgtggctccaactgttgctctgtttgcggctaaaactcagactctgtcttttggccattcaaaggcgatgactacggcaatttgcaaattatgctcagcggggcagggagtggtgcagcattgtcagtggtgcaactacattctaaacttggattttctagtcgattataagccattattaacccaccgaggcacatccgagtcttgggttacacgagtattcatcaaataaacggttttatttatggctttaagttactcctaaacgatctggggacagcatgggttaatttcccacacgaaatgtgttttcggtctgtgtctctgcggtgtaattaataaatgtatgttattgtgccacagcccaagttgatagctgcaatttggatcgactcgaatgcgaactggagtccgattcttattccgccccaacttgtggcattgagcattgtggccctaatgtgggctgcacttggctgggaggtcgatagaccgataggaacactcaggaaaataaagattgtaaaggaaaatacatcttgattaaatggacttttatttttcccctcagttttcttagtgcataaacctccgctggcattagcttgtaatatattgtgcacacaatgtgttccccagctgacgacagcgggtggtggctaagaccggcgaatgtctgatgtctgctaccagagattagactttggcctggccagtttaggctgggcttgtggggaaaatggacccgctgacacattcacttggccaccgactgttttggctgcaaattgcaacggtggctgctcctttgaaaaccgcccacttctagcacaaaatgcccgcggacaccactcgaaataggcagaaatgccagaaatggggggttacatgactttttccgcattcgataccgtagttcgtggcctgagtcactggcccctctccaaatcctgtttacacaggcacccaagtgtgtatgatcccatatcaatcaaattacttccgaaatttgcataacacaaacatgatttcaatctgtcaacccgtggcgtttgtgtagtgtcaagcgtaaaaactgaaatcacgacgattgtggctaattaaagcatcgggtatcgagtattgggtatcgaatggcagcatcagcggcacttgaaagtcaatcgagtgggccaaatgatcctaataaagagagcgctcattaaggcgtgattattgcttaattgtttgctggctattcatgcgcacacaaggcggatacgtgatattctgaaagttgactttttttgacacttccgctaagttgacagccgtgaaaattgtcgccaaaacgcgacaatcgaatgataaatggtccacttcagcaggcaaagtggaaaagaatgtcgaaacaggattagctacctgataaatcaatcaagattaataattgcttatcacttttgcgctggttgaaggaacccaaacccgattccaaacccgaaaccattacccaattcattcattaaactggagcacgtcactgaccaggcgttttaaataaccccacaatggaaaggaattcgcattgttccagttccagcttggtatttttagaacgtttttttctttgtctttgggcgaaaccaaatagttggcccttttgtaattgtcactcggataattcgctccctgggccgttgatttagtgtcaatgctaactgtcgcttttccattttccattcaacgcccgcggtcggttacttctgcaattttagacataaaaggcaaggcgacccgccggatgactaaccgatctggagatatagtattatagtaactggttggtcagtcagtcggttggttaggctgttcggttggtgggtaactttagcacatgtgcgaaggtgttcgctcaaatctgctctagaaaatgctcggcgacaggcgcccactgcactgccggatgttgttattgttcttgctcaggggaataaacacacacgttaggggaaaaaattgaatttacctataagcagactgaataattatgctattatgttcgcggctgcgatcgatttccattaatattcgattaaattttcgccatttttcattgttttcaatttgcgcctttcgaattcgcgtcaatggatcaaaagtgttggctagtaaatgatctgcctcgttgcaattagcaatgctaatacttatggcgatcgataaatatccataaatatgttttattagctcgctttgatcgtcgggtcgtttggcagggcgagttcgtgccctaagtcttttgtttatgcggtgggtgtgtgtgctgataacaatttatggccgatctttggccatgaatttgcactggagtgttttgaatagtgttatgccaaagatgtggacgtagatagccaaactactaaaccaatttaatggtgcattaaatgtaaattgatggtgtgttttaacgtaatgatcgtgttttattttcctaaatgtaagcattagtcatcgaaagggataaaaccaaaatgcgacctgattcccagaaaaaatggcccctcagttaggttgtgaaattgacttcctcaacagcaaacaagtttataaatcccgagatgagtcaatgaaatgcatgcaaatcggtaggaacataaatatcttaatgacacactgagtgacactttgacctgcatcgtttaactattgattccattttccactcgagcgatcggctgccatttgcccattggacaatcaataattcactactcggactgtttactcgttcgatgggtgttttcgctaccttacgccacccacttgagcacttgcaacgcggttaattattcgccacttgactagggactccacagtaacatgcgccacttcaaacggcgcaccgcagcattcctctgatgtcttaatagaccagccgcattattattcaaatgccaatgagttaaagtccagatctcggtcgcccattgcatgacttttgcatatttgctagcgacgtgaagacataactcagcttatgtggatcgatacgcaaatttataaatagatcgctgagataagctcaatatgtggtcattccccactgcaattggaagaaatatgattaagatttcttttgaaattacccgtttccaagtgtcgatgttctcaccaccgattgcatttaagtaatgtcgagcataactaacactcctttatctttgacatttcagatgttgtccggctgccggacgcgcccagccccctttccaggtggcaggcagagtgagctcatcgcgggcaacgagttcctcaagctgttcctcgatcatgatgaccagcaacgaagtctccacagcggtgaacaggatttcgggggcatggcagaatcaccatcgtcgtccccgcatcctcaccagagagcagccaccggaagaagcctggatctcagcaggaacagctataggaactccctgacatccggaaactcgcagaccgaggatccatccgactccaagcaggtggtgaagctggtgacctcaggaagtaaaatagtgttcctcgaagatgtccctaataaattgaaaggaaagtccagtgacgaggtcaaagtagtggccgttagtgtgagttcctccagcaaaagaggcccttcgagaagcagtgtttctggcgtcacaggaatgggttctgactttgtgaaccggtctcataaaagtgaactttcgattgaggaaacggagcccagattggcggcggagtccatggacagcgatgtggattccttgaacagcgcctccaatatacaaagtgtactggctgctcctttgctggcagcttcctctacgcattcctttttaaaaaaccaaagtgaggtgactgaagaggaaggcggtgtgggaaccgcagctggtgcgggtttaccttttcaaacggtgatataccatgacaccaaacagggaagaggacctcagtcgaggtcaatatcctatagttccatctcccaaaatgtggaggacttgcaaacctggcagcagtcgaaaagtggcattttggcggaggcccagagaaatgtaagtgagagcttgaaacatgcgcactcgtcagaaccagccaagttctactcagtaccatcgaaaatgtacagtgtgccgagtaagttttactcagaaccagctcgggtgtattcagaacccgctaaaatgtatggacagccggagaaggtgtactcagaaccgtcgaaagtctacggacagccctccaagttttattcggagccagcgaaagtgtactcgcaaccctcgaaggtttacggtgaaccggctaagacgtactggccacaaacactgaccacaacggcagcaacaccactgggtagcaccacctcgtcctccccatcctccaccagcacttccgagaaaccgccactggcagccaccacctttgtgccactgcgatccagaccaagacctgcgattgtctcgcgcatcgcttttggcgaggcccagagcacaagcaccacgacagcagccacaccgagcagcacggcagcaacatccagcggcacggcggctacagtggccagcagggtcaccacagtgaagccacctagaagcagcacctcatccagcatcaggccaaccacttggcagcaccattatcacagctacagccaccagccacagccggcccatccaactcgcagagtactcttcaatttggataaattgccttatgatttattgaatgcaccgcagccgcatccattggatccaattttatcgaagcactcaagtccgagccactaccaccagcaacatcagtcgcagcagaagcagccacatctgcagcaacacgaactgcaacagcatcagcaacagccaagtccatgctgggagcaacaacgtcagcattcatcaccgccgcatcaacattctaatcaaaatgccaaaggattgcccaatagaggtgagtccaagtcggagtcgcggatctgaatctggttaaacaaattacactgtgcagcagggcgagtgttgcaatgcataaattaaacagatcaattttctgggcccatcaggtttaatcgtatatcatttataacgacctgcttggctggatgattatgtttcacttagggagtatccagcgattcgtttgcagagtaaagacagccggtatcgattgaggttctattaaagatcattactcattattcattcgtgtgacattactggagtaatttttaggaagtactccaaccagttagttgcccagtgtacttatgacagacagcgacaacgcaggggtttaaccacttgaaccccggccaactaatcttgaacttatcaaacatcatcttttgttgcatctcgccccgcagatctagtcaagtgtgtttccaaatttgcacaccaacatggagcagcggcgtccgcggtggacccatcgccgccatcatcttcggggtcaggcggtggctattcgtacagctccagctcgtcatcctcttcctcctcatcttcggccacctcgtcggcgaagcagcagccgcatctgcagcaccagcagatgcagcacttcaccaccgaacgccccgagctctacactccgacctccgagcagaattacgaaattgaggagtccgttagtgttatgacaaacggacgagcccatggaccgcagggcggtgcaggtggtggtggtggtggtggtggcgttgcaaggagtgctgctgccggcggtggggcagtggggcaaatcacaacgccagccagtccagtgccccaatcgagcaccaccgccagcccaagtcgtggcatcaacagaggacgtggttcggtggtttacaatgcaaatgccaacgattactcggatggcgacgacgatggcgatgcggacggggacgcgggatcagagggccagggaggcaccgacgcggcctccgatgacgaagacaaagtcgcctatgtggtcgagggacgcaactaccgaaagtaccgggtcgaggagaagaccgacgacggcttcatcgtcggcgagtacggagtggtggaccacaacgatggaaacctgtggggagtgcgttacaccgccgactccaccatcaatcgcagtctgatacagaaggcgttgctcacgtttctgaagctcaagtaggggccaaatggtcaggctccactcgggaaagcactcgaagtggagggaaagggaaagtcgccagtatacagggaaatctttggaaagtacagggatgcttaggaaatcactaataaagacagaccgttttgggacttacattttttattgtgaatgtatattactccttaacgaaaaggtctaaatcgttaaaaatattggaattactagaaatattaatgccgtgttaagttaagcgagaactagcaagcaattatatgctaagaaacctatctggctgattaagttttacattttataagttgtaaacgttaatattagttatagaacaaataaaaagcagttatatggcgactttcccaattcatatcggtgatttcccgagtgtcaaaacacaagaaccccgcactttcccactgaagagacagctgcaaaggcattcacatgtgatccaagtcgtattgtagttagcttagacaacctaaacctagatagataaacctagatagatgtaccctagaacttagccactagttgagttcccacgagatcagtgtgtgtgtttagtcagtaaacgaattttgtttaatgtttagttaatgttttaattaatttattgtagttgttggtattgtaattgtaatctcaaatccgagcctaatttattcagccgaccagcacacccgaaattgcgcagaactagcaacttgccataaaatccgagcacctaccagcattaagaacgagcgaaaactatcctaattagagcattaagtgatttgtgtagtgaaataaactaaattccattgagactaaaccacagttgtgcattacccattaatctcgcagcgggcggggatcggaacgaatgtgattgggaaacaggttgtcatgggggcagcagctcctccgatccgcaaagtaaatagccacttaaaattgattaaaaacatgcagcctgcggcgcggcggagggagtcgtttttctggacaatatcattaaaatttaattgatatgaacaagtgacaaagcagcagcaggacagctgacgccaagaattcgcagctcacggggtagtttgcttttatgaccacactgagagaaaaggagagtaag

SEQ ID NO: 39044 - DNA, 2365 bp, DROSOPHILA
gaaaacctatttaaggaccgttccaaaaaccaaggatacaatggcacacttttgctggctccttaaattcggtttcttgctgctgatgttgtccggctgccggacgcgcccagccccctttccaggtggcaggcagagtgagctcatcgcgggcaacgagttcctcaagctgttcctcgatcatgatgaccagcaacgaagtctccacagcggtgaacaggatttcgggggcatggcagaatcaccatcgtcgtccccgcatcctcaccagagagcagccaccggaagaagcctggatctcagcaggaacagctataggaactccctgacatccggaaactcgcagaccgaggatccatccgactccaagcaggtggtgaagctggtgacctcaggaagtaaaatagtgttcctcgaagatgtccctaataaattgaaaggaaagtccagtgacgaggtcaaagtagtggccgttagtgtgagttcctccagcaaaagaggcccttcgagaagcagtgtttctggcgtcacaggaatgggttctgactttgtgaaccggtctcataaaagtgaactttcgattgaggaaacggagcccagattggcggcggagtccatggacagcgatgtggattccttgaacagcgcctccaatatacaaagtgtactggctgctcctttgctggcagcttcctctacgcattcctttttaaaaaaccaaagtgaggtgactgaagaggaaggcggtgtgggaaccgcagctggtgcgggtttaccttttcaaacggtgatataccatgacaccaaacagggaagaggacctcagtcgaggtcaatatcctatagttccatctcccaaaatgtggaggacttgcaaacctggcagcagtcgaaaagtggcattttggcggaggcccagagaaatgtaagtgagagcttgaaacatgcgcactcgtcagaaccagccaagttctactcagtaccatcgaaaatgtacagtgtgccgagtaagttttactcagaaccagctcgggtgtattcagaacccgctaaaatgtatggacagccggagaaggtgtactcagaaccgtcgaaagtctacggacagccctccaagttttattcggagccagcgaaagtgtactcgcaaccctcgaaggtttacggtgaaccggctaagacgtactggccacaaacactgaccacaacggcagcaacaccactgggtagcaccacctcgtcctccccatcctccaccagcacttccgagaaaccgccactggcagccaccacctttgtgccactgcgatccagaccaagacctgcgattgtctcgcgcatcgcttttggcgaggcccagagcacaagcaccacgacagcagccacaccgagcagcacggcagcaacatccagcggcacggcggctacagtggccagcagggtcaccacagtgaagccacctagaagcagcacctcatccagcatcaggccaaccacttggcagcaccattatcacagctacagccaccagccacagccggcccatccaactcgcagagtactcttcaatttggataaattgccttatgatttattgaatgcaccgcagccgcatccattggatccaattttatcgaagcactcaaatctagtcaagtgtgtttccaaatttgcacaccaacatggagcagcggcgtccgcggtggacccatcgccgccatcatcttcggggtcaggcggtggctattcgtacagctccagctcgtcatcctcttcctcctcatcttcggccacctcgtcggcgaagcagcagccgcatctgcagcaccagcagatgcagcacttcaccaccgaacgccccgagctctacactccgacctccgagcagaattacgaaattgaggagtccgttagtgttatgacaaacggacgagcccatggaccgcagggcgtggggcaaatcacaacgccagccagtccagtgccccaatcgagcaccaccgccagcccaagtcgtggcatcaacagaggacgtggttcggtggtttacaatgcaaatgccaacgattactcggatggcgacgacgatggcgatgcggacggggacgcgggatcagagggccagggaggcaccgacgcggcctccgatgacgaagacaaagtcgcctatgtggtcgagggacgcaactaccgaaagtaccgggtcgaggagaagaccgacgacggcttcatcgtcggcgagtacggagtggtggaccacaacgatggaaacctgtggggagtgcgttacaccgccgactccaccatcaatcgcagtctgatacagaaggcgttgctcacgtttctgaagctcaagtagaataaa

SEQ ID NO: 39045 - protein, 757 aa, DROSOPHILA
MLSGCRTRPAPFPGGRQSELIAGNEFLKLFLDHDDQQRSLHSGEQDFGGMAESPSSSPHPHQRAATGRSLDLSRNSYRNSLTSGNSQTEDPSDSKQVVKLVTSGSKIVFLEDVPNKLKGKSSDEVKVVAVSVSSSSKRGPSRSSVSGVTGMGSDFVNRSHKSELSIEETEPRLAAESMDSDVDSLNSASNIQSVLAAPLLAASSTHSFLKNQSEVTEEEGGVGTAAGAGLPFQTVIYHDTKQGRGPQSRSISYSSISQNVEDLQTWQQSKSGILAEAQRNVSESLKHAHSSEPAKFYSVPSKMYSVPSKFYSEPARVYSEPAKMYGQPEKVYSEPSKVYGQPSKFYSEPAKVYSQPSKVYGEPAKTYWPQTLTTTAATPLGSTTSSSPSSTSTSEKPPLAATTFVPLRSRPRPAIVSRIAFGEAQSTSTTTAATPSSTAATSSGTAATVASRVTTVKPPRSSTSSSIRPTTWQHHYHSYSHQPQPAHPTRRVLFNLDKLPYDLLNAPQPHPLDPILSKHSNLVKCVSKFAHQHGAAASAVDPSPPSSSGSGGGYSYSSSSSSSSSSSSATSSAKQQPHLQHQQMQHFTTERPELYTPTSEQNYEIEESVSVMTNGRAHGPQGVGQITTPASPVPQSSTTASPSRGINRGRGSVVYNANANDYSDGDDDGDADGDAGSEGQGGTDAASDDEDKVAYVVEGRNYRKYRVEEKTDDGFIVGEYGVVDHNDGNLWGVRYTADSTINRSLIQKALLTFLKLK

SEQ ID NO: 39046 - DNA, 3223 bp, DROSOPHILA
gagtttggatttttgctttgcctggctttggggtctggcttctgttgaaactgtttagtcaattaagaaaatcaattcggttttgttttttgctacttattgctttttatgatttcttctccgcgtgcctttgtgcacccacttttgcggcaatcgcaatcgattgaattggcttgctcaattgcggattttcgttcggatttgcgaaagaggtaagagtcgagaatttgcctgggatcgaaacaggtgtctcatgggtgtgttgcttccaaagtgttcttaatacgtctatttttatgaacaacacacgtttatgattgactgcgtttatttttaaaaaggtaaacgtcgccagaatttgtcgtgaaatgtggaactcactccaattatggcgatgtgggtgtgacgaatacagaatccaattaaattgatgagtaattaatatatttaattaaagtggcgtattataaacttgaaaacatcattaaattgaaaggttatttgcaattgagttaagtgatataatctttttttttttaagcaaataagccagcaacactccttatcggattcactttggtgacgaattctcctcatgaaatggtagaaaagccgggacaccatacatttagctgagacaagaaccgagactctatacttctttcaaaaaccgatagagaccgccaccgttctcttgatagatacaacagaaaagtatattaaaacactttataaaatatacaactatttatgcttaactgctcctaagcgccaaataactcgtatgttaaaattcgtaaattataaattaaatgcatcaaaatatatccataattttctttcatatcaacaccaaacttccaagataaagtcatttaaataggggcatttaaaataaatggtcttttattacttaaaaatactctgtacaacaagactactctaagtatttataaacgatattttaattaacgattaagtcaggacttagtaatccctctcacacattgatgaccagtgctgtggatcggtatttccttttcggtttgatgatggtcttgggtggtcggttaagatctccacttggaggacgccggcgtgatcgagatcccttcggcggagaagatggtgggtgttcgatgtacttgttgcgcaggtgtccgggccccgaaaagttgggcggataggcctcaaaatcctcgatttcgaggtctggccgcgattcccgctcctgttcctgcgcctgggccttgaagaatttttgcagcttcggattgttcaaaagctgaactttgatggcctcgtcgagcagcttctgctgatcctctaggtaggcctctacttgtttcttggaggcgacgcttttgtagcgatcgtggctttttggtcggggcactggaaccacctcgtagtcatcgtgttcgggctcataaacactatatgagttgctgctggaggcgacggttgcctttggaggtggcactagatggaagggatcggcttccgattcgtattgcactggggtccacttcgatcttttcggaggaggtccaacatcctctccagatccaatatgaacatcggatccataaccggagggcttgtggatatcggatccataaccagatgccttgtatggaatggccgtcacatattttggctgcttctggtagccggaactggacttcttgggcacggttatgggatgctggacgcgaatttgggtgccaatcgtgtattcccgactatcctgaacggaggactctcctgaatattccgcggaattgtagcgttgttcgtcctcttcctcttgctatattttaggggaatattgtattatttcgggcttttagatctttcctattatttgatatcttatttgttaggccaacttaccgatccgtagggtctgtagtggctcttcttgggatactttttgctcagtggccggtgcttgctctcatttgtttgcagatcggcacggaagtaactagcgggtcctattctcactggtcctggcagagagctgggtgcgtgcccagatcctgaacccactgcactgaagtagctcctccgatagtaggatcgtgggggtctcagccccgaggtgaccgtcactaacagcaccgccgcagcaaagaactaaggagatagtatccatttcatgttaattgtgaatctacgattgcggatgcaacagcttacattccagcacactttcattttgggtggcggctttttcggggtgattgcgtcttgtgaaaactctcttcaatggtattaaccaccagcgtggccccaacgaaactgaaagttcggccaacggacgcaacagttttatgctagcttcctcgaacctgctgcaacatgtttcgcaatggcaatcgcaattgaaacctgccaggtgagcagctagtcagtagcagatcgaaatctccgcttcacgcatggacttactactcacaacaacatggagtaaaaaaaaagagtttaccgcgcgcaaagtgaggcattatttgcatttccactaggaaatagagcgccaacttatcggatggggcagggggcataaataaaatgtttctttatggccgtaattacacataacgatggccatttacttcttcgaagttgtaactgtggagggggcttaggttgtggtatgtgacttaataggaaagtaagcaaattagatatgcaaaatgtacgacaatatagttaataggcaaagattgatggcttttttgagtagcgtaatttgacctcaaacttgttaatatacagctaactaaaaggaatgcctttattcgatagtaacaaacttacaattgctaattaataatcataacaatcataatcgaaaatggtaatatatctacgttccattaaatatttaactattacaatcgctcactttacaccaacaattttttaatgtgtatgacgtcgaccggcacgagccacccacccactaaaaagcagaagaaccacctatcctatcgacttttttaaatcagtcttgcggcaaacgggtttccacgagtattacccaataaacgctgcacttttcttctctccgcatttggcccgaagttcaggttcagtcggggccaagtcgagccaggaaatgttagccagctggcgctgctttttggcccctttcgccttttttgccggcacgcttggactactttctatcggccaggatgcgcgatcgaaatgc

SEQ ID NO: 39047 - DNA, 1077 bp, DROSOPHILA
atgaaagtgtgctggaatttctttgctgcggcggtgctgttagtgacggtcacctcggggctgagacccccacgatcctactatcggaggagctacttcagtgcagtgggttcaggatctgggcacgcacccagctctctgccaggaccagtgagaataggacccgctagttacttccgtgccgatctgcaaacaaatgagagcaagcaccggccactgagcaaaaagtatcccaagaagagccactacagaccctacggatcgcaagaggaagaggacgaacaacgctacaattccgcggaatattcaggagagtcctccgttcaggatagtcgggaatacacgattggcacccaaattcgcgtccagcatcccataaccgtgcccaagaagtccagttccggctaccagaagcagccaaaatatgtgacggccattccatacaaggcatctggttatggatccgatatccacaagccctccggttatggatccgatgttcatattggatctggagaggatgttggacctcctccgaaaagatcgaagtggaccccagtgcaatacgaatcggaagccgatcccttccatctagtgccacctccaaaggcaaccgtcgcctccagcagcaactcatatagtgtttatgagcccgaacacgatgactacgaggtggttccagtgccccgaccaaaaagccacgatcgctacaaaagcgtcgcctccaagaaacaagtagaggcctacctagaggatcagcagaagctgctcgacgaggccatcaaagttcagcttttgaacaatccgaagctgcaaaaattcttcaaggcccaggcgcaggaacaggagcgggaatcgcggccagacctcgaaatcgaggattttgaggcctatccgcccaacttttcggggcccggacacctgcgcaacaagtacatcgaacacccaccatcttctccgccgaagggatctcgatcacgccggcgtcctccaagtggagatcttaaccgaccacccaagaccatcatcaaaccgaaaaggaaataccgatccacagcactggtcatcaatgtgtga

SEQ ID NO: 39048 - protein, 358 aa, DROSOPHILA
MKVCWNFFAAAVLLVTVTSGLRPPRSYYRRSYFSAVGSGSGHAPSSLPGPVRIGPASYFRADLQTNESKHRPLSKKYPKKSHYRPYGSQEEEDEQRYNSAEYSGESSVQDSREYTIGTQIRVQHPITVPKKSSSGYQKQPKYVTAIPYKASGYGSDIHKPSGYGSDVHIGSGEDVGPPPKRSKWTPVQYESEADPFHLVPPPKATVASSSNSYSVYEPEHDDYEVVPVPRPKSHDRYKSVASKKQVEAYLEDQQKLLDEAIKVQLLNNPKLQKFFKAQAQEQERESRPDLEIEDFEAYPPNFSGPGHLRNKYIEHPPSSPPKGSRSRRRPPSGDLNRPPKTIIKPKRKYRSTALVINV

SEQ ID NO: 39049 - DNA, 3233 bp, DROSOPHILA
cagccccagccccaaaatgggctggccaggtgagctgcccagagcaacggacttgattgccagactagcaaattgttgggaatttcaaatgagtcgataaagaaaagccgcgcgaaagggtgcctcgaattacattacggtctatgaattacatactagatcgattcataatattgccaaacagattacaggcccatcagtgagcttgaggtatgaataagtttctattcacacaatgcacacaatgaatagctgcgttgtattcatggcaagcctttccaagttcaatgtgcgcctgctttcgattacctcgatataaatatataacaacttgaacttcactctctttcattattagtttgaaaactgaataccaaacgaattgattaagtgcccatgtatatttttctgtgcctatagtaggtttttaaggcttaattgaatatttcccgattcgaaatttatttggttatatatgtattagtttattagcatatctctatcattataattatagatttttctgcgttggctttaaaagctaaattaatacatgatcgtggtgcacaacaacagcatcgccgacaaattagtcaagatcaaggtttgtttatgtatgtatattcaaccgctcgaaaacaacaaaaaagccgactcattcattcgcatgtgggtgaattcagagtttgtatgggatcgtaaaagtaaaaactaaaaaaaggttgagctgctgctgtcgcatcaacttgctgctgatgtggctgttgtgctgcagatgttgttgctgcttctgttgcagtcgctgttggctttcaattagcaatgcagattgttgctgtcgacttactacatagagaaatatttgtaatactatttcatcctaatgattgtcaagcagatattcttgtatgatcttcttcatcgcttcagttatatgtttttgcacttgcatttctcactgtgtagctgcactaatcactgaacacgcgaactggagccctcagtccggcagacccacgctcactctctgccccgctgagctgcgacgcgcctgcgcagtgggcggcgactgcgacgccgtaccgcccaccatcaaagcgtcgccgctgaagcagaggctgctgcgcaggtgtttgcgagggtcagagggcacggggggatcttcgtcgatagtgtgtgtgttacccactccggattgggtctgtggcatttttggaaagattttcctaccattgccgttggcctgataattattattattatttaatggcttgctccgactagtttccataaaagagcgttgatgttgctgctgctgctgctgctggcgacttcctgtcggcatatttggctgctgacggtagcgagtttcgtaggtgggctcctcacgatcctcgcgatcctcccgatcatcgcgatccacccgatcatcgtagtaggcgtactcggcagcctcctcgttgtaggtcacatgctttttgggcagtccgggacttcgggttagttgcaatcttcggactcgactttccagatggtcgtacgggtcctgatcctgtgacgtttgcttcagtatccttttgggcaggggcagtgggcgtggccgccgccactcgggactgtcgttcaggggtttcttggtgaccttgggctccagttccacgctgaaactgcgcacatttcttttgacctgcagcttgggactgttcttggaattcagttccacttcgcgcttgtcattcaagtccatttgtggtctcctggcgttattttgagttaggttatctgcttcgtttacataatcgtagaactggatcttggagctgtaagcctgctggcgacggctgctggtgtcctcagctttgttatccgattcctgcggtctcacttcggttagttttggggttatttctctgcgtagaccccttgccaatgaaggtttatttccaggattagactgcagattatcatagaactgtatggaagaactggcaaactccttgtgaaacattcgccgtgtgtccacttcgtcggatacattctgattggaagtaatcctttccacaggcctctccagctgctggctgtttctcctctttgctcgggtttccaccgcggaatccgctcgggaatcgtctggccagaagaagtgcgactcctggcgattgcacaccttcaccgcctggcgctccaccattttgggcggcaagcccgtgtagaattttccgttcagcatggtcgcccaatcttcgccggattggtggtccactcgactgatcggagactggtccgcaaaccgactgacacaaaaagaatccgtcggaggccggagagcacataaaatggctgagatgttggcgtcgccatcggcgttgtcatttgtcgtaggcgttcagtttcgtttgctcaggtgatcaaccaggccccagactaatttgcgattcttgcgaaaaataactcgagaagtgagtaaaaacgagagtttctgtgtttataaacttttggatactctacgaattggaaatatacagcatttaattatatttccatattcgatttcttcgaaagcaaacagtgcgctgcattcactgcaggcagtttggaaaatgacacacttgttggttttggtttttagcctctcgcaagatttttgaaaatacattatacccttttgcaaattcttcgagtgacttattaacaacaaacacaaacagcatcgaggcaaaaatttatttgctgccagtgcagcgtggacgttggcagcgaagtcgacggcgcagcggcagagacgagtttccatctaaggtcaaaccaaatcgcggcatttttcacttttggaacgaaaagttgattttcgtgagctcagcgttgaccaaatgttttggtttttacttcgcttttggcctgtccgttcggactaaaaagccagaatgccgccaaagttggccgaccaagaataataaacgacaacagatgccaattattgggtgctttaatggcttcaacttcaacgtacttttggccgcaagtgagtgtcacttgaatgatgctcagtatggccgacactgcgtatacgtaacattacatggctgaaagttgagaggagctcaatactctgacacaatgtcgtgaacaatgcactttgaaaaggaaaagcgaaacaccagtaaaacataccagtgtttatttaattaaattaaatttattttctcttgatctttacatggtttgccatt

SEQ ID NO: 39050 - DNA, 1233 bp, DROSOPHILA
atgctgaacggaaaattctacacgggcttgccgcccaaaatggtggagcgccaggcggtgaaggtgtgcaatcgccaggagtcgcacttcttctggccagacgattcccgagcggattccgcggtggaaacccgagcaaagaggagaaacagccagcagctggagaggcctgtggaaaggattacttccaatcagaatgtatccgacgaagtggacacacggcgaatgtttcacaaggagtttgccagttcttccatacagttctatgataatctgcagtctaatcctggaaataaaccttcattggcaaggggtctacgcagagaaataaccccaaaactaaccgaagtgagaccgcaggaatcggataacaaagctgaggacaccagcagccgtcgccagcaggcttacagctccaagatccagttctacgattatgtaaacgaagcagataacctaactcaaaataacgccaggagaccacaaatggacttgaatgacaagcgcgaagtggaactgaattccaagaacagtcccaagctgcaggtcaaaagaaatgtgcgcagtttcagcgtggaactggagcccaaggtcaccaagaaacccctgaacgacagtcccgagtggcggcggccacgcccactgcccctgcccaaaaggatactgaagcaaacgtcacaggatcaggacccgtacgaccatctggaaagtcgagtccgaagattgcaactaacccgaagtcccggactgcccaaaaagcatgtgacctacaacgaggaggctgccgagtacgcctactacgatgatcgggtggatcgcgatgatcgggaggatcgcgaggatcgtgaggagcccacctacgaaactcgctaccgtcagcagccaaatatgccgacaggaagtcgccagcagcagcagcagcagcaacatcaacgctcttttatggaaactagtcggagcaagccattaaataataataataattatcaggccaacggcaatggtaggaaaatctttccaaaaatgccacagacccaatccggagtgggtaacacacacactatcgacgaagatccccccgtgccctctgaccctcgcaaacacctgcgcagcagcctctgcttcagcggcgacgctttgatggtgggcggtacggcgtcgcagtcgccgcccactgcgcaggcgcgtcgcagctcagcggggcagagagtgagcgtgggtctgccggactga

SEQ ID NO: 39051 - protein, 410 aa, DROSOPHILA
MLNGKFYTGLPPKMVERQAVKVCNRQESHFFWPDDSRADSAVETRAKRRNSQQLERPVERITSNQNVSDEVDTRRMFHKEFASSSIQFYDNLQSNPGNKPSLARGLRREITPKLTEVRPQESDNKAEDTSSRRQQAYSSKIQFYDYVNEADNLTQNNARRPQMDLNDKREVELNSKNSPKLQVKRNVRSFSVELEPKVTKKPLNDSPEWRRPRPLPLPKRILKQTSQDQDPYDHLESRVRRLQLTRSPGLPKKHVTYNEEAAEYAYYDDRVDRDDREDREDREEPTYETRYRQQPNMPTGSRQQQQQQQHQRSFMETSRSKPLNNNNNYQANGNGRKIFPKMPQTQSGVGNTHTIDEDPPVPSDPRKHLRSSLCFSGDALMVGGTASQSPPTAQARRSSAGQRVSVGLPD

SEQ ID NO: 39052 - DNA, 3284 bp, DROSOPHILA
aatcggaagcggtacgctacgcaaggcgaaaagcgttgcatatctcaaggcgtccaaacggggagagcttttgctctctctctctctctcttttctccgcctctctccgaactcacacatacattcgcagcgataactgctggtcacgcacagtggttatggcatatctaaaattgctttgtatggtttctatatttaaaaacataaggaaaatagttattgaaattcaaaaaaatacttatttgttttaaaatataactttaaatagatcatttttgtgttgaatccaaagcctgtggatcaacaaggatcagtggagatgtcttggtttatcagttccaaaatactgatgcgctgctttaatcatttaaatatgtataaaatcatacgattggattttagcctgctcgatgcagcttaaatattacttggcttgactaccaaaagtacatattaaggtgtacattaaagcacaacccaaatctagattactccttccatcaaagtaaatcgctgaaatccaaataatccaggcgaaacctattgttgttctttaattgggttaattgcaaccactgcaggccactttgccccgcgaaaaagtgtgccatatgcaacacacacttttgcaccgaaagttggcccataaatttaatttgatttcattgtttgttttaatttacaacgattttttttattggacacttgaaaggggcgaaaaaactttgccatttggccagcggcaaattggaggctaaaaagctgttgctcctgttgattttcctgccgtgtgggatgcactttttaggggcaaataaagaactgcaggaccagcattttaaaccctcctcccaaaattctgcgagtgcgcaattgccagtttaaggtggttcaacgggtgcaatggctggtgatgcaaaaattgcgcgcattttagtccattttttctatgcttcgccaaacaaatgatgggggcaacaggtgtactagtgaaacaaacttattcccctggtggagcttcctctgcgggagcttctgctgcgtgaggatgttcttcagccactgcagggacttcaggcgcagcagtagcctcttgggcaggaggagccacttcaggagcgggagcagtttcgcctggctccccagcagcagcgtcaccctcttcggactcgtcatcttgagctggtggcggtggagcttcatgaacacttcggtctgactccgcatctgagcccccagactcgcctacgccttcctcctccaggtcgtgcaggtcctccttggactcctgctcctcagcctccggttggatttcctcgtagacaataacttccttccacaaaatctcctcgtccacacagactggctcctcgtcatgaggttctacgcgcttattaaggtccagatccgaaataccgggctgagatctttcgaagcctccacaggtgacacaggaagacgatgagagcagcattgaggaatgcggggatgtggtggacaagggtgcactgctgctctgcgttttcttgactcccggctgcgcggcccgcgcacttggcttcggagcataggtcatggtggtctgctgcgatttgtcctggatagccacatccggtcgctgctggcactggttgctgatttccggcatctttggattgctgcgcaccaggtaatcggaaacacgcaccttccagttctcctggctgcagtcggtgttctgcattatgtcgtagatctcctcgagcagcggcttaagcatcggcctgttgcagaagttgttgtggtcgaacatttgatggggctcgtgaatatctgaaaaattcgatatattattttttactttattaatctctgtatcgctacttacagttgggaaaaataaagtttatctcacgagccacgctgtaactgttcttggtgacatggatattgcgttccagatccgatgccgaaccacttaaagtcaaattgtacctagagaacttattattttattttaaaagcaaactcacaaataacaaatcatgatgttgagcagctcctgcacggcgttttccttcgtaactatgaacgcctcggaaacacccttcgaaagcagaatgacctccagcataaaccccttttcatcggcataatcggcatagaactcggcggcagtttctggcgaaaaggcaatccgtcgattaccctgaatctggaagccctcggccagcaactttaagagcaccggacgccgcttgtgcagatagtccggcttaatgataaacagggagttctcaaacatgtcggctagaaaatatatactattccaaggggaattgggaattttcaataatgtgctactatgtcggtttaagttttctgtatgatttataagatcaatgttcgtattttacacagttttgcttgatatcttaaactacacacactgctcaaatgacttcggacacatggggatatcgatacaaagtttgcggctcgtgaatttcgctaatttttatgttgaaattacgataagggtactgcttagtgtaagtgttagtttagttaagtttaacttttttcagccggcgtttgagtgcgtttataaattcagtttcatcacaaattcacctaacaaatttagagccaaaaaccggggtacaaaacgaaaagtaagtaattatgtttcatttacagtaaatcgttatagaatgtaaacagatatatgtaaaggtatatgcatatataaagcgtgggatcgggtcccttctccttcaaatcctccgcgcctggttcgtacatcacaacgcatcacttaggctgttgaagatagtaaattagtaaatgtattgtttgggtccttcaacctatagcttacctgaaattctagcaaaggccagcgaagacttctcgctttcgaaacacttgccaatctcggcgcaaatatgcgactgatcaatatagggtcgtttggccaagttcttaatgctactgccatagatggagatcatctcagagcactgcaacgcaaaggaacttatagatatttataacattcaggattgtaagttacatacgatcttgtagtacttggctggcaagttctcgcatcccaccgatgtcatctgtagggctgtcacttcggatacgttatctttcttctcgcgcaggaagggcaacagagcctgggtgactccatggcacacaccacactccaaaacttcatcggtgacggccacgctgaagcagagctgcagtttctggcacacctgcttgggcggcacatcgctcagcaatttcag

SEQ ID NO: 39053 - DNA, 1173 bp, DROSOPHILA
atgtttgagaactccctgtttatcattaagccggactatctgcacaagcggcgtccggtgctcttaaagttgctggccgagggcttccagattcagggtaatcgacggattgccttttcgccagaaactgccgccgagttctatgccgattatgccgatgaaaaggggtttatgctggaggtcattctgctttcgaagggtgtttccgaggcgttcatagttacgaaggaaaacgccgtgcaggagctgctcaacatcatgatttgttattttggttcggcatcggatctggaacgcaatatccatgtcaccaagaacagttacagcgtggctcgtgagataaactttatttttcccaactatattcacgagccccatcaaatgttcgaccacaacaacttctgcaacaggccgatgcttaagccgctgctcgaggagatctacgacataatgcagaacaccgactgcagccaggagaactggaaggtgcgtgtttccgattacctggtgcgcagcaatccaaagatgccggaaatcagcaaccagtgccagcagcgaccggatgtggctatccaggacaaatcgcagcagaccaccatgacctatgctccgaagccaagtgcgcgggccgcgcagccgggagtcaagaaaacgcagagcagcagtgcacccttgtccaccacatccccgcattcctcaatgctgctctcatcgtcttcctgtgtcacctgtggaggcttcgaaagatctcagcccggtatttcggatctggaccttaataagcgcgtagaacctcatgacgaggagccagtctgtgtggacgaggagattttgtggaaggaagttattgtctacgaggaaatccaaccggaggctgaggagcaggagtccaaggaggacctgcacgacctggaggaggaaggcgtaggcgagtctgggggctcagatgcggagtcagaccgaagtgttcatgaagctccaccgccaccagctcaagatgacgagtccgaagagggtgacgctgctgctggggagccaggcgaaactgctcccgctcctgaagtggctcctcctgcccaagaggctactgctgcgcctgaagtccctgcagtggctgaagaacatcctcacgcagcagaagctcccgcagaggaagctccaccaggggaataa

SEQ ID NO: 39054 - protein, 390 aa, DROSOPHILA
MFENSLFIIKPDYLHKRRPVLLKLLAEGFQIQGNRRIAFSPETAAEFYADYADEKGFMLEVILLSKGVSEAFIVTKENAVQELLNIMICYFGSASDLERNIHVTKNSYSVAREINFIFPNYIHEPHQMFDHNNFCNRPMLKPLLEEIYDIMQNTDCSQENWKVRVSDYLVRSNPKMPEISNQCQQRPDVAIQDKSQQTTMTYAPKPSARAAQPGVKKTQSSSAPLSTTSPHSSMLLSSSSCVTCGGFERSQPGISDLDLNKRVEPHDEEPVCVDEEILWKEVIVYEEIQPEAEEQESKEDLHDLEEEGVGESGGSDAESDRSVHEAPPPPAQDDESEEGDAAAGEPGETAPAPEVAPPAQEATAAPEVPAVAEEHPHAAEAPAEEAPPGE

SEQ ID NO: 39055 - DNA, 4445 bp, DROSOPHILA
gtggccgcaaaaaggaacagattctagtcctaggctggggtcattaacataaacaactctgcaggcgtggatcccgcaaaagcgtacatcccgaaaaaagggcgaaggcagaaggacctctccaaaacaaagaacccgtgtctgaaaagatgcataaatcatgggcgaactgcctggtgccgaaatagaaaccgagaatgcgagaaacgaaagcgaaaacaggggatcacgatgtcagcaaatggcaaaactgtcattttctaaagaatttaattgacagtgcaaagtcataaattatatggcgtatcaaagacggcgaacaggaagcgtatcctgcggcatttgggctaattgtggggatgccccgtgccacttggcaaaacaaagagaggaggtcctggggaaacacgtgtgtgaccgggcgtgcgtgaaagtaaaaacattcctatttggcttgctaataaattaatgatatactcgtcggggcgccgcctccgaaaatctcggcaggaataggggacgattccctgtgacaaacacgttggcgacacgagcacgcgaggcaatttatagccgagaaggacactaatggaaggaccagcagccgtgtgacgaatttaggatgtgtgcgtcctttgccaggacgaggcgtcactgggactggctcaaataaaatgctggccaaatcatttatctttcggccattgtggaagtgcttagccaacactggcagatgtaaacacttcactggatcataagattgcctgaaaccatttaatgtgaaagggagggataccaattaatggacggccatttagggaagcttaggctgctagttagttccagccttaaaaattcagttctatctacattaaatgcttaaagggatttttgttttgacacattacattacattacgttgacaactctgaaattaaatgttctatttcatccgtttacttgatattggttatatttatatcaccaaattatagcagcaatggaaaatcaaaaggatctggttacccagagcacatggcgccgcatcatggagcacctgaccccggtgaaaggatacaaagcggcagagaggagagtcagctggtaccgaggactgtcccaatcccagatggcggcagcaaatgctttgttcgatatcctgagggaaaatatggataagaataccacctctaatgttgcgaagctcatggtgaaactgggactacatccctatccgccgtggaaaactctgcatatggtgatcaaactgagccgaggtaatgatctggccttcctctggttcctcatggaaatgtgctacaaaacacccaatcatggcgagacgtacagtgtcaacgagcagatcatcatgacggctatctttcggttggacctctttcccactctgagggagctggaccgctggctgcccctgccacattcatcgcaatcggatagggataaagcagacgccctaaggcagagaaatcagagattgaagaaggagaaagaggataagcgccagagggatttggacagaaaagcaaagatcgtgaaacctctatctccttactttcaggaacccaatattcccgggaaaattcgaaacgagcgaaaattgctgtcggactatccagacactgcagccacgctatttcacatggatgaggaacccctcgaagcttacctctggtcacgctggtttggaacctacaccttgaacgacgctcatcgtgtgggaaaatccataatctacgaggagattaacaacattttcgagtccttcaaggcagcctctctgccaacccgacacgtggaatccttatgtgcccatcatcagttcattcgggagatggagaagtctctgaaggacaagctggagacgatgaagcggagaaagtgcgaagagcttatcgaagcgaaaaatagactggaggagagaaagcgtaagcgggtgattcaggagctggaagaaatgagtgcctgctacttgaagcggttccaggaaatggctgccagagccagattggcctccaccagtaagcaactctttggcggtagttccgtgaaggcatcttattttgactgtcccgataatgagatcagatgtgatgatttcgatgtagaaaagtgtcagacatttgaggcggaacggttaacgaaaaatcatataggcgatacacccaaaagtgcaagtggtaataatattaggctagcaagcggggcacaggccaaatccaaaacaagatccagatccagatctagatcaaaaagcaggagatcaaggaagcctcaaagtaaagcgcgatccattaaagagcctgaagtattggtagaaactcctgtactccctcccagaacggcaaaggaagattttcgcgatatcacgatcaggttattagaaggagaaaaccccatcttaaaagggtgtccggccttgcaattggaatctccacactgcgccaagtgcctaattttcgacccacaaaagggtttaccccaaaaaccacaaaaaaaacaccggcctagtagcctaatgcagttcctacaaaattgcccctctgaagggaatgaggaggaggattctcacaacgaaatggctgctaatccttccgcccattccgttcaggaacccaagcttttcgatctgggactcttaggaaggaattgcgcgaggttcaactatcgtgagttgtttggctctctgcagaggactcatttggacgacgaacggatgcgtctaaaggaggcctttgtaagagccatcgacgatgatgttcagtacctcagtgcggccttaagtggcgaggaagagggttctctggatgctttggtggaccgagcagccaagagggtgtttgcgcaagatgttaaggcctttcacgaggagctagaaaaaatgcataagcaaaaggcagctaaaaagtataaatccgattctcgtttgaatttcggccaagagttttacgatcccgagaatatccccttgatgaaggagatgctaaggttgggcctcgaaaaggtggcccaggacaaaagatatgtattgcccaccctccccgatgttcactctgtgccctacctcatcgaatggatacgattacgttatggaaaacgctattcctatggggaaaaggaacagattttgaatagagataaactggtaatggatcaaataacatggatgatgcacaccaaccttgcgaagattcctgccctgccgattggagacaactttactgacatgaccaagctgagggagttgaccaagaagttcagggaacgccataccaataagttccttgaagccatcatggaagtggagagggtcttttattcggccatgaaaccccatctctgtaatctagcaactgaggagacctttttggcctacttgcccgcccatttccacgacctgggcttcactgttaataccgtaagctgagtaatggaaatttcctatgaactggccaactagtacataaatatgtctttttccatacaatgtagtttaacttaactccagttgggtaattgcttcttcgcaaatcatcgcatttaattgcgtttgtgaccactttggatcctttatgcagttggaacagtttaaatacgataaaaagcgcaatcgtttataaattgtgtaaataatttaaaggactttaattggttgcatattaagagttgagctatttactttttacttgtttagggttaccgtagggttacctaatacaattaaagttggcttaccactttgtccctgagcggtgaggtgtacacctgttatgcatggttgcatttccgtttccgtggatgggcatgcttttggctaagttgttttcctcgagggacttgcaaatgggctgttctgagcgcacatacccattaaggtaaacctgaacgctggcgggtgaattattaaagccacatctgccttttggcctactgacgaagggttttcgtcgaaatctccgcgtgaaattcatcatgcgagcttctgtgtgcaccggagcgaattgcgttatccgctcggaaaacggcgtaaagtcagcttattaaaatattaattggaagtggaagcgccgataactgaccgacaacaatggcggcagcccttccatttacatgccatttccttctcggtttcgtgtccgtgtccatgctttcctgtgtgtcgtaatgtaagcacggcgctgctttatcgccctcataattacggcataatgaaagcgccagacacggtcaaataaacggcggcagcatccttagctccttagatccttggctcacctgggcagccatacgagaacaaaaacacacgggatgtgggcgacctcgtaaatgcgggcaaacaataaagctgccgacacaaaaatatccgaataacgcgttaaaatgcccagaattcactttggcaactctcgattgcgcatacgcccagt

SEQ ID NO: 39056 - DNA, 1986 bp, DROSOPHILA
atggaaaatcaaaaggatctggttacccagagcacatggcgccgcatcatggagcacctgaccccggtgaaaggatacaaagcggcagagaggagagtcagctggtaccgaggactgtcccaatcccagatggcggcagcaaatgctttgttcgatatcctgagggaaaatatggataagaataccacctctaatgttgcgaagctcatggtgaaactgggactacatccctatccgccgtggaaaactctgcatatggtgatcaaactgagccgaggtaatgatctggccttcctctggttcctcatggaaatgtgctacaaaacacccaatcatggcgagacgtacagtgtcaacgagcagatcatcatgacggctatctttcggttggacctctttcccactctgagggagctggaccgctggctgcccctgccacattcatcgcaatcggatagggataaagcagacgccctaaggcagagaaatcagagattgaagaaggagaaagaggataagcgccagagggatttggacagaaaagcaaagatcgtgaaacctctatctccttactttcaggaacccaatattcccgggaaaattcgaaacgagcgaaaattgctgtcggactatccagacactgcagccacgctatttcacatggatgaggaacccctcgaagcttacctctggtcacgctggtttggaacctacaccttgaacgacgctcatcgtgtgggaaaatccataatctacgaggagattaacaacattttcgagtccttcaaggcagcctctctgccaacccgacacgtggaatccttatgtgcccatcatcagttcattcgggagatggagaagtctctgaaggacaagctggagacgatgaagcggagaaagtgcgaagagcttatcgaagcgaaaaatagactggaggagagaaagcgtaagcgggtgattcaggagctggaagaaatgagtgcctgctacttgaagcggttccaggaaatggctgccagagccagattggcctccaccagtaagcaactctttggcggtagttccgtgaaggcatcttattttgactgtcccgataatgagatcagatggaatgaggaggaggattctcacaacgaaatggctgctaatccttccgcccattccgttcaggaacccaagcttttcgatctgggactcttaggaaggaattgcgcgaggttcaactatcgtgagttgtttggctctctgcagaggactcatttggacgacgaacggatgcgtctaaaggaggcctttgtaagagccatcgacgatgatgttcagtacctcagtgcggccttaagtggcgaggaagagggttctctggatgctttggtggaccgagcagccaagagggtgtttgcgcaagatgttaaggcctttcacgaggagctagaaaaaatgcataagcaaaaggcagctaaaaagtataaatccgattctcgtttgaatttcggccaagagttttacgatcccgagaatatccccttgatgaaggagatgctaaggttgggcctcgaaaaggtggcccaggacaaaagatatgtattgcccaccctccccgatgttcactctgtgccctacctcatcgaatggatacgattacgttatggaaaacgctattcctatggggaaaaggaacagattttgaatagagataaactggtaatggatcaaataacatggatgatgcacaccaaccttgcgaagattcctgccctgccgattggagacaactttactgacatgaccaagctgagggagttgaccaagaagttcagggaacgccataccaataagttccttgaagccatcatggaagtggagagggtcttttattcggccatgaaaccccatctctgtaatctagcaactgaggagacctttttggcctacttgcccgcccatttccacgacctgggcttcactgttaataccgtaagctga

SEQ ID NO: 39057 - protein, 661 aa, DROSOPHILA
MENQKDLVTQSTWRRIMEHLTPVKGYKAAERRVSWYRGLSQSQMAAANALFDILRENMDKNTTSNVAKLMVKLGLHPYPPWKTLHMVIKLSRGNDLAFLWFLMEMCYKTPNHGETYSVNEQIIMTAIFRLDLFPTLRELDRWLPLPHSSQSDRDKADALRQRNQRLKKEKEDKRQRDLDRKAKIVKPLSPYFQEPNIPGKIRNERKLLSDYPDTAATLFHMDEEPLEAYLWSRWFGTYTLNDAHRVGKSIIYEEINNIFESFKAASLPTRHVESLCAHHQFIREMEKSLKDKLETMKRRKCEELIEAKNRLEERKRKRVIQELEEMSACYLKRFQEMAARARLASTSKQLFGGSSVKASYFDCPDNEIRWNEEEDSHNEMAANPSAHSVQEPKLFDLGLLGRNCARFNYRELFGSLQRTHLDDERMRLKEAFVRAIDDDVQYLSAALSGEEEGSLDALVDRAAKRVFAQDVKAFHEELEKMHKQKAAKKYKSDSRLNFGQEFYDPENIPLMKEMLRLGLEKVAQDKRYVLPTLPDVHSVPYLIEWIRLRYGKRYSYGEKEQILNRDKLVMDQITWMMHTNLAKIPALPIGDNFTDMTKLRELTKKFRERHTNKFLEAIMEVERVFYSAMKPHLCNLATEETFLAYLPAHFHDLGFTVNTVS

SEQ ID NO: 39058 - DNA, 2414 bp, DROSOPHILA
gcccgaccccccaccacccaccactccacacacatgggcaaccttttcgcaaagcttttcctttttggctcgtttatttcctttttattttccgcttttccagctcccccgcccgccaatattttccatttcattttctgcgcggttggcagcgcgtttagctttggctgcatgcctgactgactttcagttatactaaaaatatatacatttatattcgcacacataagctgaacagcaggggaaatgaacaaaaaaaaaaaaaaaaacgaagaactattaggaagcagaggggctttaaatattaaagcgaatactgtgaaatagactagagactaaagactataggttgaaataaaatatttagtttcccgattttaatagtctctcattcacttaaaacagaaagaagctgtgacaaaatatacacaatcctatttgcaacgctcctctctgagtgccctcgggtgtacccttatggttgttatctccaccgcaatagctactgaatccgcagaggagcgagctggtgatccgggaccggggtccggggtctgggaaggacttcgaggactggcaacgcaacccgcagccatttagttttatgtgccccgctcggttgggttattgcacctttgactcgactccacagccatctgaattccacgccaccttcgacttgctccggaggaggtgtcaccctggagggcatgtatccacaaagcatctcgcatgtgagagccatttattattatttgctttcagcaaatgtgagcccgaggctcggccgcaagtatttcctaatcaggttttaactactaataggatttccgaggtggcgaatcgtaatttacatggctttggccggagatacccaaagaattgaattggaatccagagcaaagctgccgctaatgtattgcagattatggtaaatccctcggcacttccttcctgattcccagccccttagtccaaggacctcatgctcacacgtgctctagcactgagtggatccaatggagactccgctcagatccctgaagcgcctgaatcgctcgattctccgctggcgaaggtagcgccttatttcgcaggccgcgttgcaggccaccaggcccagcatgagggccgtgatgagcccggcgaagatcagcaggaaccagtggaagtagcagctcatggtcactggcctttgaagccagccgctccaggatgcggtgcactcctcctggacgcaccttccgcgcacattcctcacacatcccttggcacagcacccgttcgtactgaagcggccacaggatgtcagttcgatcctgggatctgagcagttcaccgccgcatactgcccccaaatccgagggataatttgggccagaaggcagcttagggtcaacagattggccaacatactgcactttttgccacacgtcgaatagcatgaattttgaggattctcaaataaatttaaggctaagtcagtgctgactgcaacatgtattttaataaaactaaagcaaatagttggaaactatctaagtattgtataatttcatttttaatatatatgcaaggttgtaaagttaatatttataattccacttaaaatcggttttatctcactctttatctttatgtttgtttctggtctccaaaaatgccctggctttttctgccctctcccgcgcctcgttggcctcctgttcctgctcctggggatccataggcggaatatactccggcggattctgctcccgggcatttgggatgaagggagcatgtggccaaacggagggcttagcctgcagcagccacagttcgtcaagttggctctgaagatactggaccgccttctgatggcgattggccatgaagtaggcgcagcctatccaaatacaagtgatcaggactacgctggagatgatcagcactttggtgggtatggattccagtgaaaagctccacgattcggatatcgctggctgttgagctgccagtacttcctgcaccagcgaaatagggaaccactttacggcgatcttgtaagtcattgcgcggaatttcttcaactgaagctttggaaatcgtggagctgactttataggctccacttatcgcaaagacgacgggcctttcccagaactattccattgggaggagaactattccaatgggagtctttaaaaaatgttccaaatgattcgaaaataaaacaagacttttgatataaaataaatattatactgcattatattactttcattttaaacaatcgtacttacttagccctagatattaaaagtgtgagattcgtatgtaaagttggttaagtttaaacttctgttattattgctttcggttattattccacagggcttaattattgtggccaaatgggaatggggaatggc

SEQ ID NO: 39059 - DNA, 414 bp, DROSOPHILA
atgttggccaatctgttgaccctaagctgccttctggcccaaattatccctcggatttgggggcagtatgcggcggtgaactgctcagatcccaggatcgaactgacatcctgtggccgcttcagtacgaacgggtgctgtgccaagggatgtgtgaggaatgtgcgcggaaggtgcgtccaggaggagtgcaccgcatcctggagcggctggcttcaaaggccagtgaccatgagctgctacttccactggttcctgctgatcttcgccgggctcatcacggccctcatgctgggcctggtggcctgcaacgcggcctgcgaaataaggcgctaccttcgccagcggagaatcgagcgattcaggcgcttcagggatctgagcggagtctccattggatccactcagtgctag

SEQ ID NO: 39060 - protein, 137 aa, DROSOPHILA
MLANLLTLSCLLAQIIPRIWGQYAAVNCSDPRIELTSCGRFSTNGCCAKGCVRNVRGRCVQEECTASWSGWLQRPVTMSCYFHWFLLIFAGLITALMLGLVACNAACEIRRYLRQRRIERFRRFRDLSGVSIGSTQC

SEQ ID NO: 39061 - DNA, 2432 bp, DROSOPHILA
ggttattgcacctttgactcgactccacagccatctgaattccacgccaccttcgacttgctccggaggaggtgtcaccctggagggcatgtatccacaaagcatctcgcatgtgagagccatttattattatttgctttcagcaaatgtgagcccgaggctcggccgcaagtatttcctaatcaggttttaactactaataggatttccgaggtggcgaatcgtaatttacatggctttggccggagatacccaaagaattgaattggaatccagagcaaagctgccgctaatgtattgcagattatggtaaatccctcggcacttccttcctgattcccagccccttagtccaaggacctcatgctcacacgtgctctagcactgagtggatccaatggagactccgctcagatccctgaagcgcctgaatcgctcgattctccgctggcgaaggtagcgccttatttcgcaggccgcgttgcaggccaccaggcccagcatgagggccgtgatgagcccggcgaagatcagcaggaaccagtggaagtagcagctcatggtcactggcctttgaagccagccgctccaggatgcggtgcactcctcctggacgcaccttccgcgcacattcctcacacatcccttggcacagcacccgttcgtactgaagcggccacaggatgtcagttcgatcctgggatctgagcagttcaccgccgcatactgcccccaaatccgagggataatttgggccagaaggcagcttagggtcaacagattggccaacatactgcactttttgccacacgtcgaatagcatgaattttgaggattctcaaataaatttaaggctaagtcagtgctgactgcaacatgtattttaataaaactaaagcaaatagttggaaactatctaagtattgtataatttcatttttaatatatatgcaaggttgtaaagttaatatttataattccacttaaaatcggttttatctcactctttatctttatgtttgtttctggtctccaaaaatgccctggctttttctgccctctcccgcgcctcgttggcctcctgttcctgctcctggggatccataggcggaatatactccggcggattctgctcccgggcatttgggatgaagggagcatgtggccaaacggagggcttagcctgcagcagccacagttcgtcaagttggctctgaagatactggaccgccttctgatggcgattggccatgaagtaggcgcagcctatccaaatacaagtgatcaggactacgctggagatgatcagcactttggtgggtatggattccagtgaaaagctccacgattcggatatcgctggctgttgagctgccagtacttcctgcaccagcgaaatagggaaccactttacggcgatcttgtaagtcattgcgcggaatttcttcaactgaagctttggaaatcgtggagctgactttataggctccacttatcgcaaagacgacgggcctttcccagaactattccattgggaggagaactattccaatgggagtctttaaaaaatgttccaaatgattcgaaaataaaacaagacttttgatataaaataaatattatactgcattatattactttcattttaaacaatcgtacttacttagccctagatattaaaagtgtgagattcgtatgtaaagttggttaagtttaaacttctgttattattgctttcggttattattccacagggcttaattattgtggccaaatgggaatggggaatggcagccgagtcttgattagaagtgccaaatcagctcgcaattcactcgattcaccgctcaaagagaccgtaaaccaaatcggcataacaaagtgattctaatgtaattcgtgattttgcataattataaagttaataattaaaattgctgcgtgcacaaaccgaaatgaaaacattaaactttaatgatgattttgggccgtacaggtgcattggtcatttggcatttacagggtggatttggcagggggttcaccacctcccatcggcaaataaactaatgcgtaaatattagcaaattccacccgttccccccttccccaccaccagcagaatatccacataaatttgagacacatatgcagtgcgtttgtaataagcaatcaattattattattgaatttcgggcatggtcaggtgcaaagaggcggcggcgggcggtgggcgtggcagctggtcaacgccactaatgcgtctaatgagaatttaagcacacttcaaccctctcgattcgatttgaacccaacccattcggaatttggggaattttgcgtggatttgcacagcacacacagcccccaagtacagttgtgctcttctctcggctccaaatgcaaatgcaaatacaattacattcggaacc

SEQ ID NO: 39062 - DNA, 432 bp, DROSOPHILA
atgacttacaagatcgccgtaaagtggttccctatttcgctggtgcaggaagtactggcagctcaacagccagcgatatccgaatcgtggagcttttcactggaatccatacccaccaaagtgctgatcatctccagcgtagtcctgatcacttgtatttggataggctgcgcctacttcatggccaatcgccatcagaaggcggtccagtatcttcagagccaacttgacgaactgtggctgctgcaggctaagccctccgtttggccacatgctcccttcatcccaaatgcccgggagcagaatccgccggagtatattccgcctatggatccccaggagcaggaacaggaggccaacgaggcgcgggagagggcagaaaaagccagggcatttttggagaccagaaacaaacataaagataaagagtga

SEQ ID NO: 39063 - protein, 143 aa, DROSOPHILA
MTYKIAVKWFPISLVQEVLAAQQPAISESWSFSLESIPTKVLIISSVVLITCIWIGCAYFMANRHQKAVQYLQSQLDELWLLQAKPSVWPHAPFIPNAREQNPPEYIPPMDPQEQEQEANEARERAEKARAFLETRNKHKDKE

SEQ ID NO: 39064 - DNA, 2813 bp, DROSOPHILA
gtgtaaataatttaaaggactttaattggttgcatattaagagttgagctatttactttttacttgtttagggttaccgtagggttacctaatacaattaaagttggcttaccactttgtccctgagcggtgaggtgtacacctgttatgcatggttgcatttccgtttccgtggatgggcatgcttttggctaagttgttttcctcgagggacttgcaaatgggctgttctgagcgcacatacccattaaggtaaacctgaacgctggcgggtgaattattaaagccacatctgccttttggcctactgacgaagggttttcgtcgaaatctccgcgtgaaattcatcatgcgagcttctgtgtgcaccggagcgaattgcgttatccgctcggaaaacggcgtaaagtcagcttattaaaatattaattggaagtggaagcgccgataactgaccgacaacaatggcggcagcccttccatttacatgccatttccttctcggtttcgtgtccgtgtccatgctttcctgtgtgtcgtaatgtaagcacggcgctgctttatcgccctcataattacggcataatgaaagcgccagacacggtcaaataaacggcggcagcatccttagctccttagatccttggctcacctgggcagccatacgagaacaaaaacacacgggatgtgggcgacctcgtaaatgcgggcaaacaataaagctgccgacacaaaaatatccgaataacgcgttaaaatgcccagaattcactttggcaactctcgattgcgcatacgcccagttacctcacacaaaatgccacattctgcaaatgcccattcatttcggcagcggaagatgctgcattcattgttttacgagccataaacattaacaattaggccgggtacccaagccgttatgatttttacagcttgcgttaattagaaaaacacattagcagggctcctagacagctcgtctcggtccattcctgtgttagttgcagtgctcctggacgttggtcctaaaggcgcagaatatgtagtaccctacaccggcgcccagcagaacggccacacagagccacacattgaaggtcatgaagacgagcattagcaaaaaggatatgagcacctgcaggacgtgcaggaaggtctgaaggatgtgcatcccggagcaaaagaccttgagcttggtggttctgccagcgggaggggtattttcctgaacatgatggtgagtgtgctgggtcaagatcagcgaggattgggcctgaggagagctccgtcctggcggctgaagaggcggcatcgatggagaccttgggcggtaggcgtagacctgggttcccgattgttggttggtccttggaggatacgttggctggttgtaattgtagttggcctctctatatcttcttggccgattatactgatcccttccgcccgccaatcgcttcctgtcccaagagaaaagccactccctgaagaatttcagggcctcatagagcacagcaaccatgaaaatcagcaggcaagaaagagtcagtgccatggcggattcagtgcgccagaacttgaagagaatggtctctgaatcgccagtatgaaagaacatcgccatggacatatcgtgggctccaccttcgtgatggccgtgcttagtgtgctctccatggtttccatgatgattcatttcaggtgaatggtgtccttcgtgaccggaactcggtggaacaggctctggggatccatgagaagcgtgatggtggacatggccctctgaagcatcaactccatggtggtccatggtcgaacatcggtggaaaatattggtattgttagtttgtgtatactcgatcgacaatcaagtgacagcttttaaaaagattttaaaaattcaaatacattcattgaagaaactcatttattgatcattcggctttaaaacgtcaggattgagcctcgcccaaccacttccaataaccagagattttctatacccatctgtaaagcgacgagtttcgaccgcagcccaatgccaattcggttgtatcattaacataaatgacaggcgggcagaacatgccacgtgccacgaaatcaatgcagtttccgtccaggactcgttgttttctgcccgggacaagcgagcaaatttgctggcactaatggaatccatttttcacccggcgctcggatgagacgagctgcaccgaaatcctccagcccaaccatgcatattaataaagatttaagcgtcagcagccggcgaaattaagatcgtacactgggagcccggctcgagtactttgaattgctcacgagttggccattaggtggtctaacaccgaatattaatcatacgccgcgttaatttatgggccagtcgctgattgccgaaacaggatttttcagccagacgtgctgcaatctctttcgcttttctgggagtgtaccacttggcgggaaagggaatgcgtaccgattttctttttccctgttaaaatgaagccactagctgtcgctgggaacgcctcgctgaccgcccattaatgcggctcctttgtgcaggagcacattaatcattgcgaattctgcagcagccatcgcagcatggcttgtgtaatttttttcgggtaccttttagtttgtgttttgtttttttgcccacaaaaaacaaagaatccaacgaagcccagcaacaaagtaagtcctgcattaaatgctttgcttttctatggctgctcgagcacttccgttttcacccagaatcacagaccttaattgttgagacggaagaaaggcga

SEQ ID NO: 39065 - DNA, 813 bp, DROSOPHILA
atggaccaccatggagttgatgcttcagagggccatgtccaccatcacgcttctcatggatccccagagcctgttccaccgagttccggtcacgaaggacaccattcacctgaaatgaatcatcatggaaaccatggagagcacactaagcacggccatcacgaaggtggagcccacgatatgtccatggcgatgttctttcatactggcgattcagagaccattctcttcaagttctggcgcactgaatccgccatggcactgactctttcttgcctgctgattttcatggttgctgtgctctatgaggccctgaaattcttcagggagtggcttttctcttgggacaggaagcgattggcgggcggaagggatcagtataatcggccaagaagatatagagaggccaactacaattacaaccagccaacgtatcctccaaggaccaaccaacaatcgggaacccaggtctacgcctaccgcccaaggtctccatcgatgccgcctcttcagccgccaggacggagctctcctcaggcccaatcctcgctgatcttgacccagcacactcaccatcatgttcaggaaaatacccctcccgctggcagaaccaccaagctcaaggtcttttgctccgggatgcacatccttcagaccttcctgcacgtcctgcaggtgctcatatcctttttgctaatgctcgtcttcatgaccttcaatgtgtggctctgtgtggccgttctgctgggcgccggtgtagggtactacatattctgcgcctttaggaccaacgtccaggagcactgcaactaa

SEQ ID NO: 39066 - protein, 270 aa, DROSOPHILA
MDHHGVDASEGHVHHHASHGSPEPVPPSSGHEGHHSPEMNHHGNHGEHTKHGHHEGGAHDMSMAMFFHTGDSETILFKFWRTESAMALTLSCLLIFMVAVLYEALKFFREWLFSWDRKRLAGGRDQYNRPRRYREANYNYNQPTYPPRTNQQSGTQVYAYRPRSPSMPPLQPPGRSSPQAQSSLILTQHTHHHVQENTPPAGRTTKLKVFCSGMHILQTFLHVLQVLISFLLMLVFMTFNVWLCVAVLLGAGVGYYIFCAFRTNVQEHCN

SEQ ID NO: 39067 - DNA, 2582 bp, DROSOPHILA
cgcattttacgatttcggatcgcatcaaatcggattggatcgtgtggagcatagagcaaatctagtgcaaagtggttatgaaaagatcttaccagatcacctgatctcgacttttatttggacttactaaacgtttgatcgatgagaaagggtacagcatttgcatttcactgggtgagccggggatgaacttcgtcttttgtatctgtaagtattttaaacacaaagtgcgatgtatgtaggtcatagtttgtaggaatctagtcttatgaacttttcataacattgtaatttctattaggacatattaatagtttcaggtaaatagtcctcccacttaactgtagttatgtccaccctgggaacccatcgatcacttcccacccccactcccttgcattatcttcattcaccgctgttaacccctaaatccctaatgatcttatcgactcctcattaccaatcgttacccattcaggacctatgcgccccactcccctccccgaagggactccaaatacagctgcaacaagtggcaggtttctaacgatcccgagagtccacccctttggctcgaagtctttgaggtgtcataaatccacatgtggctgtaaagtgttactaatttctgtttctgtttccatttcgatttatgtcccagctctttgccatctctttaagatatcctggagttttgggtatagagggtatgttgtattcgtcctacatttggtggcagttattacaaaaccccattggattattaagttttataattatgtattaataggatccaagatatacatacaatcacttttatttttccctaattataaattcctaatactaggtactcaaaagtcgaaccattgacgtttatatgttgccactagtttctcggcgacagtcgtcacccccgcccccattttcgattccgctctggggccaactaatttcacatgaacatgttaatatttacacgcgtaccgccgcgatttttatgttcgcccccgccgagtactgctgcccccttccgctgccactgcccctgcccctgccccactccaaaatccccaccacccccaagtcacagcaaacgatccaaccaaccaccgtcttcagcttatcgccacgatcgcctcgaaatccgacgattgccgagctcgtcttggggaaccagaccagcgatccccaagatcagtcgcagttagtccgtcaacctcgtcgcgtctctgctatccgtactactcgaaagtcccattcaaaattccccgagatctgcgtgggctccaaatcgtgattcagtgactccagtatttagattgtgaacagcggatgatttagtttaagaggagatttaagacaagtgccgccgaaaatgagtgacagttccagctccaattgctcgaaggatcgtgctaagccggtggaaacgctggttttggcaaactatgccctgaaagccgagcagaagaaggcccaaggacagggtggtcgaaaggaggacgagcgcatcaccactgcggttatgaaggtcctcgagggctacgactggaatctagtccaggcatcagccaagtaagtccttttgaaaagccagacttgtggtttatgcctttcatatgcctgccatgatacaattaaaagggtgttgttaataaggctatttaagggatgtgttaatccaacagcataaaatggttatacagataaccaaattcagaatatatatgtagcattccgatgagcacaacgagtcctccagtggatccgaagccggcgttaagccgagaatgactaaccaaccttcgatgagttcgctgattaacacaatttccaggctcatatgcacatacgtgggttttcttttatttaactggataaacaaacttggcgaaccgcaaagggaaaggaaaatatatgggcgaaagaagggaatacgattgggaattcgccggcatttatgtaaatataaatgaatttacacattcacacatattagacaaacaacaaacgacggcaacaacaaattggccaaaaggcagcaataataggaagaggcaataacaagccaccagatacaaagatacgaaatacaggcctcaataaatgcgacttgcggactggaactaaatgttcgagatgaagacgagacgacgacgacaaatcaattcaggcataaaaagcgaataaatatgtttttagcattaagacgctaactgctaacaaggtggggggatggggatggggatggtggatgggggatgggggatgagggatgggggcaaccccagcggatctcaactcaagcggaccggggaggtgacacttggttccgtattccagagtacatgtagttctgcaggtcgtgggaaagacgggcggccgcagcggctgatctctctgatccctcggattccagattcaccagatcccagatcctcggtagctctatctgtctgtctgtttgaccggcaattagcaaatgtcggggcttccacctccggtctttgagcagggctccattcttatctgagtttgtcagccgccttcagtcgctttgtactcaacggcgcttatca

SEQ ID NO: 39068 - DNA, 528 bp, DROSOPHILA
atgttcgcccccgccgagtactgctgcccccttccgctgccactgcccctgcccctgccccactccaaaatccccaccacccccaagtcacagcaaacgatccaaccaaccaccgtcttcagcttatcgccacgatcgcctcgaaatccgacgattgccgagctcgtcttggggaaccagaccagcgatccccaagatcagtcgcagttagtccgtcaacctcgtcgcgtctctgctatccgtactactcgaaagtcccattcaaaattccccgagatctgcgtgggctccaaatcaggagatttaagacaagtgccgccgaaaatgagtgacagttccagctccaattgctcgaaggatcgtgctaagccggtggaaacgctggttttggcaaactatgccctgaaagccgagcagaagaaggcccaaggacagggtggtcgaaaggaggacgagcgcatcaccactgcggttatgaaggtcctcgagggctacgactggaatctagtccaggcatcagccaagtaa

SEQ ID NO: 39069 - protein, 175 aa, DROSOPHILA
MFAPAEYCCPLPLPLPLPLPHSKIPTTPKSQQTIQPTTVFSLSPRSPRNPTIAELVLGNQTSDPQDQSQLVRQPRRVSAIRTTRKSHSKFPEICVGSKSGDLRQVPPKMSDSSSSNCSKDRAKPVETLVLANYALKAEQKKAQGQGGRKEDERITTAVMKVLEGYDWNLVQASAK

SEQ ID NO: 39070 - DNA, 4084 bp, DROSOPHILA
aaacaaagacatctccattaggttggcgtgttcgagggtttcaagtgcaagtgcaaagttcatgtcctgcgaattcgtttatggtgcacgcgcggcggcattaaagcgttttccgagcaccctcgacttaaatgccgcacaacaaatggttttccgcagacaagactgtgatttgatgactcggtttcggttcgccgatttctgctgctcgagcggggttaagttaacccgatactgattgccggggcttggatgtggccgccacgagggcaggagtcgcccacacacacacacacacacacacaacagacaagtgacatacgacccacctttgtgcgcatagtagagcctaaatttaatatttaatcagcgagggctggcgtttaacaattcaaattgctgcgaattgtatgttctgtgaacttttggcattggcgacattacgaattcatgcggtacgtgccaaagtcacaacgagtccaaatgaatccaaacgattctccgaatatgtttgaactttgcgaatatgttgcgcaaactttgccccataaattatgcactattaaaagctcatgcataaggcatgccccatgtccctgcagcaaaaacagcaaggaccctggaccagaaataataaccgcaacaaagcattacacatggacggcaattaggttcaatttcgatggaaatgcatggcaaagtagtcacttatgtccagttgatgtaataaattgttggccatggagaacatgacattttggaattcgattagtttaaatggcaacgaacgttggttaatccttcaacatgatgtaatttcaattggcagataattcctttgcggtatgcaaattaaattagctatatacagagaagtgcttcacacaacgccagttatttaatgctgtccacacaaagttttcgacttaagcataaacaaagctctgaaaagttggcaaacttgccacaatcaatattgatggaaattcagtttacttggctatttgagcgtcttggcgtagaacttttggtgcttgaatttaattcgcatcacccagctgcaataaatttattcaaaatcatttagtgtggcaatggatagccgccatactcacccaatcaggatgaacgctagcccgtagaaggcggcgctgaggaaattaaatcctccaggattgctggccagggattccttatagatggccgtgtaaagaggggcggcgactggaagtgaaatatgatggatggggggcaggtattcagggaatttcaaggggacttaccaaagggcgcgaacgattgtaggatgttgccgatggcaaacagcttacctgcggtgattacaaaaacatttaagtggcaacaaagtgcattcctcattatttcttaccagtgtcagagggtggaactatattcgatacaattgttcgaaacatgggaccctgaatggaacgaaagattccgaggacaacagataggtacaggtgccatgagagataagcaaatcctctggcaatgttggcggctacttccgaaagcagagacagcaacgccaatgcaacaacggacagtccaaaaaactgagcatatgtgaataaatatatgggtaacattcaatatgattgttcactatacctttctcaaaataagaatacccaaaacagctcccagcatgggaactgattgactgaaagtctcaaaaatagtaaaatcacggactgtgaagtgaaactgttggcgcacaaacaagtaatttaccgtcatgacgccatctgcaagcatatcataaaatgataacaaaaaaaaaaaatctacccagacttaccggcaacaaaaatggagacaaagccggccaaagtaactagccaaataatggtgtgagcattgttttcccttttcttaaagcacgtgctaaacatatccttaacgtgtttaatgctgaacaaaccagccttttcaactttatcctctaaaggcttttctggcgactcatattttgggggatcatcacaattctcggttttctcggcttcagctgatatttcattcgttttgtttttgtgatctaaaactgtgactacgacattcttttctttttcaggtatttcgtcctcctctggagacattcccagactttcgggcaagtagaaaataataaatagtgttgcaataatgactatcaaacaggagagactctgtacaaacgcagaacttgtggcggcataaacaaaactggatagtagcgagccacttgtgagggccacaaagagtatgatctccatgaagatcattctgaaaattgtaaattataaaaagtttggtaatagtgacacctgagctcaggtggcacgcacctgtagggtcgggttttcatgtccgttgtgtccgtgataaagcagaatgcagccacagaaaatacacaccatccgccgagcacagagtgtggcacggctgccaaggtgtaccaccagggattaaccatatagtagctggacagccagcaaatgatagacgagattagggcagaagcggaaaagcctaatgggaaacggcttacttctattgcagcactaaacgaacacatttcgtgagaaactcaccgaccagggagacaatcatcaggggcttgcgtccatactgatccgaccaggatccaacgaataagccacagatggcaggcataatactttcgaagagggtgcgggttaaaaacatgttagccacgtaatcctgaagctccgtctcaattgcctaaaagtcgatggaagcaagtttaataacacacttaagtgttcagtagccacaaacctgtatttctgtggtggtgtttttgctatccaatagcttacaatcggtttcattgtactggaatatcaccgtgcaggcctgataaatcaactgattgcgcatgacagtacctaatgggatgatcgtgatgagggcttatcacaataatctgatgtttcgctcacctgacagcatatgcgaaaatatcagcataaaaagcaccggttctatgtagaacatgttgaacaggcgcccccattccaaagtcttgagttgggaaagtgatgccttctccattatttttattgatattgataatgtttgtttgtttaatttgactcgcttaattcaatcgctttcattgataacagaattatataggcttggtaggttattagcttaagctttgtagctcacttcactggatttaacgatcccaaattattattattattattatgatgatcaggtaacatttttaaatttgtttttcagccttcataattttttttttttttttggcatatatatatatatttatattatttcaatccgacttatcgctctgctggctttgttatttacaccggcaacgagagactatcatttcaagttctatttcatctgagtttcgaacacgaactgaatctgaaaagcttcgttcaggtgcttaaataggttttaaatgatataggcgtgtgtaattattgtaggggatttttccccacatgctagaatagattgatctacgaagcttgtgttcagaatacatatatcgcagggctctaacatcttgtttgttatatgcagtttccgatgcaaccataactttctcaattcctaatacagggctctgcacttaacccttttatgctggaaaacttttcccctacacgcacacacacacacacgagtttcaagaaaagtcttttcctccgaggaaagcgaacaactttgcccgtgtaaatagcaggccaacacttccggcaacatgttggcggtggtacttaaccccttgtcccctttcacccgcttatttcgcgcattttattacatcactatttccccccgcacttgttggggtggtcgcataaaatatgcataaagattttaagcttggaacggagaacatttaccaaaataatttctggaattgttttggggttttaatttggctgttgggaaggggcgtctattaagctgcgtgcggcttttattaaccgtcgaggtgtagtggaaatatttaagagttatttctttttggatttcaattgaaaaactctaagctgccgggttg

SEQ ID NO: 39071 - DNA, 1167 bp, DROSOPHILA
atggagaaggcatcactttcccaactcaagactttggaatgggggcgcctgttcaacatgttctacatagaaccggtgctttttatgctgatattttcgcatatgctgtcaggtactgtcatgcgcaatcagttgatttatcaggcctgcacggtgatattccagtacaatgaaaccgattgtaagctattggatagcaaaaacaccaccacagaaatacaggcaattgagacggagcttcaggattacgtggctaacatgtttttaacccgcaccctcttcgaaagtattatgcctgccatctgtggcttattcgttggatcctggtcggatcagtatggacgcaagcccctgatgattgtctccctggtcggcttttccgcttctgccctaatctcgtctatcatttgctggctgtccagctactatatggttaatccctggtggtacaccttggcagccgtgccacactctgtgctcggcggatggtgtgtattttctgtggctgcattctgctttatcacggacacaacggacatgaaaacccgaccctacagaatgatcttcatggagatcatactctttgtggccctcacaagtggctcgctactatccagttttgtttatgccgccacaagttctgctctgggaatgtctccagaggaggacgaaatacctgaaaaagaaaagaatgtcgtagtcacagttttagatcacaaaaacaaaacgaatgaaatatcagctgaagccgagaaaaccgagaattgtgatgatcccccaaaatatgagtcgccagaaaagcctttagaggataaagttgaaaaggctggtttgttcagcattaaacacgttaaggatatgtttagcacgtgctttaagaaaagggaaaacaatgctcacaccattatttggctagttactttggccggctttgtctccatttttgttgccggtaagctgtttgccatcggcaacatcctacaatcgttcgcgccctttgtcgccgcccctctttacacggccatctataaggaatccctggccagcaatcctggaggatttaatttcctcagcgccgccttctacgggctagcgttcatcctgattggctgggtgatgcgaattaaattcaagcaccaaaagttctacgccaagacgctcaaatag

SEQ ID NO: 39072 - protein, 388 aa, DROSOPHILA
MEKASLSQLKTLEWGRLFNMFYIEPVLFMLIFSHMLSGTVMRNQLIYQACTVIFQYNETDCKLLDSKNTTTEIQAIETELQDYVANMFLTRTLFESIMPAICGLFVGSWSDQYGRKPLMIVSLVGFSASALISSIICWLSSYYMVNPWWYTLAAVPHSVLGGWCVFSVAAFCFITDTTDMKTRPYRMIFMEIILFVALTSGSLLSSFVYAATSSALGMSPEEDEIPEKEKNVVVTVLDHKNKTNEISAEAEKTENCDDPPKYESPEKPLEDKVEKAGLFSIKHVKDMFSTCFKKRENNAHTIIWLVTLAGFVSIFVAGKLFAIGNILQSFAPFVAAPLYTAIYKESLASNPGGFNFLSAAFYGLAFILIGWVMRIKFKHQKFYAKTLK

SEQ ID NO: 39073 - DNA, 2411 bp, DROSOPHILA
aaggaagctctggacacgcttaatatatctatatagaaacttttatgcaaattaccactaggtgaagagccgagcccatgtaaactgagcactcataaagttgatttatgcagccgaatcaagacaaatttgcataattatactggcgtgaacagccaaagagtcgccccaaagtctaagcccgaaaacgagattcacaaatctatcactgggatctggcaaagatcgcgatgatatctcccaggggcttggaccctcgtttgtccagatctggcggcacctcgtgatcgatccaactggactgacaaatgcataaatcacgtgccagtgccgcaaaaaaccgaatccgattttatacaaatcagagaatggagatcggagaacggagaatgtctgcgactggcttcgctgactagttggtagaaattatgtaaatgcatgagactagaccctgaacttgaagcgagtcggcggagcagaagctcggaccccttcagtttgctgctgagttaactggagatcggtcgaaaatttagagtgcgaacctcgaaaacaacgtgttggatacgaatttacggacaatgtacaggacttttgtttgggtaagcttacagccgaaagaaaattgaaatggatacaaatgctattcataaattggactagttcgatttgatttttaaatgtgtttcttgtgtgattcataaaatccgtttaatattcaacttttattttatagtaatgaattttttagtgtaataaatgttcgattccattcaaactcaactgaactcaactagttgccaacctttagagtattgtttttgaaaattttgcaactaatttatttaatttttaagataaggctgtgtgtttattcaaaaccaaggttggcgcataaaagcattaacgttttaaaaggttagacattcggaggcagttatcttgcttatttaaatatattattaattgagtgtaatttgtcttgcagctgttaaccctaatggcagtggcaagtgccgccacctcgggtcgggactacttgccgcgcccccccgccaaagcctatgtctacggcacgcccccgcccagcacgatggctcagttgcgacggataatccaaggtcacctggagcgcttccagctggcggagcaggcccacttttcccgccgcgccaatgtgcagctggggaaatcggaagtgccggcggacagaaaaccgctggcgatgcaattgtgggtggttcgcacgcccgccatttccggcgcggcctcggataacgtcctcgattacgccctgccgcccaacacgcccactccgaaggactacgcgcacaagttcctgcccgagggcaaggatgtggtacccggaagctcttacataccgctgcggttgctggtgataaagcgctgaagctgatatatgaatcttgggcggcggcttgccttttgttgttcgaaaacaagttccggcggaatgccgatacccgacacttaatgcccaaccagtagttggctaattggctttaagcttactggttcctagcgctagtctagcaatagtttagttgtttatgttaaggcccaagttcgctaatctaaattaagccaccacatcccggggtccgtgactaagacttccgaccttatcgcatccaataaatccaaaactaagactcagccacatgccgtcgtaatctatgaaatacattcaccaaaaactaagttgtcatctcatttacataaattagaagtcataaatttgaagtgagcggggaactacttggctcgaaacggttagaagctgaattcaaaaccggttaacgtttatctgtcagctgtaatcaaaagcttaaagcttcgcttgtttggtttagtctttgactaagtttggaaagcaggactaaaagcttttatttgccgaaactaaagctcggaggtatttatttattcacaagtaaaatgacaaaacttggaagttctttggtaatgtaatgaacgccaatatttacattcgggttttattgtatttgaaaagtctgatgaatcattatcttgatgactggcccctaatttacttttcatgttctacgcaaggggtatgataactggttgacatggataccaagattagagcttgcagactttataatcatccaacaaacattatggtgcattgtataccatttatgttatgaatgaaagtggttcagataagttacattttattttatctcacacatctaagtttttgtattgctgcacaggaaaataaatcaagattatccacaatagtttaaaagtcaatttataggtactatgtagaatttatttacattttgttgtactaatggtaacttaacttaggtttttaaatactagtactgtttgttgatgaatggcttaggccttgc

SEQ ID NO: 39074 - DNA, 411 bp, DROSOPHILA
atggcagtggcaagtgccgccacctcgggtcgggactacttgccgcgcccccccgccaaagcctatgtctacggcacgcccccgcccagcacgatggctcagttgcgacggataatccaaggtcacctggagcgcttccagctggcggagcaggcccacttttcccgccgcgccaatgtgcagctggggaaatcggaagtgccggcggacagaaaaccgctggcgatgcaattgtgggtggttcgcacgcccgccatttccggcgcggcctcggataacgtcctcgattacgccctgccgcccaacacgcccactccgaaggactacgcgcacaagttcctgcccgagggcaaggatgtggtacccggaagctcttacataccgctgcggttgctggtgataaagcgctga

SEQ ID NO: 39075 - protein, 136 aa, DROSOPHILA
MAVASAATSGRDYLPRPPAKAYVYGTPPPSTMAQLRRIIQGHLERFQLAEQAHFSRRANVQLGKSEVPADRKPLAMQLWVVRTPAISGAASDNVLDYALPPNTPTPKDYAHKFLPEGKDVVPGSSYIPLRLLVIKR

SEQ ID NO: 39076 - DNA, 4782 bp, DROSOPHILA
cacgcatacccacatacgcaccatagacaatttgcatttgcaattttcactgcaccctctttctcgcttttgactgtcgtttttcgcgactcgctgcgcattgcatttttcacatttttcatttccgtttccgtttgccggctcaaaaagagagaagaataaccctccaaccacgttcccagattttctgcgctttgtgcgtttatcttggccgactgcctcctccgttcaccacccctcccccctctcgactgcttatttgcagattaatttggtcccacactcacctggggagcaatttgtcgcacaatcctttgtcgccccaccgaaagccccccttttccaggcgaaaatgtgccatttccgtccgtgtcaatatgttccaacaatcgcatttccatggaggctgtattcacggattgccaggtcctcttcgctatttaagctaatataggcagaatttctctgtgcaagccacaagtttatctatctttaaagtatcgatttagatcaagtatttcagaggactagaggtcagcttcatcttagactaacctctaattaaatatttccagcaatttgtctctacttaatcttgagaatttcgggggaatctgtatttctatgcccaccaccggaaattgtccttcgtttgcctacgcagctcataatccgaaggaggaggggaacatgtttttttttttttgaggaacaagaaacaaggacgcaacttgctactgctgttgctgatgatgatgatgtttccgctggctgacatttaacgcacatttaactaatttcgttttaaattgttgacaattaagggaaattgccaagacgaatcgagagcaggccctcctggttctgcccccagcgaacaccacgtgccatgtcgcagttaatttgttggcaataagttggagcaccacgcctaattacaacaacacgcacgacatgactgcgaaattttcattaaaatcggcccgtactcgcaagcacaatgccagttgaaatggagtccttggatcagaagccctttcgcttggcggtgggtcgagctgcctggtggatacccaatcccggaagggtagcacgatacccacccatccgcactctggcacccaaccacttacctggaacttccgcggaggatacgcgaaaattgtcatttgccgcagctttaaaggatttgctgcagaacctgtcgttccattgttacagcaaattagtggagtcgggtcggcggatccaggagcggtaggtggtcagccacaaccggatggtcgatggcctttttcaattagcattagccattacccaaatccgctggccacacagacagaaaagttttgatttcattcggatattaagcacattcctcttaatatgaacaaaagcatttctatcgtcttaaatatttttaatatttcatcttcatataacttaaatcatatcttttgtctgtgcacccgcagtttcttttggttcgttttccacataaccgctttgacagtcttaattgcattcctctggggcacctacaccaaggagcaggaggccttggtgaccaccatgtaccatccgatgtatcccatttggaaggtggagttcccggccatatctgtgtgcagcttgaaccgcatctcccaacgtgcggcctggcaatatgcccacaatctgtgggtctaaaccagaatctatatccccaacaatgactttaaatgactacatattattcgcagaagtggcaaagatcccaagcagcgcaatgccagccatttctacgaccaactgaaggcctttatgtacatgtactacgatccatcagatctgatggacatagacaatgcccttcgctttcagagcttcctggacagatttgatacggctaaagaggagctattctttaataccaggaatcgcatgagtgccctcaccccgaactgtagtgatatgtttgtgagctgccgaatcgccggtcgtctgttcgactgcatggataagtttgagacgaccctgaccagtcatggcttctgctgcaccttcaactacgatggaaggtaagagtaagcaggagtaagatatccgactcgaaggaccaccgtgtaataatttgcacaaacacttcgcttaacagatatgtaaataaaagggactttaggcagcgctactttggacccgacatgggattggtcttgactctgaaaacggaccccagtgacaacttttacaagattaatggccacaatgggtttgtggtgggtagtatgtatattatgatatgtccccttctctttacttacagttcttagatctccatttatgagccccacagctatccggaccccttctccggcggagtggccgagcgcgtggccgagaccggctttaacaccttgttgcctgtgagggcaaagattttcgagactctgcccgaggcgcgcagtatgagcccgtcggtggtaagcgcacagtataattaatgtatttgcttttctctcacggaaaccttttgcttaaatccagcgcaagtgtctgtttgagaacgagatgccgtggatcttcgcccgtcattataccttcagtaagtgcatctcggcctgcagggcgcagagtgtggtcagcctgtgcgagtgcgttccatttagcctgccccacagatacatcgatgggagcgagaagaggatctactgcaccctgcagcacctggcttgtctcaagcgttacgagtgtgggttttaagtggagttaatcgcgaattcattgaataaatgtctccctcctcccgcctcctgcgtccagtcaagtggttgaacgtcatcaccagtcgcgagaacgtgacgggtctggagcacgagctgcaggacgccctctactgcccgctctgtctggcctcctgcacggagacgcgctatagtgtccggggagccatgacactgggcctgcccactcccagccagatcaagggtcctgcgtaagtccactggccaaagcggatttcgctgcggtgcaaattgcgactccgttgtgcctccgactcatttgccatgccaggctttcttttcaatttccatatggagccagtatggtgggcccatactctctcctctccagtgctgcccttttagcatgccactttaaagttgaacttaaagaatattttatttgtttgtagaggtctagtttgtatgcaccattattcccataccattattcttaaacttttaaatattacttatggttccaaccacacgggtctttaatattctgccagcactgacaggcttgcctgactccttgccgtcgtaaaagatttccatattgcaggcgaagcaatcccggaccgcgtgccaataacagttacggcccagcatcgagttccggatccgcaaagggcccagtccacagctcatccgcccccgccgagctggccgtggtgcgtatttattttgccgaaacgcacattcaatactttcgccagattattaagagcgcctggtacgagaccttcagtgagtatgctcgttttgaaatctgctcatctcacccacccatttatgtgtgtttccgtgccaggtacaattggcaacatctgcggcattatagccggtttctcgctgattggcatctgcgagctgttgttttttctagccaaacaattatggcaggcatgccgcgcagagctgcgggccgagctcgcccacatccacgtccaaatccgcaatgcgcaggtagcggaaccggaagcggagcggccgatgaagttgtttatactgccgtaattgagcgggatgcatcgttaactttaaagcccactgatttttatgcacatcttttggacctcatgtgtaccctccaagcaactcgagtgcacttactttgcattgccattgtcgcataaaaacaaacagaactcacgtacgattgccaattggcgaggttgccaaaaaggcccagacggtgacattagcgccggttgccggccagttgccacatttcccggctggccagttgcccgaatgggacaggggtcacttgaccatttatgggccgcagattccggagttcagaagaagaatatactacacgaaaaacatttgttaccactgttgagctccagtagaaggttaacttcaaagtatgcaacactcttattgaaagacgcacgatccttggatttatatcgaaaagcaaagttactgcatacttttggacaccagtataagtcaatcaattgatttaatgattcaatgtgcaatatattttctttctgtgcaccacttaccatcaacattatcttttattttgtcgtatgcagagttggcagaaaaaaagggaacacccagaaacaaacaaacttcggtcgcagctggtcgaaatcaatggtgcaaaattgagtataaagtctgcgaaggccactccatcgtttgcgacaattacaatttcaattattcttctcgaattacttttatctgccggagtaatttattgccagctcaaggagaaataagcaaatttctgtttacttatgcagcagggcatatggtttcattggaaaccctctgttgtggatagacaagtgatttggcttcattaaagcctcacctcaatggaatcttccgtgggttatatcatctgccgattctttcgcacaaagcacgctgaaatatcagacagacattcgagccgaatgtatgcaaatttgctagagagattgaaatgattttccatagaatctgttcgccagttgttgactttgccaagcataaaactgcctaaaaa

SEQ ID NO: 39077 - DNA, 1788 bp, DROSOPHILA
atgccagttgaaatggagtccttggatcagaagccctttcgcttggcggtgggtcgagctgcctggtggatacccaatcccggaagggtagcacgatacccacccatccgcactctggcacccaaccacttacctggaacttccgcggaggatacgcgaaaattgtcatttgccgcagctttaaaggatttgctgcagaacctgtcgttccattgttacagcaaattagtggagtcgggtcggcggatccaggagcgtttcttttggttcgttttccacataaccgctttgacagtcttaattgcattcctctggggcacctacaccaaggagcaggaggccttggtgaccaccatgtaccatccgatgtatcccatttggaaggtggagttcccggccatatctgtgtgcagcttgaaccgcatctcccaacgtgcggcctggcaatatgcccacaatctaagtggcaaagatcccaagcagcgcaatgccagccatttctacgaccaactgaaggcctttatgtacatgtactacgatccatcagatctgatggacatagacaatgcccttcgctttcagagcttcctggacagatttgatacggctaaagaggagctattctttaataccaggaatcgcatgagtgccctcaccccgaactgtagtgatatgtttgtgagctgccgaatcgccggtcgtctgttcgactgcatggataagtttgagacgaccctgaccagtcatggcttctgctgcaccttcaactacgatggaagatatgtaaataaaagggactttaggcagcgctactttggacccgacatgggattggtcttgactctgaaaacggaccccagtgacaacttttacaagattaatggccacaatggctatccggaccccttctccggcggagtggccgagcgcgtggccgagaccggctttaacaccttgttgcctgtgagggcaaagattttcgagactctgcccgaggcgcgcagtatgagcccgtcggtgcgcaagtgtctgtttgagaacgagatgccgtggatcttcgcccgtcattataccttcagtaagtgcatctcggcctgcagggcgcagagtgtggtcagcctgtgcgagtgcgttccatttagcctgccccacagatacatcgatgggagcgagaagaggatctactgcaccctgcagcacctggcttgtctcaagcgttacgagttcaagtggttgaacgtcatcaccagtcgcgagaacgtgacgggtctggagcacgagctgcaggacgccctctactgcccgctctgtctggcctcctgcacggagacgcgctatagtgtccggggagccatgacactgggcctgcccactcccagccagatcaagggtcctgcgcgaagcaatcccggaccgcgtgccaataacagttacggcccagcatcgagttccggatccgcaaagggcccagtccacagctcatccgcccccgccgagctggccgtggtgcgtatttattttgccgaaacgcacattcaatactttcgccagattattaagagcgcctggtacgagaccttcagtacaattggcaacatctgcggcattatagccggtttctcgctgattggcatctgcgagctgttgttttttctagccaaacaattatggcaggcatgccgcgcagagctgcgggccgagctcgcccacatccacgtccaaatccgcaatgcgcaggtagcggaaccggaagcggagcggccgatgaagttgtttatactgccgtaa

SEQ ID NO: 39078 - protein, 595 aa, DROSOPHILA
MPVEMESLDQKPFRLAVGRAAWWIPNPGRVARYPPIRTLAPNHLPGTSAEDTRKLSFAAALKDLLQNLSFHCYSKLVESGRRIQERFFWFVFHITALTVLIAFLWGTYTKEQEALVTTMYHPMYPIWKVEFPAISVCSLNRISQRAAWQYAHNLSGKDPKQRNASHFYDQLKAFMYMYYDPSDLMDIDNALRFQSFLDRFDTAKEELFFNTRNRMSALTPNCSDMFVSCRIAGRLFDCMDKFETTLTSHGFCCTFNYDGRYVNKRDFRQRYFGPDMGLVLTLKTDPSDNFYKINGHNGYPDPFSGGVAERVAETGFNTLLPVRAKIFETLPEARSMSPSVRKCLFENEMPWIFARHYTFSKCISACRAQSVVSLCECVPFSLPHRYIDGSEKRIYCTLQHLACLKRYEFKWLNVITSRENVTGLEHELQDALYCPLCLASCTETRYSVRGAMTLGLPTPSQIKGPARSNPGPRANNSYGPASSSGSAKGPVHSSSAPAELAVVRIYFAETHIQYFRQIIKSAWYETFSTIGNICGIIAGFSLIGICELLFFLAKQLWQACRAELRAELAHIHVQIRNAQVAEPEAERPMKLFILP

SEQ ID NO: 39079 - DNA, 4463 bp, DROSOPHILA
tgtgggtggttcgcacgcccgccatttccggcgcggcctcggataacgtcctcgattacgccctgccgcccaacacgcccactccgaaggactacgcgcacaagttcctgcccgagggcaaggatgtggtacccggaagctcttacataccgctgcggttgctggtgataaagcgctgaagctgatatatgaatcttgggcggcggcttgccttttgttgttcgaaaacaagttccggcggaatgccgatacccgacacttaatgcccaaccagtagttggctaattggctttaagcttactggttcctagcgctagtctagcaatagtttagttgtttatgttaaggcccaagttcgctaatctaaattaagccaccacatcccggggtccgtgactaagacttccgaccttatcgcatccaataaatccaaaactaagactcagccacatgccgtcgtaatctatgaaatacattcaccaaaaactaagttgtcatctcatttacataaattagaagtcataaatttgaagtgagcggggaactacttggctcgaaacggttagaagctgaattcaaaaccggttaacgtttatctgtcagctgtaatcaaaagcttaaagcttcgcttgtttggtttagtctttgactaagtttggaaagcaggactaaaagcttttatttgccgaaactaaagctcggaggtatttatttattcacaagtaaaatgacaaaacttggaagttctttggtaatgtaatgaacgccaatatttacattcgggttttattgtatttgaaaagtctgatgaatcattatcttgatgactggcccctaatttacttttcatgttctacgcaaggggtatgataactggttgacatggataccaagattagagcttgcagactttataatcatccaacaaacattatggtgcattgtataccatttatgttatgaatgaaagtggttcagataagttacattttattttatctcacacatctaagtttttgtattgctgcacaggaaaataaatcaagattatccacaatagtttaaaagtcaatttataggtactatgtagaatttatttacattttgttgtactaatggtaacttaacttaggtttttaaatactagtactgtttgttgatgaatggcttaggccttgcaaaatcgagtcagtgggcatttgtatagtttgctgatttctcttcttgctcgaattgcaacagagacccaaccaggcccgctggttctctttgttaaatactataaagtaaaggaataaaacaaatccctgtaaagtggctgtcaggcagaataaataggcgaagatccttccgaaatcgaagtatgtacacaatccaaaaatccatgttattcccaaaagaaagaagagcaacacaaacaggccgagttgcttgaagataaggtcacgtttgaacagggctgtatagacactccaggagatgtatcccaccaatattgcattggccaccgtgataaggccaatagggagtatgacgcccagacttaaaccatatccagaaggatagcagaggatgggatagtccattgaggaattattgggtctgtaggaaccgggctccagaaaaaccaccaacaaggtgggtataagtggcaatgtccaggccgccacagccgacattagtatataatgtcgtgggtgattaactccaatgactctcacatatctttgatactgcagaaatccaatgataaacatccagctgaagacaaccaagagtagatattgcatcacggctccaaccagagtacatcgttccgactcagattgttccagctgctccagcaaatggctttgactcaggatcaggaagaagagcaactgaagacccagggcagcacacagattcagcaatatcttcgtggaggctaatgtccggaagctcttaaacacggctgcagttataaaaatcattaggaggcccaacagagaaagggtcaagccgacattggtgattacatctaaggagtgatcatcttcattggtgtccagacctgcctgcattttgctcactcccagtagaaatgtaaactgggtcagatgatccgcatggcagaggatcactgggtgcgatgaggcttccaagctgccaccaccgctggtggatattccatcgctaagccaggtctcatagttccagtaaccacatcctccctcaaattgagtttcattcgcttttgcattacgcaagaaaaatggcaactttccaggtagcttggtatcttacgaaaagattttagattaaaacatatatgctataattttccctcaacccactcaccattcaatcctggtattgttatggatataacattactagttggccgtcgtttgatttcctcttccgtctccacaaagagtgaatctcgagtatagaccttaaaaactaagtaagaggctccctttctcttcagttgggtccatagtttttcgggaataaagaccgcactttctagattcttcatggcccttatatcttcctcattatccgataggtgaagcatttcgaaatgcgacatattgccaccagagaagttcactatcccactcacatttctcacttctggatctacaaagaatactctgagttcgctcgtctttagaacaatgacacccatatcaaacaagggatggaatgtgaactcagtgctgtttgcaaaaatagtggtgtttaactttaaaattgttggactaagctcatccaaataatcctcgaagttgctaaggagtgcattggttgcattagcgtctgctgaaacacgaagggtttcattatctgtagacataactttttggcatatcttcatcaagtcccctacaactgcagcatttctttccggttttttgaccagcgaatcgaatatctccgaaatactgaagacatcggcggcggccagtttctcctgagtttgagtcaggaggttactcagttggctaatcatgtccggagggctcttcacagcgagaaggtttatactcgagctgagttccggtgccgacctacaggtcacgtgatccaagctctgccaaactctattcccattgcgaatttggcacctccgtcggatgggaattccccgttcgttcaggcatagatcccttagattcgccttttgcccaactctcgttttctccacgcgattgattcgcttttccttgccttcatccgtttcgtattccagttcaaagtcctcggccttgcagaatcctcggttgcagtccttgtagggattgtgcgacagctgaccatctgcatccacgcagaggaggaagcgcaagttcttcaggtggcagtagtccagacaccgggccacattcggctgatccagggcgtacagggggggatttgtacctccagatacgagtattatatagccagcaatccaccagagaaacagcagcatactgctatctatttttaactaatttaagcgcaggctgcgatgtcgcactcccgaagctccgcgatcgactgacgaggcggagataaaatgcgagtggcgataaaacgagttttcctctcctcatccctgtaaatagggcctgcaagaattgccactttcctcactgttctagctgggtatttgaattgctggtctacttcgagcagagctcaaggtcaactggttatctggccgacgataagaattgcagcatcttcaaaggtcgaacggtgcgttcttttcaaaatatctttgaatataataagtgaaagtctcgaaaataacacgaacctctttaataatgggtattatttatacacagtagttctgtttactttgatcacattttttatcaagggaacttcctaattaaaaacaaaaaaaaaaaaacgaatagcctgataaagagctaaatggtaattatcaaaattatatataccatacacccaacgataatgataatttgtttatcgcagtaaagtgagattctctgaattgataaaggttaattgccgtttttcaacaccattgcatgtatcgataaaactaataggaattacaaataaattaaaaatctgaattttcttttttgctctgggtaacaatggctgccatttctgaatgtttctgttattctctctgattttaaaagtgcaacgatacttaacacgaactttgagttgctagtcgccataagcatatgaatgcatcaatcggtagctaggggctgtcaacaactacaatatgtatgataagcagccacctttagatactttccttactaacacctagaaggtagagatagaggtattcaaatatttgcattcagatataaaataatgttctcttgttcaagctgtgaaatctttatctgtagagataaagtgagcatttcaattgaagaaccaatttgtatatttttttagatttcaccgaacgcatgaatagaatttgtctgcta

SEQ ID NO: 39080 - DNA, 1938 bp, DROSOPHILA
atgctgctgtttctctggtggattgctggctatataatactcgtatctggaggtacaaatccccccctgtacgccctggatcagccgaatgtggcccggtgtctggactactgccacctgaagaacttgcgcttcctcctctgcgtggatgcagatggtcagctgtcgcacaatccctacaaggactgcaaccgaggattctgcaaggccgaggactttgaactggaatacgaaacggatgaaggcaaggaaaagcgaatcaatcgcgtggagaaaacgagagttgggcaaaaggcgaatctaagggatctatgcctgaacgaacggggaattcccatccgacggaggtgccaaattcgcaatgggaatagagtttggcagagcttggatcacgtgacctgtaggtcggcaccggaactcagctcgagtataaaccttctcgctgtgaagagccctccggacatgattagccaactgagtaacctcctgactcaaactcaggagaaactggccgccgccgatgtcttcagtatttcggagatattcgattcgctggtcaaaaaaccggaaagaaatgctgcagttgtaggggacttgatgaagatatgccaaaaagttatgtctacagataatgaaacccttcgtgtttcagcagacgctaatgcaaccaatgcactccttagcaacttcgaggattatttggatgagcttagtccaacaattttaaagttaaacaccactatttttgcaaacagcactgagttcacattccatcccttgtttgatatgggtgtcattgttctaaagacgagcgaactcagagtattctttgtagatccagaagtgagaaatgtgagtgggatagtgaacttctctggtggcaatatgtcgcatttcgaaatgcttcacctatcggataatgaggaagatataagggccatgaagaatctagaaagtgcggtctttattcccgaaaaactatggacccaactgaagagaaagggagcctcttacttagtttttaaggtctatactcgagattcactctttgtggagacggaagaggaaatcaaacgacggccaactagtaatgttatatccataacaataccaggattgaatgataccaagctacctggaaagttgccatttttcttgcgtaatgcaaaagcgaatgaaactcaatttgagggaggatgtggttactggaactatgagacctggcttagcgatggaatatccaccagcggtggtggcagcttggaagcctcatcgcacccagtgatcctctgccatgcggatcatctgacccagtttacatttctactgggagtgagcaaaatgcaggcaggtctggacaccaatgaagatgatcactccttagatgtaatcaccaatgtcggcttgaccctttctctgttgggcctcctaatgatttttataactgcagccgtgtttaagagcttccggacattagcctccacgaagatattgctgaatctgtgtgctgccctgggtcttcagttgctcttcttcctgatcctgagtcaaagccatttgctggagcagctggaacaatctgagtcggaacgatgtactctggttggagccgtgatgcaatatctactcttggttgtcttcagctggatgtttatcattggatttctgcagtatcaaagatatgtgagagtcattggagttaatcacccacgacattatatactaatgtcggctgtggcggcctggacattgccacttatacccaccttgttggtggtttttctggagcccggttcctacagacccaataattcctcaatggactatcccatcctctgctatccttctggatatggtttaagtctgggcgtcatactccctattggccttatcacggtggccaatgcaatattgcaatacaaaaacttagatgtgtga

SEQ ID NO: 39081 - protein, 645 aa, DROSOPHILA
MLLFLWWIAGYIILVSGGTNPPLYALDQPNVARCLDYCHLKNLRFLLCVDADGQLSHNPYKDCNRGFCKAEDFELEYETDEGKEKRINRVEKTRVGQKANLRDLCLNERGIPIRRRCQIRNGNRVWQSLDHVTCRSAPELSSSINLLAVKSPPDMISQLSNLLTQTQEKLAAADVFSISEIFDSLVKKPERNAAVVGDLMKICQKVMSTDNETLRVSADANATNALLSNFEDYLDELSPTILKLNTTIFANSTEFTFHPLFDMGVIVLKTSELRVFFVDPEVRNVSGIVNFSGGNMSHFEMLHLSDNEEDIRAMKNLESAVFIPEKLWTQLKRKGASYLVFKVYTRDSLFVETEEEIKRRPTSNVISITIPGLNDTKLPGKLPFFLRNAKANETQFEGGCGYWNYETWLSDGISTSGGGSLEASSHPVILCHADHLTQFTFLLGVSKMQAGLDTNEDDHSLDVITNVGLTLSLLGLLMIFITAAVFKSFRTLASTKILLNLCAALGLQLLFFLILSQSHLLEQLEQSESERCTLVGAVMQYLLLVVFSWMFIIGFLQYQRYVRVIGVNHPRHYILMSAVAAWTLPLIPTLLVVFLEPGSYRPNNSSMDYPILCYPSGYGLSLGVILPIGLITVANAILQYKNLDV

SEQ ID NO: 39082 - DNA, 2414 bp, DROSOPHILA
atgtcctttagcattttctggcaaaaagtttgcttctctaattggaaaaaattgtgaagaaaactgtttttgttttccatattacgttgacatttgaagtaataataaataaaaaacaaaaacattgtatagctccatcatttaatcaatagaaactgttttaagctcgatgttgaatcattcatcagcagagcggtgcactggttcaatttgattttgttgcgaattttttcccaactcgactttctgcactttttgccttccaaaagttttgatacttttcttatcgcactccaccgcctaggcgattagtgttatgtaatgtttttctggtaattacaacttttgtccttcgtttttatatctgaactgctggcactttacccattttcacatattatcttggctctgcgtttctgcgaaactctctcagcatcgtcacctactaacaaggacctattgtggtcggggttgagacttgctcttattccctatggtcgccgctcatttcgttttaaatttaattaaagaaaactttttcctactgctgctgcaagtttttggaaagtaattgtggcaactttcggttggtttttgcagctacattccgttgcggttggcaacttttcggggtgttgatgatgggacgttggctggcgaaagtttattagcgcaatgaagtgcctttctaatacgctgcaaggcccgataaattctgttacgaactcagattatacatttatttgctagataaactccttacaaattctacaattctaaattctttgttttggtccttgttttttcagcaaatcaccataggcatccattccggcgaagtggtgactggagtgatcggcaaccgagtgccacgctactgtctgttcggaaatactgtcaatctcaccagccggacggagaccactggcgttccggggcgcatcaacgtcagcgaagaaacctatcggtgagtgctggtgtttgtactgggtgttttttgctatctgggctcgccgggcaaggaaattggcggaaaatcgggatcgaaatcgggtggacaggccgccacgtaggcctctaccgcagcctttttggcctcctccgtatacgctccatcgccggtggccatgaaagccgccaatgcggccttttccggatccgtgacagcctgcaggagctgcgcttgattctcactctcgtcctcgctctcccctgcactgctgattgtatccagccgtcccatctcgcttcccatcttgcatttggccgaggactttcccctctgctgatccttgtcctccgtgtcctgtgcctcaggtccttcaagctcctcggtgagatcgatgtagcgttgcaggcgctttggcaacctcaacgtgtcgatgccgcttggcagttgattgtgcatccgcatgacgtcgcggatacagcagctgtaaattcaagtttcatgttaaagtctttaaaacataaagaaagcgttaatttgtgtcttcctcagcttgattttgtgaacgtgatgtcttgatattccttctcaggattgacgtttttcgagctgctcaagacttttggtatacttttctcgcctttaggcgctgctcctgtcaatctcagcgggatatttcataaattaatttaagttttacacaataagcacatacggcgaacaaaaaaaatccgcacaccaaacaaagttcatgtgcttaaaacttttctcgtgagtgaaaggcagcaagagcgaaaaaacacacgcagcaactttcactaaagttgcccgcgaaactagaggaagaagttaaagtagcggatattggtagcggattctttttggccctttcactttgagccgcagtgaaagcttcctctaaagtttgccagtgtgtggagttggttctaaagtgcctttttgatacagaggggagcagcggcaacttgtccgaaattcttgcgaaagtgagcaccaaattggcgtcataaaacgcacgggaagcttaacaacatgctaatcagctgccaggggtatccaaccaggaactccgcagtttatgtccatgttaatttgtcctgtcaagtttctctgttctggcaatattttggcatttttacggccgccgacgacaaattcgaccaatcaataaagcaagctgacaccgcccgaggggaaaagatgaacggcggaagtcactgagcagccataaaagcaggcacaaaaagcgttgcctacttaggggcgcctctacggaagtcgggatgccggggcgtatgcgcaatatattcgcccatgacggcaatcgtcacattctcttcaagactctgatttcgggcacaatgcgcaatgtaatgcgttatgcatgcattcttagcgggtaccaaagagatttgcataaattgaaatcgcaaaatggctggct

SEQ ID NO: 39083 - DNA, 414 bp, DROSOPHILA
atgcggatgcacaatcaactgccaagcggcatcgacacgttgaggttgccaaagcgcctgcaacgctacatcgatctcaccgaggagcttgaaggacctgaggcacaggacacggaggacaaggatcagcagaggggaaagtcctcggccaaatgcaagatgggaagcgagatgggacggctggatacaatcagcagtgcaggggagagcgaggacgagagtgagaatcaagcgcagctcctgcaggctgtcacggatccggaaaaggccgcattggcggctttcatggccaccggcgatggagcgtatacggaggaggccaaaaaggctgcggtagaggcctacgtggcggcctgtccacccgatttcgatcccgattttccgccaatttccttgcccggcgagcccagatag

SEQ ID NO: 39084 - protein, 137 aa, DROSOPHILA
MRMHNQLPSGIDTLRLPKRLQRYIDLTEELEGPEAQDTEDKDQQRGKSSAKCKMGSEMGRLDTISSAGESEDESENQAQLLQAVTDPEKAALAAFMATGDGAYTEEAKKAAVEAYVAACPPDFDPDFPPISLPGEPR

SEQ ID NO: 39085 - DNA, 2273 bp, DROSOPHILA
ttcacttttcagcaaaggaaaatatgatgagagattaaaactatatttataatttaactcaaagacactcaagcttagtttatataattaatgttcaaagaatgtcagacaaacggaacagaacagatgctttcaattctatatatacacataaaataatttttcctggcctcaacacccatgctttactgtacgaagtgcagggcagaagcgcgagttttcgcatcgcaaacattggccagagaaaaacaaactggcaaacaagctggaaaacgggtttccagctgaaacgagagccaaagtcaatggacatttttgtgacacgtgagccggcggaggcaaatatgtttgtgtatttgtgttcacggcatcatcgggtcaccgagtgctccacaaataagtggcacatatgtgggctgagaccccgcatatggagtcccacaagaaccttatcaattgcagacgacaacttctggaattaaatcgaagaaacttctgaactcaaacagcgatcaacgtggcacggaaattcgcatcgatttaattcattaagttcgccgacatttgactacattgcggccgagtcagtgaagcaagcgcgaaagtttcgacccgacttctggatacaatacatgaaagaagaaggccaacttgcactaagccgccctgacaaaggcggcagggcgagggaaacttgtcaacttttgcccagacagtctgtcagtttgtcagccagtcagttgggctcctgtcttatgcttatttcatttttcgggcttatagccgaattgtctgcccgtaggaagttaagcaagcgtggcggacctaagccaaagtaattgaataaaaaagtgaaacttattatggctgtcagactccattcttcgtggcctaatctccatttccgaccaaaagacgtggacagcccattgttggtcacaagctcgagtgttcgaagcggttcccatcccctggtaagattacaagtcaaagttgataattaccggcataaatgacgtagactgggcactccgtagacctgctctttgccgataatcttgtccattaaaaggcggccatagcgatcgaagaacatttcccttcgggcagcgtataaaaggggctgaaatagaatattagagaaaatagtaagacacactacttcttacatattgcatcactccagaagagataattaatttaataggcatttgctcaccttgaagggcatctcaatcatgaccacattgcgcagcagaatcttgaggcacatgaccagttcgaagctgtaattgcggccatcctcgatgagtttgtcgagcagcgctataattacggaggcgcctccgtctggcggctgcggtgcggcgccgtatctgcaacggatggaaggggcgtgggtggtaagagggcgtgtcagcggtcgggagtgggtaactgtttgcaaatgagatacaagctgccagcacgtagttggtttgcttgtggtcaatgcaaagggtcagaggtcggcgggcgacggggcggcaataaatgctagatgccccgataaacacaatgtacaaatgaaataatgaacagacacgactcgcggttgtgtcagttgcacactagcacacacgcacaggagcagagatgtacacatgtacactgagaaaaaagtgttgtcatttcaaatattttttgagcttaattttaagctttcttagggtgtactgataagtgagataaattacaatgggaatatctttaaaattgtatatacaataaggcttatcaaattattaactgatcacaattttctctcactgcattcaggccgacctgagtggcaaatggcaaatgaagtgcgaattgcaaattgcaaatggcgccagcagtgttgtcactttttaaattgaaaatgtttgtcaaagatctcccccacattcacatttctcgttttctgcctgataagcattgtaatttatatgtttcgcttatttatatgttgtttcaccgccggtacattgtataaatattgtctttttgcgtatgcgtgattatgcactagtaaatcaatttggctgcgaatgaaagtaccagcgaaaaaggaattcatctcaccacattcatttgcatattttatggccaatttcaaatggaaatgcaaaaaagcgcagaacgaaacgcaaattaaaacacacaaaagcgaaacaatatcgaaaatttatggcgcatcagcatcagtaactcgaaaaacagtagccgcatctgaataaaaatcagtcgag

SEQ ID NO: 39086 - DNA, 177 bp, DROSOPHILA
atgtgcctcaagattctgctgcgcaatgtggtcatgattgagatgcccttcaagccccttttatacgctgcccgaagggaaatgttcttcgatcgctatggccgccttttaatggacaagattatcggcaaagagcaggtctacggagtgcccagtctacgtcatttatgccggtaa

SEQ ID NO: 39087 - protein, 58 aa, DROSOPHILA
MCLKILLRNVVMIEMPFKPLLYAARREMFFDRYGRLLMDKIIGKEQVYGVPSLRHLCR

SEQ ID NO: 39088 - DNA, 6938 bp, DROSOPHILA
tttaatttcttaggataaaaaaaggggcaaataatgttgcaaatcggcagatagggagggggtgctcaagaattcgcccgagaaataattcgctttatggccttttgaaatttatatttaacgaggtcaagtagggagaaaaactattaaagagctcatatattttgaaaaaccatagttctattacttttaacgaaaataaataaagttaaaagagtcttcctaagtcaattctagaaaaaatcacataaaatgtgccactcagaccgaaggacctgcggaaattgaataatttttgcgaaaatcttgatcaaatgaaattccagctgccttccgccagccgtcgacataaactttgacagccgagcatctcagacgggaactttgttgtgactcgcctttttggccagcaatcaatactcgcattttatgcaaagcatcctttttggcgctgcatcaaaaattgaaatcgaagccagcgaaatggtggggcgggtcgtgtgaggcggaaggcgtggccgcggccatatccagttaggaaacaataaattgccgcgacggcgaaagtcaaggacgaaggactcaggatcaggacgaagtcgaaactgcaggtgtttacatataaatttatgaatctcggctgtggacccgagtgcacgctcgtaactttttacaagctgcttttttggacctcgagactcgctggagaccgccttgtgatgcaaatttgctgtggcagcgactttcatatttaatgataatttttccttttattttctctacccgctccttggcttgggtttcgtcgagcgttttcttgtggcttcgcgagcacttgcttatgctaagcgtcttgtattttatgttgcatacattgcggcgccgccaagtggcgaccgctttgcatatttctcgctaattgaagtggcagtcgctggcacttcccttcctgtcccctttcccatccccctgaccggaagtccttattccaggccacgacttacctcagcagtatgagcagcagttcgggagcgttcgcctgtagggcaatgcgaaggggcgaggacttgccgcatgactcaatggggacatcaatgaatctgcaaaaaaacaagaacaaaaagccggattcggataagtcagttagtttttaggctcacattcggagtgagtttagtggacgcccaaatgggcgacaagcatcaaaatgggcttcgcacattagcaggagtctctggagctgagaaaatgagtctgggcgggtaccagacctcaattaagctgctcgcttgttgctcaaagccctttcataaaacgagaagaagcacagagaaaaatataaagcctttccttgtttttacttgaatctaaaagaagagaccaaggttcgtttctcgcagcacactttaagacgccttaaagacggattactgagacctagaagttattcaacttcgacatttctgcaatatttttttctgtgcctaacttgacattgcgtatatgtgcgtaatgtgttgtgtgaggggtgggcgtttgtctccattcaggcattagcatgtacaatgcacttaaagcacatttccggcacagcgcacacatacacacacggcttttatgtctacgcataaaagtaggcaaataaaagagcagaaaccacaataaaccggaagtagaagtaacccacacatcagacgataagcgcactttgagccaccatccagtgacagcttggaaattggcttggcaaattcatttgcgttttattggcggcgataaaagtgagtccctgcaagaatcaagccattccccaatcgcatcccatgacaggttcctcaatagccgtatatagcacctcgtggctggcatattctcctccagtcggaagtgatttgcccccaagtcagacattaacactttaatcagctgctgagtgggctgacaaatcaaatttctgtctaatggtctgcttagcgagtattagccggcgtttcatgttaatgtctttgctatacagtgtgcacttcgattaaatccgatgaaaagagtatgagttctcagcttgtgaagttcccagtgccttggagggtataaattattccgagtgccattaagtcggcaggttatgcaaatgcagtagtgaaataatgtaacttgctattttaagccatttaagccatgcaattactgaattaaatcatgtttttttctcaataaacaattaggttttagtgttttgttaaacacccttttcaggtgttttctttgcaaatccgttactgttgcattagaaccctaacatcgtaagtaaattgtgtaaatctcattgtgagcttttagcttcaacacaattccttttcacgagtgttcactgttctgcgaaaactttggcaatatgctgctccagcactgatttatgcaacttcaacggcatttggccgaaacgtttattgtcacattgcttgtttttctcagctcttgggtcgcacactccacacacacactcccaatcgtacacccacatacatttgcagctattgacgcttattcatgactttggctgctgttttgcgagagggcatcataaatgtcgtcttaatgcttgccagtcagtatgttttttgccttctgtttgtttaagaagcgcaaacagtcaactcggcaatggtatgggtatggtatatccaagggggcgggctgtatctgtgtggattagtgggcgtggtggggttgagcatgcctttgtgcgcttattacacgcatttttgactttaatcctccgaagtgctggcgaacaaagccgaaataacaaaaggtttacatcgctgcctgttggttttcagcttatcgcatcagcgacactcacacacggacctcatgtgcatgtgggagggtcggaaaaagaaggcggaaaatgggaaacccccccccaaaagcaagctgcaaatgaaaatcttaattatacatgacaccagcagaagtgagagaaagccaccgccagtgattgagagccattctctgtaaaagtgtattcgcagtcgtgtctgtggttgtaaattgtcgccatctttcactcaattatggcagtcacacacacacacacactctgtgtaggtgccacaacaatggctgatgaattaatttaattaaaatcctttcatttctctggttacccttcacgttcgtccaccatttccttgcattcccagcgggtatttatagtatcttattgttaccgaaaacattattattgtgtggaaaactggcaagccattaagattgatcggtatctcggcacataatccgaattttaaagtttaatctttaattcttggcgatttgctttgtaagcaacttataatttgctctgatagccataagctaagtgtatagaaaggcttactgtgactgttatgaaagtaagagctctccataaatgtccaagcatacagctagtatgaaaaactctttgggggaatgaagacctcggcatggcacccaggcaactatccaattaacccggctagtgtgaaaatcgctcgaggcagcaaaagagcgcgacacatgaaagagtgaagaggggggagtggggaaaaggggagaatgtcaggacaggatggggaccgggctgaggactcacctgagctgtcgctcctgctcgaagcgcggaatccagacgggcaatgtgagctgttcgcgtgtggcgtgcttcagaaagtaaaccatagcccggacattctcgtgctgcgaacaaaggacatacatgggtgtctattccacggggccaggaatagggtctttctgccagtctcacctgatcctgaaagtcactgcgccagccggcgatgaagtgcggagcatgtggtccaaacagggcgcccaggaaaatgcgctcatatgtcttctcgcactcgtaaatggccactgaattgcacaaaaaggggataaattagtcatgggaacaggaaaatagttaaaagttaatttatataaaacaagccacgtttaataacatttcgaagtgggtaatgccataaaccaaatttgtatacacattgtgaccgattttcccgcgatgcaggcaaattgtcggtagtggagaaagcggttaaataatgtcatcaaatcgcagcagcgcagccataaaaaagctaattacgtggctgcacttgttgctgctttggttttttggctttcggtttcgttggctttttggcacagcccagaaatgaagtcagcggaaaacggaaacggccacaatgtttgccaaaccaaggccagcgggtccaaaaggctggagtcagcaacaaagcaacttggtgagtgaggacaggacaaacaaggagcaagttttattgcacacgagtccagattccctgacagaggcatgccattaattccaggcacttttcctgctcgcaaaagtttacgcagccttttaattagaggcagccaacatgcgtacgccccaaataacttgcaacactttgaggcactttacaagttttacgatgcagcaacaacagagcaacagaacgacatcagcaacactttcttaacgcaattagcagaaacacgtgattaaagtgaaaactgcctgcttatgggcgtaataatccgatgcgatgggatgatatttattaaagtatgcaaagcacacagccacgcccaaaaagcaaacaggaaagtcttgccacacacacacgcacactcactcgcatacgcttacgcacacatacgcatacatatgcatttaaattaaattatttagttggcccgactccacttacccagcagcttgacgaccacctccgagtcccggactccccaatcccagcaggtgcgcagtccgatgtacaggatgttgtgatacttgcccatgaggcagacctggggaatacgcatggaatggagggtgtggtgaaggggctgaatcccaactgaagtgctactttttaaattataaataattgccatatgaagagatggcatttaaaatggaagaaaattaagtttagcagactctgccaaaggaaattaagcccgaaacaactttccatatttatttacactctaaaaggtcaattggatcgcagcagcaggatatacatatttatgcatagttttagtacttttctaaccgttttctagaaagctttattaaattccacttttattcgactcaaaagcaaagcaatgttatttggctaattaatcattggtttccattcataaggcttggtttaaacattaacatttatttaatacgacaacgaaatagactgacttggcttttgttctaattatttatttcgtttttttaagtaccggaaactaattgtcaaatcattattaattaagttgagctttgctaaagcccagtgctagtttgtatggactcttttaagtaaatatttattcatattaactattgaagtttggcacacagaaatgccacattggcaacactcgatttgtacataaagctcacctggccgttctgctccttggccattcggtggtacctcatggccgccgtcaccgcgatggcggccacctcatccgtctgcgagttctggccgccgctgcagcccttgatgatggagctcaggtggtcgaggacatctcgccgcgactggcggtcctgcagtccgttgcgggagatctgctcgaaggtgtcgtcgaagaagcactcgaagatgtagtccatgaccagatggcggcgctgggttcgccggttccgctggtgactggccctattggcaggattccgacgcagttgttcccgcacccgcagacgcagccgtgcccgtgactcagtttcccggcggaaaccgtagaaatgccgtggaaatggcaaccagcagcgaacccacacaaattggctttttaattgacttaccagccgctggaaagcctgtagcaactgcgaaagcatattgcaaacaaaatttaattcactttaagtaggcaaatattttcgattgagctgaattgatgattccctccaaagaattgaaattccgcttcaaaaaaactcccgcaccgctgaagccaaagagtcgcaatacacaaaaaagagagaatttcttttgcgggggtgactctcttgcgctatcgattttttgcagctggcaatgatgtgctgggagaacttttgataaacataaacaactcataatgagcatgcggaatattcattttaatatttttaagcattgcaatcatataagaaaataattacatagtatgtaaagcttattcaaaagctgatatacagttcaattactttttaggcctctttatttccgtgaagctcccagcaaagcaattggcaaacaggtgtttgattaccagccgacaagtatatttctatgagctcttcaaaaaccgaatggaactcgaggactccattgaaactgattcgattcgattcaattcgattggtttttgctaaacagtctattgcactttgaaatttgctggcatttttccgaaccatttattcactgcacgcagcgcactcacacaattttccaccccactcatcagctgccgctggaaaactaaacaaacgaagtccaatttctaagaacgctcagctgtttacctaagcgctcactctcccgctttctctccactctctctttgtacagagagtagcggaggtattaaatacgcgtttcatgagcataaagctaaattagattctaaattggaattttcaatttaaaatatatagtacatatgtatgctctcacattatttttgtgctaaatgggtaatgtttggcgataagcataaaatcaaatggcgcataaaaacgcaggtttttgtgattttgcaatattaaactgaaaaataattggtttgtcattataaggattatgcttgattcaacaaaaatatatttatttcgaaataaatactgatggtgt

SEQ ID NO: 39089 - DNA, 861 bp, DROSOPHILA
atgctttcgcagttgctacaggctttccagcggctggtaagtcaattaaaaagccaatttgtgtgggttcgctgctggttgccatttccacggcatttctacggtttccgccgggaaactgagtcacgggcacggctgcgtctgcgggtgcgggaacaactgcgtcggaatcctgccaatagggccagtcaccagcggaaccggcgaacccagcgccgccatctggtcatggactacatcttcgagtgcttcttcgacgacaccttcgagcagatctcccgcaacggactgcaggaccgccagtcgcggcgagatgtcctcgaccacctgagctccatcatcaagggctgcagcggcggccagaactcgcagacggatgaggtggccgccatcgcggtgacggcggccatgaggtaccaccgaatggccaaggagcagaacggccaggtctgcctcatgggcaagtatcacaacatcctgtacatcggactgcgcacctgctgggattggggagtccgggactcggaggtggtcgtcaagctgctggtggccatttacgagtgcgagaagacatatgagcgcattttcctgggcgccctgtttggaccacatgctccgcacttcatcgccggctggcgcagtgactttcaggatcagcacgagaatgtccgggctatggtttactttctgaagcacgccacacgcgaacagctcacattgcccgtctggattccgcgcttcgagcaggagcgacagctcagattcattgatgtccccattgagtcatgcggcaagtcctcgccccttcgcattgccctacaggcgaacgctcccgaactgctgctcatactgctgaggtaa

SEQ ID NO: 39090 - protein, 286 aa, DROSOPHILA
MLSQLLQAFQRLVSQLKSQFVWVRCWLPFPRHFYGFRRETESRARLRLRVREQLRRNPANRASHQRNRRTQRRHLVMDYIFECFFDDTFEQISRNGLQDRQSRRDVLDHLSSIIKGCSGGQNSQTDEVAAIAVTAAMRYHRMAKEQNGQVCLMGKYHNILYIGLRTCWDWGVRDSEVVVKLLVAIYECEKTYERIFLGALFGPHAPHFIAGWRSDFQDQHENVRAMVYFLKHATREQLTLPVWIPRFEQERQLRFIDVPIESCGKSSPLRIALQANAPELLLILLR

SEQ ID NO: 39091 - DNA, 13525 bp, DROSOPHILA
cttgctccttttgacgagcaacacgattttgccattagccgttgcttagttatccttcaatggccattcgcgccttgcgctaccatggaaatatttttcattaagttccacaattactcggccatcaaatggaaattaaatgttgaaacaatgctaacaatttatttgggcccatccgccactttaggccgtctaacgacaccccaaggtgccgtaaaccaaaaaagaaagaaattgtcttatattgcgtcttgggggaaaaggcacagcgataaaaaagggaatgatagatacctatatattttacaacactatcatgagtatcttgcaaaaatataaactctcttaaacttttcttcttgtgtaggccagagtttctacaataaataagcccttgcaaattcgtaatgttcaaactggccatccaacgaaacacgactcgtatttttgggccacaaatttgatggttcggaagatgattcccgtttaagtgcaaaataattgctggacgtgaggaaaaaggcttagatgcaggagactggcgaacaaacatggcagcgattaccattggccggggccattaaaaacacatttccattattgattagcttcgagaatatctcgcaattactggctgtcataataagcaatctccagccaaccaagccaaagcaaattgattgcagccgaagggaatgggttggatgactgggtatctggtttctggtggctctggtggcagccgaagtacacatagcccgttcgcattgtcattgaaattgtccgacaaattgaataaaaacatggatagaccatgagagcgccaggcactcggaactgagatattgagatgacacattgagacaaccggaaatcaattaaagcttaataacaaaggaatgtggccatgaatttaatttaaggcaactcaactgagtgaaaccatgtattaacctgtttaaacgatttatatgaggttgcttgccacaaatgtatctacttacggactgatggccaatcctgagtattgatcgggctgagtgagattgatctggaggaatccgaactgcatgtcccggttgatgttgttgcggttgatgtagttcgagggcgtgataacgtagctgccgctattcgagtaggaggcctcgatcacatcgatgtactccagttgcggctcgatcttggtctcccggtagccccacagcgagatcatcacgttggcattggcgttcgaggtcaaattgtactggttccaggtgatgcggatctcggcggggttcttcttgtgcacatcatcggtggtgaagaagatcttctcggtggcggcagccggggtctccacgaagtactttccgcgccacttgaacctctgggttcccacggagatctggaatcggatatagccctcggccttcaggtagggctgcacacagattacgcggttccgatccacataggttcccagcacggactccgtatcgaagtggcacgtcaccctgatggccggatcaaagcagggtccagtgatattgacgacttgaccacccagcatattaccagactcgggggcaaaggtaagaggtagcagagcagcatctaaatgagtaaaagatgcatataagatacatggaaattgacagttcccaaaacccaatcagtttctaagctttagttgccaccaatgacaggaaccccgcaatcaaacgtaccgatatccttgttgcaggagccaattagaatctgctcgtccacgcggaaaatgtggcgacccgggaatccgttggcccaacctctgttggccaggtcgcgaatcaccatgttctgactgtagggattgtactcgtacgcctgggttccattaccggcattgaatccgacctggaaagggggagcaaagttcgcgtgtcaagggtgtgggaacttttcggggaagaagtgcaattaaatacatgcattcggatttcccgcacatttaattaactgttcacaaagttcgcaattatgtttcgggcttagaaaaagtttaaattgtgcgtttaattactgcaagtggctggtggctgaagggcactcgagttccaaaagcaaaacgatttaagctaatgataattgtgaataagtgattcggcaaaggaaattaagggttaactattaggtattttgtattatttcgaaattttcttagagaaactttatgactctctgtgaattcttaatcgaaaaacttaacttgcactttactttcttcctcagattggcgaacaaatcacgaaagcaaacaaggcatggctagatcctgggaaactaaaggcaaaacaaactctccactcgcaattagttggcaagtttttctttggagtcaactgtttaattgagtgccaaccgacaaagagtgaggggactaaaaaagggatagtttgaccacttacatatgcaggaacaccaccctcgcccttcgtcgtatcacctccggcctcagtatgagaaagccagttcagaacggcatagttgaaaataatataggtgtagacctcgtcagtggccaggaccatttggaaggtgtttgtctgtgaaaaaacagtgagcatatgtaatatttatacatcattttaacaaaaaactccaagtaaatcacataccgtgtagagggagttgtcgatgccaccggcgaaggagacgttcttccaggtggcgatcaccacgtgcttggggatgaaggtatcggcgcccacgactccctgacggatgtcccacatggtgcgttcccgcacctccacgccgaatcggtccgtacgtcccatcagatcacgttccactctgcaaatagaatgagttttgcgtcagtttggaacagcggaccagtgcgacacatgtggctgatgcgaaaatgggaaaacaaatcggatgcaaggcaaattttggtttggcgtctgcctgatgataaatggattcgatgttcggcatataaatcagggagcaggcggagagatttctgatttgggcgcttcctcattactttccctgccgggcatattttcataaacattttatttattttacgctctcgtgagccctttcaagtgtgcgccttcggatgtatggggagttcgtatgttcgtatcgacggccgacacattggcgacgccaacgcggctacgtggcgtatgatttatatgctttaattattcattacgcatacgccgcgtaacacactcacacccagtcgccacttcaaactgtcggagcgtcgtgtttgctgcgccataaattgctttaagccagtttggctaaattacagtcgggattcatgcaaaatgcttagacaaaagccattccaatccatttcaaacaccagacaaataaaccttaagccgatttaccggggttttttattacacgcaccccctttgagccagtccactggtactggtaaatctaacgcaagtcttcactgccggacaattgcattggaatcgaggtgaacaatcgtggattgacaaagctcttggttcgaataagaggcttatcaaatgaagcgttcggctcagtagaaacatgtccagatgctggccgcaagaataactaccaattttgccaatagtgacattagagcatattcagaatggagataaataatagaaatgattcaaattgcatttcaaatgaaaatgaaaaatgtattgttcccctatagttgcaatcgaaacactgaaaacactataattgaaacgaaataatcatatgcaatattctgttagtcctttatgccacttacttaaatctaataaagtcttgggctccagagcatgcacaaatgtaaactaattcccaatcgctttgacaaggacattcatttggggcactacactacacatatgagtgtaacaattgaaatcgaaaaactcgttatgctccagcatttctgtgtgtggcaaacaaagatgaatgtgggccattttctatttgcatttccccggtaacattttattgattttgcgccggcgtttgttagtgataaatgaaacagacacactcacacactggcactgcaaacaaacatgagtggtagagtggtgtttcgcctatgttcggcttatttattaacacttcaacgatccgtaataaaaactcataatgcagccattatcatacaacatgcgctaaattgccgccagtgcgcttatgtgccattcaatttttgagggcacataaattaaacctggcagcagatggcaatggaaataaattacaaaattacgctttccttcctctcgacgggcgtaaaaaatagaaaacgtttgttggcagccagcaaaaaaccgcatgccatggccaaaagaagaagaagaagaaggaggcgctcagagataaccgcacacacaaaaacccacactcacacacacatagtttatcatccgtgtttgccctgagcaaaaactttaaaagtctgcaattgacatttgggccaaaaaaatgcgaattgtcactcagcctagaaatgcgcgcgcagcagccaaaaacagccgcagactcggagacttttacgtgtaagtaagccaaaaagccacacatttatatgggggcactcagaaaatccgagtactcaaaggatatttttgcataaagcataacatttggttggagacttcaatggaaatgttacagtatgctgacgcaatcattgcagatgtaattaatatataatgtatattaattcgaatttaaaaattcgaaagcatttttcgctgtgccgacatagagagagtcgcaaaaagtaatagaaactcagaagctcgtacataagtcgggctccgagccgccttccacccgcttttccacccaatttccattcccctgctcactatttcccccgttttgccatcgcaggccagttcttgaactgcgccattatgtactttattgcatacattcgggcgctgccacagttttgtctgcatttgtaggttaaaatgccttttcggcgctttgcatggaaatattcgagccccagtccctcatcctttcagcccggtttatccacgcttcagccatgtctcggtcttcgccttttgccgcttgccgtgtggcccaattccatctcggggtgtaaatgaaagtgaaacaatggccgtacttaaagaaaatggcgaaaattgcatgtaagctgcagaaacagcgcgcagaaagcgctctcgccagcaaatgcaaacagagacttgcaaatggcccagccaaggaccaaggaaggcggggtttcaagggattggggaagttcttgttatgattggcaaaagggaataatgaagcggcattattatggcgccctggctacaaagaaaaactgtggccaaaaacactttcaaggaactgactggcaagaccaagagtgctatgtctgcactctataaatttaatgaaagtgacttttggcaagtacttcaaaaaatacatctccttcaaggtctggccaaaaaccttacctttcttaaagttcataaagaactttactcgggtatatttatcttttaattgcgttttctaattgttgttcttttaaatttgctgtgtatttatgttgtaatttttccattgctaatgcacctttgactcttttcccgaatatgtgttaattgcgccaacgcaggccggcaattaagaatccgtttgaagctgtccttgccaaacaacaattaggcgctcacaggacctgcagaaagtaccaccttgaccaaaaacacacacatcgaatttctcatgctgacaaagtttaaagcgtttaacaaaggcaaaaatactgaacaaacgacattaagtttttattcgccacccgacgcggctaaacgtttgtgtgtgtaattaaacgtgcgctcataatgaatttaatgctcaaagtggatggcgacccacgcggcgtatgcgcaacgccctgcactttcagctaatccaatgctgagcgctaagtgtgagtgtgtaattaaattgatgcgaaataatcgtggtccgacatgtgggcggatgtcaatgacggagtgggtgagaagatgaggcggtggtgccaaaaggtgatggtgggtcggtgggtggtgctcgtgtgtgggtggccagcaattttacatcactccgcatctcgctattcgctctgcctggcttctttatctgcagcgccatgcaaagttatttaaattaaattccagtcacagcatcagtgactccccattctttaatacctctgccctcccactcacaagtgcactggtagaaaaagctatcacaagaagtagctaactgcttttaaaaggttaataggtaatacctataggtttttgttttttcggtgctctcatgaaagtttggtttggctgagcatttcccctttttatcgctctacacgaggcgaagacaattaaatggcagggactacgccattgaacgagttatgcggaacaagtttgacatattgtcggactgtgtaaaactatgaaaatgcattggacgctacacgcactcgtgtcctgatccttgtgcccgctcctcgcaggatgttaattgctcagctgtggcaatttgtcagcagagtgttgacaacaaacccagtgaacggaaaaatggaaagtgccagaaaagaactcgatggaaaaacatttatcctgcaatgctataagccattcataatgctgtcaaatcgattaaaccacttttgtaatttttcctccactttttcggtagatttcccatgaatttttcaacttgcatgcatcgctcaactgacttgtcattgtgtgccattttgaagtaatttatgcacccatttccttattttttcattgttcctcaaggctatgaaatgtaaggcgctgagacaatgtagacgagcagccataagttatgctccaaatagctcggatctgcgagttaaccaaagagcaatttaagaagaaagtagctttaactaattaatgcacttttgagagtctgcctctctgtgtgtgcgattgcggaatttgtaaggccaagctcttttaaatgctgccatgggtaaacccatataaatacaccacaaataacttttaaccccctcttgcattaatttgcataattagctggacgagggcaaaaaaaatggaaattcatgtttgtataaatttaaacattgtcctcggaaagttcagcgggaaagtgcctggcaacagaatataattagagtagaattggtcacatagcgaattcatcctgaactcacaaattatatttcgaaatgcattgttgcactcagataaaaacgatttgaatgcagtgaatgctcttttctgcaaaatccttaacaatgcatcagaacgatggacacttcgcaatgaattcacgctcgagtgcatgctgaaatcagcaggaaaataatggtgctggaattctgttgggaacccggaaatattacggagcacagatgaacaggtagccaccatgaaataatgcagaaattctggggcaataaatgacagtaacaagcaacgaaacactaaccatgtcacacaataatggaggttggacctccacaaagtcggaaggataatacacttaatacacatatatatatatatataaataacattatttcagggaaaatacagtcacttaacttagttgactttaatcacaagaaattacttgacatggtgcacgtgtgccaaaatatcaagttctggtatttcataatttaattccttgaattaatatagaacaagttgtttgtcaaataaattatacagtttggaaggacatatgcataaatgcaggcccacaacatgcacacacacacacatgcagaatgcagaatggggccatgaggaccggaagtgaagagtggggcacgcagacactcatgccattttgtgttagttttctgtaaatggcgactggcgcacgtaaaacgaatgtgaacgtatgagtacttttgtttggcgcgtactgtgtgctgatttcgcatatgcaaatgccacgagaaacaagggcgaataaatacggctggcaaataaatacaaacgaaccggaaatgcgagcgggaggggataatacggaaatatattgagatgagagatgcattgtcttaccggaagtaaacaccgggcgtccgctggtcaatatccgatggataaattcgtcctacacggcacttgctgaagaagatgcccatgaaggagggatcgcgtttggcgggccagtccttgatcggaaagaccagggggtaagttaggtactctggcggatccgagaactccaagtagccgttgagggaaagctgtaagaggaggagattgttggattacagtcagattcgcatattctgtgcagctttacagtcatgtcaaaatcttaaagaaaccctaccctggtgtagttgaatcggaagccgtagaagggcagctggaagttcagattcttgtgcagctgcgtcatggaggcatggatgtcgaactggtagtcgccacgtcctccgtacatgtccttgtcgaagtaccagtacataaagttgctcctgagctccgcaagacgggcggcggttatggtgtatcctccggctgccgtggagtatgtggtcggcggggcgacattgttattgggatctggaaacagcgagaggagaagacaaatagcttagagaggtgagctctggcctatcattataatttcacacctaatccggcgagattactttttcaattccacaatattatccctggcacttgctgcgttgcaaggcataaagtgaaagaaaactttttcctggcctcttttgcattttccggctgcaactttgccacccacatccttgcagctcccgttccgggtgcttggccattaaaggtcacagttaatattcatttctgcgctgcaaactttgctgtcttccttcttctctgctactcttggcccctttttcctaatttcgcctcaccgctggccttttaaagcaatttaagctgattaagtgcaaagctgacgttcccaatggacactgcaaacgtgtgcccatgaaagaacccaggatccgcttaaggatattgctcctgacgctggccagaaacttaaattgctggcgaagttttcgtggtgaagtcccgggaaagatttcaaaatattcctgacatccctggagagttgtggttgcaccaaaagcggttgacattcattgcattttgcaggaatactttaatatttttaagctttgtcttgtacttctatagttcaattagctaactaataaatactttaattgtcttttgttttacagaaacaatattagtgggcagtgcaggtatcacagtctactttgcagcatctttaacttttcatttcgtgcctatcccagctgaattccctgaattctatttcacaaattcaattttaatatttaagttagttgttatttcaatggaacccgctccttacatacaatttaagcttcatttataattccattaattaatgaaccccattacgatcctgacacctcatttcgccttttgcacagatattttcccattccatctgagtttgattgcgtatttctctttgaatatatggaaattgcagtagtatgcttaatgtataacaccgtttttatttccctcatttccttctattattttgtcggctgtgaattgcagagtgtcgggtgaatcattaattgcattgattttgattttaacgagccaggtaatgaaacgtcaacagtgtgaagtggccataaaccccagcggattgcttgtagaaaccctgaacatctgtcgcgtttaatgtttttaagctatttatgattcgataccctcgctaatcctttttggtggtccttataaaagtgtgcggattagccgtcagtcttttgccaaaaattggtgcgcggaaaacacgcaaaactcgcgtgttcgggttgcaattaccgggaaatcgctcctttgagaaatcttccttttttactttcatagcttaggtagtgatctcaggtagtttcccggaattaagttaggctgggtatcgcctatcgggatcggctacctgaacttttggcaccagctgccgggggtgaaaactggaccaggtagtctttagaagtgcacctatataaggtctgcgttcctggtctcaacagcacattcgtacttcaaccgtcaacatgagcatcagcactttcaacttccagttctacaactacaagcttagcccgtcctcaccgggattcggcagcacagcctcccgttcctcgtcctcatgcatcagcgaactggaaatggacattgatgaggacatgtccgcccagcccaccatcacctccacgcccaagccgcgctttaccagccaactggccgtggaactggccaaaacggagccgggtaatggcatatccccactgcgacccaaattgcatacggcccagaaacgctggtccatggagttgagggaaaaagtgctggaaatgtccaagcgaaataatggccaggagaaaccacaaaccgcacgacagcaggaacagcgacagccacaggaacagccactgcaacaggaggaactgcagcatcagcagcaggaacccactgtcaccgacaaaatcaacttcttcaacaagctgaccaacacctttgagtcgggtttcagcaagctgatgccccaagcaagctccaccaacaaccgcttcatagccatgttgcgcaccgcccgtcctcaaaacgttgccacaaccaccgccaacagcagcaccgccaacagtttcctgggcagcgaccacagtctcagtggttccgtgaccggacaagtgccaccacccaagcccaagagactgtcggccaccaccgcccagtttgccactccccatgtaccagccatgggcgtgggcaaggggggcagccagcgcaagtgctccctgcgccgcaagccttcgatggacaagtcgagggccaccatctcccgccagagttccagtgcctcagtacgaacccagaaccacgccatcatggaggacctcagtctagtggttcccgtgagattgcgcatcgcggagtacgagcagcgcatctcgatgagtgcttaggtccagaaactaggttaattgtaagttccaaaggattgccttactttagttataagttagcctaagcttctaaagacagttcaaatataagataaaatataaatatatatatgaaacaaaatgtaagcgtcttgttcttggcaagtgaggcattacaaatattacaatatttttaaaccattactcctttgcaatcggtgagtaattccacatatatatttcgatattctatttctgaccaaacccttttttattacacagttacattctaacaaatgactgtgactaatacggcaaaaattccaattccgaatagccaatatatcagttctaggggactgataaaacagaattgctaaatccacacactaccacaggttgtaaactgaatcacgcaagactccgtgctcccgctgtccgccgtgtccacacctatattcgtgtgcatacatatgcgtatattcactatgccaccacgcacctgttttgtttgccgaagcggaaaacaagaaaccgttagctttttaatgcctcaacctggggcattatcttatcgggaagaacacagagcgagagagagagagagagagagagaggggcttacagcacctacacctgaatgcccgaacacaggttatcgagcaaatattggtaactaaaccaaactgaaacccactgagctgttctgataagatagtcaacgcggcgtatgagtaatggggtggaactgaatcagcccagggacaacgaaacctactcaccccaattgtagccgctgttgtccacgtcgtacagctcccccaaatagtcatttggcatgatgagggctccgaacattttctcgggcttcagtcccgcgacggtgaggatatcatctgttccccgactgctgacatgcaccacgggaatcagagtgggcttctgcagggccagtggtttggttttcgggttgtccgcttccgcttttttgggagcgggcgtggcctttggaacctcaacgaattccgcctgagctttgggcttagtcaccttgaccggctccggaactgcattgattatttgatcctcgaactcctccgtcgatatattctcgttagccaggacaaaggccataaacccgcaggccagcgcacaaaccacaaacagtttgaaacgcatgttcacttgatttcgatttgtcacttaattggtaattcgttttttcgtttcactgctaaaagaaaaacacaaaggcatcaattaggcatccacaataaaagtatcactcaataagcactcaattcatgcgaatttgtacactatttttcctctgatatcctcattttctaacaattttcacttgatgacatcatcagttaaggcaatggcttatcagttctcttatcacttgtcaccaattttcaattttaactttaattaccaggcaggaaaacacgttcgttgcagcgagccgctcagctaagactgaagttaagttaactctaacggcccgatcggggcgttgccaaaactcagttcacctgtcgccgtctactcgattgtgaaacattgccttatcggccagataaagctaggcatatcttatcaatggaatactacgcaccgataacgcattccttcttcggcccgcttggctttttcgggaagcttcactctcttctctgtgctccaaatttaccaacctatttgtttatgcccattcgtgggaccgttacctatatttctctctgttgacaatggtctctggcagatttgtgattcacttccattacagttaatcatactcatgacgcggccattttgtgaaaagctgaatgggctgtaaagcctaaacatgtatgtgtgtgatgcgaaattgatgagagcacgcttccggtttaattatagacaatgacccattaccgaccattaataggcatttccgatgaagctttagagttatgaatatcagccgcccgtaaaaaagcctactgatggatttcattaggacatgaaagtgtcatggtcctcattaatgaagaaatcaagtgcagagtggggaactccaaattaataaaatcaaagcgttttgaggatcaacttgtgtgactaaaagggtattataaaacaataatgcagataaacattgctataataaaaatcgaaggataagatatatttttatagtggttattgttaggggaaaattggtgttgaaaatgtaccccatatatcttttaaacaaacgacagcataattatgtataaaatatatatataaatataaaaatgtttttaactatggtacagttcatttcaatatattcctgagcatatgtatgactaatttaatggatacaactcttccctctctcaaaggcaatccattattggccaacgaacctgttgcattatcagctttagttaactgataagaaactattttgaaattcattatcatctc

SEQ ID NO: 39092 - DNA, 1982 bp, DROSOPHILA
aacgaacgtgttttcctgcctgcagtgaaacgaaaaaacgaattaccaattaagtgacaaatcgaaatcaagtgaacatgcgtttcaaactgtttgtggtttgtgcgctggcctgcgggtttatggcctttgtcctggctaacgagaatatatcgacggaggagttcgaggatcaaataatcaatgcagttccggagccggtcaaggtgactaagcccaaagctcaggcggaattcgttgaggttccaaaggccacgcccgctcccaaaaaagcggaagcggacaacccgaaaaccaaaccactggccctgcagaagcccactctgattcccgtggtgcatgtcagcagtcggggaacagatgatatcctcaccgtcgcgggactgaagcccgagaaaatgttcggagccctcatcatgccaaatgactatttgggggagctgtacgacgtggacaacagcggctacaattgggatcccaataacaatgtcgccccgccgaccacatactccacggcagccggaggatacaccataaccgccgcccgtcttgcggagctcaggagcaactttatgtactggtacttcgacaaggacatgtacggaggacgtggcgactaccagttcgacatccatgcctccatgacgcagctgcacaagaatctgaacttccagctgcccttctacggcttccgattcaactacaccaggctttccctcaacggctacttggagttctcggatccgccagagtacctaacttaccccctggtctttccgatcaaggactggcccgccaaacgcgatccctccttcatgggcatcttcttcagcaagtgccgtgtaggacgaatttatccatcggatattgaccagcggacgcccggtgtttacttccgagtggaacgtgatctgatgggacgtacggaccgattcggcgtggaggtgcgggaacgcaccatgtgggacatccgtcagggagtcgtgggcgccgataccttcatccccaagcacgtggtgatcgccacctggaagaacgtctccttcgccggtggcatcgacaactccctctacacgacaaacaccttccaaatggtcctggccactgacgaggtctacacctatattattttcaactatgccgttctgaactggctttctcatactgaggccggaggtgatacgacgaagggcgagggtggtgttcctgcatatgtcggattcaatgccggtaatggaacccaggcgtacgagtacaatccctacagtcagaacatggtgattcgcgacctggccaacagaggttgggccaacggattcccgggtcgccacattttccgcgtggacgagcagattctaattggctcctgcaacaaggatatcgatgctgctctgctacctcttacctttgcccccgagtctggtaatatgctgggtggtcaagtcgtcaatatcactggaccctgctttgatccggccatcagggtgacgtgccacttcgatacggagtccgtgctgggaacctatgtggatcggaaccgcgtaatctgtgtgcagccctacctgaaggccgagggctatatccgattccagatctccgtgggaacccagaggttcaagtggcgcggaaagtacttcgtggagaccccggctgccgccaccgagaagatcttcttcaccaccgatgatgtgcacaagaagaaccccgccgagatccgcatcacctggaaccagtacaatttgacctcgaacgccaatgccaacgtgatgatctcgctgtggggctaccgggagaccaagatcgagccgcaactggagtacatcgatgtgatcgaggcctcctactcgaatagcggcagctacgttatcacgccctcgaactacatcaaccgcaacaacatcaaccgggacatgcagttcggattcctccagatcaatctcactcagcccgatcaatactcaggattggccatcagtccgtaa

SEQ ID NO: 39093 - protein, 619 aa, DROSOPHILA
MAFVLANENISTEEFEDQIINAVPEPVKVTKPKAQAEFVEVPKATPAPKKAEADNPKTKPLALQKPTLIPVVHVSSRGTDDILTVAGLKPEKMFGALIMPNDYLGELYDVDNSGYNWDPNNNVAPPTTYSTAAGGYTITAARLAELRSNFMYWYFDKDMYGGRGDYQFDIHASMTQLHKNLNFQLPFYGFRFNYTRLSLNGYLEFSDPPEYLTYPLVFPIKDWPAKRDPSFMGIFFSKCRVGRIYPSDIDQRTPGVYFRVERDLMGRTDRFGVEVRERTMWDIRQGVVGADTFIPKHVVIATWKNVSFAGGIDNSLYTTNTFQMVLATDEVYTYIIFNYAVLNWLSHTEAGGDTTKGEGGVPAYVGFNAGNGTQAYEYNPYSQNMVIRDLANRGWANGFPGRHIFRVDEQILIGSCNKDIDAALLPLTFAPESGNMLGGQVVNITGPCFDPAIRVTCHFDTESVLGTYVDRNRVICVQPYLKAEGYIRFQISVGTQRFKWRGKYFVETPAAATEKIFFTTDDVHKKNPAEIRITWNQYNLTSNANANVMISLWGYRETKIEPQLEYIDVIEASYSNSGSYVITPSNYINRNNINRDMQFGFLQINLTQPDQYSGLAISP

SEQ ID NO: 39094 - DNA, 3074 bp, DROSOPHILA
acatagaccaaactgctggccaagacagaggctatcaagatgcaactgccttggctggaacgcctggacatgatcaacacactagctccactggcgccggaactcgctgtacagctggagaagcacgagcagaagcgggccaatctcttcaagggcaacgccaagctgccctacattcggcccgaggaggatcccgtcctgaatgacttcaagagggagatgctcttccaccgacaggcgcaaagtgctgttctggaggccattccccgccttcacgagctgggcataaagactcgtcgacccgatgactacttcgctgaaatggccaagtccgacgagcacatgcagaaggtgcgcgccaacctgatggccaaacagcaaggacaggcgaaatccgagcgcatcaagcagatccgcgagcagcgcaagatgggcaagatgctggccaaacagaccaaggtccaacgcgaagccgagaagaaggacatgctggacaaactgaagaagttccgcaagggcaagctgaaaaacctggacttcctggaggacgccaaggcgcttgagtccaagcagaagcagtcagccgagaatcgcaagaagcgcaacaagaagttcggcttcggcggcaagaagaagggcctcaagaggaacacaaagtcctcctccgcgggattggatggcgacaagtcctccaggcgccagcggggcgtaaaggcaggtgcttcggtcaacaagcggcttggcaaatcgcgacgcattaaggccaagggcagaaagtaatccccgggactgccgactatatttaggtgaccaaactctagttttataaagcccccaatcctgtatagattttttagacccataaatacataacattttgtgtgcacacagccttactttcgaaatgtggaatactccgtatagaattttagaattccatgagcaattttcataaattacatttttctaacatcgtttattctaaagtggactataactattacacgttctccttgttctttcgtttcttttttagttttgtgctagtttccgattcctccgaagagtccgccgtttttcgcttcttttttgactttacttgttcatcagtttcaacatcctggggcagtccttcagttgctccaagccctgcttgcctatccgctctcttgtccttcttcttttttatcttcactggctcttcgacttccacaccgtcttcctctcccggctcccgtgtcttattttttttcctcttgatcttgacgggatcttctggagtttgatgtgctggggattcctttcctgccttctcagccttgtctttcttctttttcttggattttatgggctcttccagttgggaaacctcacatgcctcggaaaactcctccgctatggattttttctttttctttgccttcgtatcacactgctccacactgtcatcaactgactccactgctcgatgctcggtttcaggcgtagtcttcagcttgcgctgaagcttctccagcatctcgcgctcctgctgctccaggcgggcgatctttccgctcagctttaggccatgccgtgctcctttgtgcgcagtccttcctccgcaggccttgaagagttccgcatctgtgagtaccgccaccttggtgacctcaatgtcctccaccctgatgcgttcggaggtctcaacctctccaccgctctgcgtgagcagcgaagtctgcaggaagttgtcgtaggtggcctttccatcgcttgcgtgctgctccttcgctttcttcagcttgcgcgcggagaatcctctagtggatatctccaccgcttcctcgccctttctgcgggaggtggacacctgtccgtcctgctgaatctggacgtccacattgctggcggcctcgttaaagcagcgctcccaccaatggtcattgaattcctgggcgcgatccactcccagtcccgcgttatcgaacttcaaggcggccttcaagggaactgcgattccggtgttgttcttgcccaatccgtcgccctctttccagccgtattttcccagtatcttcttggcgaaatccatcacaagaaatgtgaaaaatcaaaataaacaattgtgcacgtgcggcgcaattgttatcgataagcagatctattatttcacatcactaacaattattacagggctacttgtgtcgataggttctgccaattacagggtgactacggtcctagcacaacagagctgcattcgggcgccgaaatttgaactaccgaaaattagacgattctgtgtaaattatcaaggaagtaaatcattaaataaaaacaaacttggccaagattccattacacattcatttctcctttatttcagatttcagctgcgctcttcggctcatttcgtttgcaactactcttagtacaagtttcttcataaatattaagtggcaatgaacaaagacagcttttacataaagaaactgattttttcgaatacaaaatacttgaaaaaacgtagactttcagtacgcgccacaataaaatcgaaaagttgctgagctcaacgatccaccgcatctccgcccagccacgcccacacactcgcccatccaagatgttagtcgcagaggtgatctccacgagatgcctgccgcatgtccaagaacttcggggagagagagagccttggtgggcgcgcatggagatcctccgccgaatgggccgagtgcacgaggatggctggagttcgttcgggccatcgattgggttgtgttttcggtgagccggaagcttgctttaagtaaaatctaattttaatgtctgtcgtctgggtatgggcgtgagcgttggctagtccaatccgattgaatccaatcctccttcctcctgatatttcggttgttcaacttaaagtaggtgtggtcttctcctcgctcgcatgttttttaaaaacaaaattacatgtattatgtggttgttgttggtatttataattagatagttgtacaggatgttcttgtttgctatcaatcaatcaatcaatcattttatcattaataatcgaaaacgaacgtaggtgt

SEQ ID NO: 39095 - DNA, 1074 bp, DROSOPHILA
atggatttcgccaagaagatactgggaaaatacggctggaaagagggcgacggattgggcaagaacaacaccggaatcgcagttcccttgaaggccgccttgaagttcgataacgcgggactgggagtggatcgcgcccaggaattcaatgaccattggtgggagcgctgctttaacgaggccgccagcaatgtggacgtccagattcagcaggacggacaggtgtccacctcccgcagaaagggcgaggaagcggtggagatatccactagaggattctccgcgcgcaagctgaagaaagcgaaggagcagcacgcaagcgatggaaaggccacctacgacaacttcctgcagacttcgctgctcacgcagagcggtggagaggttgagacctccgaacgcatcagggtggaggacattgaggtcaccaaggtggcggtactcacagatgcggaactcttcaaggcctgcggaggaaggactgcgcacaaaggagcacggcatggcctaaagctgagcggaaagatcgcccgcctggagcagcaggagcgcgagatgctggagaagcttcagcgcaagctgaagactacgcctgaaaccgagcatcgagcagtggagtcagttgatgacagtgtggagcagtgtgatacgaaggcaaagaaaaagaaaaaatccatagcggaggagttttccgaggcatgtgaggtttcccaactggaagagcccataaaatccaagaaaaagaagaaagacaaggctgagaaggcaggaaaggaatccccagcacatcaaactccagaagatcccgtcaagatcaagaggaaaaaaaataagacacgggagccgggagaggaagacggtgtggaagtcgaagagccagtgaagataaaaaagaagaaggacaagagagcggataggcaagcagggcttggagcaactgaaggactgccccaggatgttgaaactgatgaacaagtaaagtcaaaaaagaagcgaaaaacggcggactcttcggaggaatcggaaactagcacaaaactaaaaaagaaacgaaagaacaaggagaacgtgtaa

SEQ ID NO: 39096 - protein, 357 aa, DROSOPHILA
MDFAKKILGKYGWKEGDGLGKNNTGIAVPLKAALKFDNAGLGVDRAQEFNDHWWERCFNEAASNVDVQIQQDGQVSTSRRKGEEAVEISTRGFSARKLKKAKEQHASDGKATYDNFLQTSLLTQSGGEVETSERIRVEDIEVTKVAVLTDAELFKACGGRTAHKGARHGLKLSGKIARLEQQEREMLEKLQRKLKTTPETEHRAVESVDDSVEQCDTKAKKKKKSIAEEFSEACEVSQLEEPIKSKKKKKDKAEKAGKESPAHQTPEDPVKIKRKKNKTREPGEEDGVEVEEPVKIKKKKDKRADRQAGLGATEGLPQDVETDEQVKSKKKRKTADSSEESETSTKLKKKRKNKENV

SEQ ID NO: 39097 - DNA, 2351 bp, DROSOPHILA
tatgaatagttaacgtattcgtactctacctacatactattactatgtactatataatgtattgtaactgtaatttactaaaatcgtaataatacgtagagaattaactgacgtttaaacataaatcatcgacatccacataaacacacaaagagtccctatttgagttgaaaacgagagctcaaaggggataattggcacatccataagccagaagaaatcattatcatccacaaaaacaaaaaaaaagtagtaaaatattctctttttgctttatgtgatctattacatactacataaacatatgtataataataaaaatgtccttcaaaaacaaactcgagagaaatgattgaatttatttttcctagcagtcggaacgatgcagtttgagggcaactgtttaatgctaaaacagtttgatgggaactggttgccaacgaatatttaggtacagtaatcgctatgttaaaagtggttttaatttattaatatattttatttttctgtataattgattgttttgtatttacaagatattacttatgctatatataagccaaaatgaattatttgtcaatattaaattaacaaagattcgaaagagttcgtagatctatttttttctttattacctatttattaaactacctacactctccatcaaaagagattttgtaatttaattcaccaccctgaccatattttttagttttcccttaatttagaaaacaacctattcaaaactttggtcaacttactagaagcaagttggcaaaattttcacagagatagtacaaatgacatataggctgatattaatattactggaattgcgaacttgaagaacctaaaatagtaataaataaataattactccagtaatgtgatttcatgggtcttggcatcgattgatttctgagcagatgacttaagcgcacaaactacgagccagtcagaaggtgagggaatatccttgaatatccaagaatccttggccttacgccgattcgctggcgccatagagcagattgtccagtttcagtttgttgatcttgtcgccacgggctccatgtcctggtctgccccagaacgtttcgaatgtgtcgaaatgttggttgcacagatccctgtccagttgcttggaaacggagacggatcgacggttctgcgagatctggacattcaggtcgtgcagatagcgcatgtcggcggccgtttgaatcctggttgccggtcgattggtgggcagcaatattatagtttcatttatatcagttcgatttttcagatttcgaattttcgattttcggttttcagttcgatttgttttgcacggggatacatacatagaagattggtattatgatttttgacttttgctgttgcggtttgtttgattttggtgagattggtatttggtttgctcgtttggttgctatactttcacttgtattacaatggatattttcttgctggatgagccgaggagaagtgggggattagagaaaccattaacagaacaagatcacaaggcaaaggcatagaggggcaagcggactttcgtttcaatgtctggcgcagagcaagcaaatgagaaacggtgggagcagggaggtggtggaatggtagtactatgaaagcaggaggggatcgggattgatagaacgtgggtttcaagcctggcgaatgtgcagggtcagccgcttgaggcagcagcccgtggccaaggccgtggggcaatcgcaactgcaacactgcagcttgcagttcagattcttgggcagccgcttcatgtggctaatgttcttgatgatgctgttgatgcacttgatcttggtggtggtcagctgacagttctttggtggatgcttgtgcttggatgcgtacctatcgtgcgacggtgtcctcttggtcacgtccgtgctggagagactgatgggtcggtgcatgccacgccttctggcgagcaggggaaccagctccaccccaccaccttcgccataggctcctccctttcctcccgctgtgctgggatccggagtggcggtactggtgctcccgggacagggacctctcgacgctatgcgggggcacaacttgatgggcttgctaccgcagtcctgcggcttcaagtggtgcagcatttttccgggcggcggacctggcggacccgggcactttttgcctggcggaatgggaagtgagagtggcgacggcttgggcggactcttttgcatggcgggacatttgcaagtgcacaactcacagcagcgctgcggctttggtggcttgcctggtcgcgatttgcgaaaggtgttcttctccgcgggagtcaccgggttatcttg

SEQ ID NO: 39098 - DNA, 351 bp, DROSOPHILA
atgtatgtatccccgtgcaaaacaaatcgaactgaaaaccgaaaatcgaaaattcgaaatctgaaaaatcgaactgatataaatgaaactataatattgctgcccaccaatcgaccggcaaccaggattcaaacggccgccgacatgcgctatctgcacgacctgaatgtccagatctcgcagaaccgtcgatccgtctccgtttccaagcaactggacagggatctgtgcaaccaacatttcgacacattcgaaacgttctggggcagaccaggacatggagcccgtggcgacaagatcaacaaactgaaactggacaatctgctctatggcgccagcgaatcggcgtaa

SEQ ID NO: 39099 - protein, 116 aa, DROSOPHILA
MYVSPCKTNRTENRKSKIRNLKNRTDINETIILLPTNRPATRIQTAADMRYLHDLNVQISQNRRSVSVSKQLDRDLCNQHFDTFETFWGRPGHGARGDKINKLKLDNLLYGASESA

SEQ ID NO: 39100 - DNA, 4662 bp, DROSOPHILA
tgtaatttaattcaccaccctgaccatattttttagttttcccttaatttagaaaacaacctattcaaaactttggtcaacttactagaagcaagttggcaaaattttcacagagatagtacaaatgacatataggctgatattaatattactggaattgcgaacttgaagaacctaaaatagtaataaataaataattactccagtaatgtgatttcatgggtcttggcatcgattgatttctgagcagatgacttaagcgcacaaactacgagccagtcagaaggtgagggaatatccttgaatatccaagaatccttggccttacgccgattcgctggcgccatagagcagattgtccagtttcagtttgttgatcttgtcgccacgggctccatgtcctggtctgccccagaacgtttcgaatgtgtcgaaatgttggttgcacagatccctgtccagttgcttggaaacggagacggatcgacggttctgcgagatctggacattcaggtcgtgcagatagcgcatgtcggcggccgtttgaatcctggttgccggtcgattggtgggcagcaatattatagtttcatttatatcagttcgatttttcagatttcgaattttcgattttcggttttcagttcgatttgttttgcacggggatacatacatagaagattggtattatgatttttgacttttgctgttgcggtttgtttgattttggtgagattggtatttggtttgctcgtttggttgctatactttcacttgtattacaatggatattttcttgctggatgagccgaggagaagtgggggattagagaaaccattaacagaacaagatcacaaggcaaaggcatagaggggcaagcggactttcgtttcaatgtctggcgcagagcaagcaaatgagaaacggtgggagcagggaggtggtggaatggtagtactatgaaagcaggaggggatcgggattgatagaacgtgggtttcaagcctggcgaatgtgcagggtcagccgcttgaggcagcagcccgtggccaaggccgtggggcaatcgcaactgcaacactgcagcttgcagttcagattcttgggcagccgcttcatgtggctaatgttcttgatgatgctgttgatgcacttgatcttggtggtggtcagctgacagttctttggtggatgcttgtgcttggatgcgtacctatcgtgcgacggtgtcctcttggtcacgtccgtgctggagagactgatgggtcggtgcatgccacgccttctggcgagcaggggaaccagctccaccccaccaccttcgccataggctcctccctttcctcccgctgtgctgggatccggagtggcggtactggtgctcccgggacagggacctctcgacgctatgcgggggcacaacttgatgggcttgctaccgcagtcctgcggcttcaagtggtgcagcatttttccgggcggcggacctggcggacccgggcactttttgcctggcggaatgggaagtgagagtggcgacggcttgggcggactcttttgcatggcgggacatttgcaagtgcacaactcacagcagcgctgcggctttggtggcttgcctggtcgcgatttgcgaaaggtgttcttctccgcgggagtcaccgggttatcttggtccaactccttcagcatctccttgttcgtccaaccctgaaattagattatatttaaacagtgtacatatgagcacaagcgactgatacccaccagtgacttcatgaacgtgttgcccacttccttgggactccgccatggcttgccgcccggacccgccttgccccacggctccttgcaggactagaaggaggacagataaagagggattagttaaacttggtttcagggggcgtaataagtgccgctcaccggcttttcgagtttggcttgcaagcgcttcttctgagtggccagcttttcctgcaaaggacatcgctgctcactctcgctgactacgatcttctccagaagcggcttccccttgcacggaggagagggcttgtaccgcaattctatgtccacatggcctttattgcgaaacgacattgaaggatgttctttcagctcgatgtgaaggctctcaccgttggcgtttttggccacattgacaccaactgccgctccgggcttgtgcggaatctcccgctcgcaaatcgttacggtgctgctcctgggaccactttcctgcaggtgatggaccgagtgggcgtggcccagtcggccacccggcggcggagcaggcggggcgtggtggtggtggtgatggtaggcggccagcgggttgttgtggcacttcttctgcatcgagaagaagtcgttgtagcgacacggctgcagtagattcattcggtgggcattggtctgcggcacattcaaattattggagtagaatatatgttattcgagaaggattcaagagtccttaccactgtgggcgtcgagtgaaggccagcggctgtgatgtccttgcgtcgcacctctacgttgggtgccccaccaccaggtcgaccccagggacaatgttggtgaaacaggtcgtagtactggataaaagaacattgttgatacgaattgatcttcaacttatttcagtaaagattgtgatgcttggaaaaatcgtttaggcaaactaacgtatcctccgctgaaatcatgaatcgcattacccgcaataaagtcacaacataaatacattaaattacttccgcaggacgattacaacaccgagttatgccttatcgattgggtggcagcctatttgtggctccagactgcctcaacccacctcgtcgtgtcactccgcgaagtgtggcgatgtttgtttacggaaattggcaaattcaggagctcccgctgccctggcccacaaagtttgttagtaggttgttgttatagttgcagcgaacggcgatttgcatttcactgatttttttcacccacatttcggttggcgctttcacacagctgcaggttgtgataggtagtggagcaaggagccaggactccagtcacgcaaggactcgcaggagttgggcttttagccgaagagaggggatttgattaccgaagtcgaaattgtcaaagggtttgttgaaccagatccgcgggggcggatgccttacatgttgcttgaggcaggtctttgaacttaccaaaagttgcaactattgcgtggcggatggttcgagatgtttttcgattgtcatttcgttcgtttctggttttgccttagacttagacaaagaacttggaacttggtgaattgattatggcctttaaagttttaaaactaatatatttagggttcagagttccaagcttaaggtgtttcaggtaactactaacaactttgcttggggccctaaaatataactcatacgcacggtctggaaatatcacacacatacgcactgttacccacctcctgcttatccttctccttgcgagcacactcctccgccttccggcgccgccacatgcgaagactctcctctgcattcttgcgctccacaagacgcttcttctcatcgcaccacatcagcggatgctggatgtggtcgtggcagaagttgccccccatgcccatttcatcgctagtcgtcatggctctctgaatgctctggagatcctatctggatgtttgggaaactggtagaacgagaacagaagtagcgctgcgttcagcaaacgcggcgttactgaatcggtctcgtgtcccatccaagccgtttaaccgccgaattggctgccaggatccgtgccaggcactaaagggccgtggatgatgggtcggttgtctaggcagcacgcccgactatttataacctaggttaaggcacacttcggtcgtctgtccttgaaggcgagtcgaaggatatcgaaacctcagctaatttggtctggctatttaaatatttcgccagttagacacgatgtttgcctgctccactttgctagactgcctggacataaaatatattgactttatgttgcctggaaataatgccacggctgcgttggcttaacctgaatcgtgatgctctgttttaatgaaacgcaaaagtaagcctactgcagtatagcgtgccacttaatacgaaacttgttgatgttttaaaatgaaaagctcttgcaagcctaagcagcaagcattactcatacgccccgtgtggcagttacaatttcagccagcaactcacaccgccaaatttatttgtttgccccaatttcggtttcagccatgcccgttgcaacataaggcattttggccatgtccaaaactatttcactgggtcaacctggttggtggttaatatgttgcatagctacaagcggcgaaatcagctccaatttgcttgttttacaaaatcgaatttttattcatctcattaggtatacaaatatcgtaattacatgtatcaatatcaacatctgtatcattattttgtcgttcgcactctaaaatatgtgggtatatcgtcgtcagcacccaattgtattgattaactagccagcaaatttctgcattatatctttcatttgcctttctttcagtgtagagcaggctgtaaaggagcccaatgaatttgcatcaaaactaaacg

SEQ ID NO: 39101 - DNA, 1593 bp, DROSOPHILA
atgacgactagcgatgaaatgggcatggggggcaacttctgccacgaccacatccagcatccgctgatgtggtgcgatgagaagaagcgtcttgtggagcgcaagaatgcagaggagagtcttcgcatgtggcggcgccggaaggcggaggagtgtgctcgcaaggagaaggataagcaggagtactacgacctgtttcaccaacattgtccctggggtcgacctggtggtggggcacccaacgtagaggtgcgacgcaaggacatcacagccgctggccttcactcgacgcccacagtgaccaatgcccaccgaatgaatctactgcagccgtgtcgctacaacgacttcttctcgatgcagaagaagtgccacaacaacccgctggccgcctaccatcaccaccaccaccacgccccgcctgctccgccgccgggtggccgactgggccacgcccactcggtccatcacctgcaggaaagtggtcccaggagcagcaccgtaacgatttgcgagcgggagattccgcacaagcccggagcggcagttggtgtcaatgtggccaaaaacgccaacggtgagagccttcacatcgagctgaaagaacatccttcaatgtcgtttcgcaataaaggccatgtggacatagaattgcggtacaagccctctcctccgtgcaaggggaagccgcttctggagaagatcgtagtcagcgagagtgagcagcgatgtcctttgcaggaaaagctggccactcagaagaagcgcttgcaagccaaactcgaaaagccgtcctgcaaggagccgtggggcaaggcgggtccgggcggcaagccatggcggagtcccaaggaagtgggcaacacgttcatgaagtcactgggttggacgaacaaggagatgctgaaggagttggaccaagataacccggtgactcccgcggagaagaacacctttcgcaaatcgcgaccaggcaagccaccaaagccgcagcgctgctgtgagttgtgcacttgcaaatgtcccgccatgcaaaagagtccgcccaagccgtcgccactctcacttcccattccgccaggcaaaaagtgcccgggtccgccaggtccgccgcccggaaaaatgctgcaccacttgaagccgcaggactgcggtagcaagcccatcaagttgtgcccccgcatagcgtcgagaggtccctgtcccgggagcaccagtaccgccactccggatcccagcacagcgggaggaaagggaggagcctatggcgaaggtggtggggtggagctggttcccctgctcgccagaaggcgtggcatgcaccgacccatcagtctctccagcacggacgtgaccaagaggacaccgtcgcacgataggtacgcatccaagcacaagcatccaccaaagaactgtcagctgaccaccaccaagatcaagtgcatcaacagcatcatcaagaacattagccacatgaagcggctgcccaagaatctgaactgcaagctgcagtgttgcagttgcgattgccccacggccttggccacgggctgctgcctcaagcggctgaccctgcacattcgccaggcttga

SEQ ID NO: 39102 - protein, 530 aa, DROSOPHILA
MTTSDEMGMGGNFCHDHIQHPLMWCDEKKRLVERKNAEESLRMWRRRKAEECARKEKDKQEYYDLFHQHCPWGRPGGGAPNVEVRRKDITAAGLHSTPTVTNAHRMNLLQPCRYNDFFSMQKKCHNNPLAAYHHHHHHAPPAPPPGGRLGHAHSVHHLQESGPRSSTVTICEREIPHKPGAAVGVNVAKNANGESLHIELKEHPSMSFRNKGHVDIELRYKPSPPCKGKPLLEKIVVSESEQRCPLQEKLATQKKRLQAKLEKPSCKEPWGKAGPGGKPWRSPKEVGNTFMKSLGWTNKEMLKELDQDNPVTPAEKNTFRKSRPGKPPKPQRCCELCTCKCPAMQKSPPKPSPLSLPIPPGKKCPGPPGPPPGKMLHHLKPQDCGSKPIKLCPRIASRGPCPGSTSTATPDPSTAGGKGGAYGEGGGVELVPLLARRRGMHRPISLSSTDVTKRTPSHDRYASKHKHPPKNCQLTTTKIKCINSIIKNISHMKRLPKNLNCKLQCCSCDCPTALATGCCLKRLTLHIRQA

SEQ ID NO: 39103 - DNA, 2264 bp, DROSOPHILA
atgaaaaataccttccttattcctttaagtgtattcaccgtatttgcaatagttaatctatctagtgaaatagcaaatagctgatagtgtttaccccgactgataagggtacaaaatccgcatgttcgacacaatacagaacagaacacaattgagatattacgtatacgcgcagttcccagtcaagtggagcacagttttgggggcactggcccccaatcagctgtttattggcgccacaaatagcgcgaaaatcaacaacgcgggcgataaatattgataaatacgagcaataaaccagagctcaaatgcaaccagcgaaattgcataactcaaagaaaaaatgaaaaaggaagaaaaacactgcaggctagcgacttgtcaacgatataaaaataatgacaaactacagacagaccagaaagagacataattatcgggccagaaagagaggcagatgaaaaacttcaccttgcaaaaatgcggggaaaaacacatggaaacgttgcggagaaaaacagaggcgttcggcaaatggtaaaaaagccaaggcacaataataaataaatgcgccagcttccgccaacaacaacactgcaactgtgggcgcaacaagttgtttttcacgctacttgcacaaaagcaatggccaacaaccaacaaccaacaagcaacggacaactgccagcaaccaatttcactttcattttctttttggctttgcagcgaagaaaagaaaagcggacagcaaaagccaaagtcacgcagacgcattagcggccaaaagagttggcttgcagccaatgcactctgcacggcaaaaaaaaaaaactaatacattttcaatccaattttataaggatttatttcacatttgcaaattttaaaaggaatcacttaaattgtactgcttataaaaagtatcttttccttttcaagtttaccagaaatgaaatcctcatattttccatatttttctaacttcaactatttttaccatttaacacaacacttttctcgctgtgtaggcttcgcccgacagtgaacttaccagcagatcggggtaatccttgcccatgctgaagcttaatccgtggtagagtcgcatggcctgctgttgaactttgggcggactgaataatccggttgcggcggacggggctgtatatcctggccgggatccgaagagctgatagagcagcttgtgcgcctgctggcgacgcgagccgcacacgacgcgaccggaagtgctcaagcaggccattttgtgggttttgtttgtgaggatttgtaagtagcagggcttatgcgatggtttttttttttgtgggaagggtaggatgcagcttcttgatcgagacacaggcacagaattcaacaggtgaacagcattatagtgggttttgtttatgttttttgcaggctcgcaggatttgaaaaacgcgcgattgtgtggcgagttcggggtatcgatggactaacgatttcgaggcgacggcgaagcgcggtttgcttgcgtttggcttcagcagctccagcgaagtgttttcgctttttgtggatttttgaatcgatgcgcgtgcgcgcggtcaggtgtggtgggaatcccactggccgactgtggtggaaacgatcgctcacgaaggtaagatcggcttgaacttgaacggggatttcggtggctaaggcagccacgcggttttacagtcactgggggtcgaggtctgtttggatgaccccaggctacctatgggtcacactattggagggatatatctggactcaagcgttgctcacagaggtcctatggccactaccgccactaccaattagtcccgccagtgtcctcatgttccgcaacaactgggacgctcaaagatcccgatgaaaacgcgtttttccgcctggcaaatagtttttatttaactcgcacgcaatttgcaccttttcactactttattttgacgtaacagtgcagaacagctgctgcgaacagctgtttagggttgcaacgtgcgcggtgacgcaaggcagccggctaaaacgtagcactagaagtgtgcaacgtaaggcgacaaagtctgcaaccttaaaacggtagttatttacggatgctgacattattttaaaagtagttacaccatttttattgctcttttttgaattaacatttttacatctattttgtgccttacttacgtttttctataaacatatcgatagcacagctgtttcctcttgcgcatctctaatcacgtttacgt

SEQ ID NO: 39104 - DNA, 264 bp, DROSOPHILA
atggcctgcttgagcacttccggtcgcgtcgtgtgcggctcgcgtcgccagcaggcgcacaagctgctctatcagctcttcggatcccggccaggatatacagccccgtccgccgcaaccggattattcagtccgcccaaagttcaacagcaggccatgcgactctaccacggattaagcttcagcatgggcaaggattaccccgatctgctggtaagttcactgtcgggcgaagcctacacagcgagaaaagtgttgtgttaa

SEQ ID NO: 39105 - protein, 87 aa, DROSOPHILA
MACLSTSGRVVCGSRRQQAHKLLYQLFGSRPGYTAPSAATGLFSPPKVQQQAMRLYHGLSFSMGKDYPDLLVSSLSGEAYTARKVLC

SEQ ID NO: 39106 - DNA, 2645 bp, DROSOPHILA
agagacagagccaagtcgcattcaatgcgattagttaccgcacatgtctgccacctgaatggcttaataccttgcttaaatgcaaatcgaaaagtgttttcttatataccaatatttttagctggctaggctagagcctttagctagctgaagaacaaattaaagtatatattgttaaagagagtcccattaaagcatggtaactaacctctggatcaacaaggactcaatgaaggaatcgctatccgctgtgcaatcaacagaaaaccgcagggcgtgtggcgcatttcgaatgggttaggtatagcaatcccccagagctcacctggaaccagctcccaattcccagtccccccagcccaatccccaggtgcctgccctatcctggccacctgtgcacgcggtttgattcgaatggtcagctgtttggccgccggggctttagttaccattaccattgccattaccatcggctttggctttggcatttggcattgttgattggggcccttgttattcgagtattttgcgtgtaattaaaattgtgcaggacccgcgctgcagcaaatgataaattcataaactagggcaggggtattttcgctgctgtttgtaaattaattaaaatactatagcagcatacattgggttgattttgtcaatattatcctaattgaaatattatgtatgtagtcgaaattgtcgataaacagcatgtgtttgtgttttgcctgtgccatttattattatgataaattagtaagcctaatattgtgataaacaactgcgtagatgtgtaagttgcatgcccggccgtctgtccctaaaactactgaacaatagagcgtgattagagccctgcaagaaagctaaaccttgtttgtattttcaaccccaccacccccgtactacaaccccaaaccacccccaattggattcgatttgcgatccccgaaaccagacgcactcctcgcactcctgcagcgaggaggacgaggccatgattgtcctggaggccctgcagatggaggcgcagaccaccaacgatgagaccgaagacaccgaagacgatgaggccgccgaggccgaggacatgtttgatgcggatgctcctttgatgtcccccacgggcagccacaatagctcgaataacaataacaacagcagcaacaactgcatcgccaacaacaacagctgcggcggcggcggcattcgtcaatccaatccatcgagcaatattaatttcgataattgcaatgcgaatgtctactgtggtcagaaggcaaagcaactagggccaattaccagcggcaaccaaacgtcaaattgtcccacattgaacgcaaatgcaaatgcaaatgcaaatgcaaatgcgaacccgaatccgaatctgaatctgaacccgaatccgagtagccacaacaccaatagtcactccagtagccaagcgaatgcgaatgcgaatcccccacccaacaccaccaacaatatcacagcagcaactttagttgcaggtgcagcagcagcagcagcagcaactggcacggcagcaacatcaactgccaccaacctgcaacaaaatcaaaacatttcctccagcttagagataatcctttcgccaattatccaaagtagtcgacggtaagttttattttcagttcgttttcgtttcgtttcggttgccgttgttctgtttgttgagtaggtacaacctattttctgttctctgtagctaacaagaagtaataccgataccgacctctgacctgcatgctaaaaccgagaaacaacagaagtgacttttcctttagatggaaatgtatgcaattttttcttctacccaggttgttcagcgttgagttattgtgtctatctgctattgttacggattgcattgaagttctagctttgagatgttgacaaaaacaaaatgagttgaaagccctttgttctgttaccccgatttttcttccctgccacacattaaactttattgaacagcgcgggaaatttaaaagaactcaaccccaaaaaccagatacacgacagctcctttaagtgggcgaaaacaaaacgaaacgaaaacattataaattatgtattaatgtgcccgttaggcctacgcaacgcggaaatgtcgggacctcccagctgccaattttcaattgcctttgggccaagataacaatcgacttgggggccaggacaatggcaaagcctctcaggcaaacattcattttcatttcaatttcacttgcctgctccttgctttcgttctggatttacatttgatttgactgcctttccccccatttttgtgcccggacatttttccgcgtggaggggcagcacagaaacgcacaaatatttatgtaagctaggaaattcgacagcctctttacaaatgaataggttaatgtcatcggggtggaatctgctcttttgtttacgagcccaacttggggcaaattgactttaaacatgtcaatttaaattttgggacccccatccagccagccaacccagcaggcctcattaacggccacccggaaaagtatgctatggcaaacgcagaaatattactcatacgccgcattgcacgcagccattgaagcaacaaaacgacaatttcacaacaaattaac

SEQ ID NO: 39107 - DNA, 645 bp, DROSOPHILA
atgattgtcctggaggccctgcagatggaggcgcagaccaccaacgatgagaccgaagacaccgaagacgatgaggccgccgaggccgaggacatgtttgatgcggatgctcctttgatgtcccccacgggcagccacaatagctcgaataacaataacaacagcagcaacaactgcatcgccaacaacaacagctgcggcggcggcggcattcgtcaatccaatccatcgagcaatattaatttcgataattgcaatgcgaatgtctactgtggtcagaaggcaaagcaactagggccaattaccagcggcaaccaaacgtcaaattgtcccacattgaacgcaaatgcaaatgcaaatgcaaatgcaaatgcgaacccgaatccgaatctgaatctgaacccgaatccgagtagccacaacaccaatagtcactccagtagccaagcgaatgcgaatgcgaatcccccacccaacaccaccaacaatatcacagcagcaactttagttgcaggtgcagcagcagcagcagcagcaactggcacggcagcaacatcaactgccaccaacctgcaacaaaatcaaaacatttcctccagcttagagataatcctttcgccaattatccaaagtagtcgacggtaa

SEQ ID NO: 39108 - protein, 214 aa, DROSOPHILA
MIVLEALQMEAQTTNDETEDTEDDEAAEAEDMFDADAPLMSPTGSHNSSNNNNNSSNNCIANNNSCGGGGIRQSNPSSNINFDNCNANVYCGQKAKQLGPITSGNQTSNCPTLNANANANANANANPNPNLNLNPNPSSHNTNSHSSSQANANANPPPNTTNNITAATLVAGAAAAAAATGTAATSTATNLQQNQNISSSLEIILSPIIQSSRR

SEQ ID NO: 39109 - DNA, 2277 bp, DROSOPHILA
atacaatatcccatggtttgaaaatgttgatagatttcaacaaaacaatatccgatgaatgctttattttgttcccataaaaatgagataatcttaacctcggacttgcaacactttttttcgactttaatgcagttccctttgcaacacacagccccaacttggaaagggtatttccacaaagggtctgcgtgttcgaccttggcacaacgacagttcttgttttagattagagcccctggtctcccaaccccttggcccccgcaattcggccatttggagcccatcgcgacttgtagctaggccacacgccaccagcaacaaagggactcggggaaactttacgcatttttgtcacagaaagaaaatagaaaacgaaaacgaaagcggtggcgcaaggaaagtgctgaaaatgtggaaagtgcccgagtggcaatcgtaaatttgacgcacatttttgccggagggcggagagataagcttatgaatggctttataaaaactcaccccatttacacacataatgtagaatgactttttttccaggatttctttttggtttatgattaaattaagtaattatttgtggtgcggcgccaactgaaatgataaaaagtattcaatttgtggcagttgctgcgataaaactgaatttactgcggccataaactgcgtggcggcacttgaactatatttttgtaaatttatttcgaattgaagagcaccataacgcatacgcaccgtagttgctaaaacaaactaacaagctatactcacaagcacacgcatatatatacataaaaacatacgcatacacttacacatacacttacattaccgagcactagagaacttaaatgagaaaatcgaatcaacaaggaaactttttctaacatgtgcaaatattttctctctttcttcccacccccaaaaacaaaaaccctcttttctccccacttttattttcatgccatgcaaatgcaactactacaaaactacaatgcaaacggcagagcgcaattgtaagcgaaatgagcacagagttgtgagaattagctaaatttaatttgcaatagccaaagcccgccgaccatgcccctgcagcaagagtaaactgctcctcgaacccgccgcccactgcattctgcaaactttggttgcagcaacagcagcagcagcagcaacagcagcagcaacagcagcagcagcaacagcaacaccagcaacaccaatcccagcagcagcaactctacgaacagcagcaggcttggctctagaaaagaataaacacgcacaacgtgtaagtggaaagttaaatggaaactacatgtgcgggttcaacatcaacaaagcaggagcaacaataaacaacatttaaaagccgctggggctgaagttggagcaaaacttttcaccagcacgttgcgtttgcaaattaaatgcacattatgccgacatgtaaatagataatgctgtatataggcaagttgggacagggaaacttaatcgtaaagcgagcaggcccagtaatcttaagacgcgaataatcaaaaagccaaaaaagcaaatgtatctcacagataaacaacagcaatcgggggcctgtgggctgcaggatgaaagcaaaaagctgaaagtagcataaaagcaaaaataaattgtgcgttaatgataagcggcgcacatttcagcggcataaaatttattaaaatatgcgcacaaggcagacagcgcggaaaacttagcaatgccgggcccccaaaagtaggcagcacaaacagacccacgcagacacacacacacacacacacacacacagacaggcacatactggaaaaggacttcttccggaaatcgttggcgataaatataaaattttattgtgctccgtatctggccgaatctgtatgtgtgtgtttgcgtgcgcctggaagtaaattaaatatacgtttttattaactactaagaaccaatttgatacgcatttaaataatgcctcttacacaagagcacacagaagattatgtaaaatttaattttactgcagccagcggcagcaacgagaaaagccaaataaatgtagaagcctaaatgtgtatgtaatttaaataaaatatattcgtagaagagaaagatactctagtgtagccccaactacttacttacttatgccaacaacgtccaacaatttcaataatatttacgtaagcgaacactttcgaccatatacgttaagccccatttagcttagtttaatcatttgcaactaatttaagt

SEQ ID NO: 39110 - DNA, 195 bp, DROSOPHILA
atgcaaacggcagagcgcaattcaagagtaaactgctcctcgaacccgccgcccactgcattctgcaaactttggttgcagcaacagcagcagcagcagcaacagcagcagcaacagcagcagcagcaacagcaacaccagcaacaccaatcccagcagcagcaactctacgaacagcagcaggcttggctctag

SEQ ID NO: 39111 - protein, 64 aa, DROSOPHILA
MQTAERNSRVNCSSNPPPTAFCKLWLQQQQQQQQQQQQQQQQQQQHQQHQSQQQQLYEQQQAWL

SEQ ID NO: 39112 - DNA, 5278 bp, DROSOPHILA
ctacaaggaatcaaggaatcaaggtgtccagagctgtccgtaaattgggttcgaatttggatttggcatttttttagcagagctgtgcaagcagaacgagtcttttaggattttcaagtattctcgaaaggtggttatgcaaactgtgaagccccgataaaagctattgtttattattaactgcatttgaaaactaattttttgagaaatttagtaaccatgctctaggcttggcttgatctagaaagctagaagaacgcttgaacatactcatcggaaggatctacaaagcccatcttagtacccacaaatgaacatgaacattttagagcacgattgattactttttattgatttaaacgaatctagcttaagtgacaccgcaattaaatttcacttgtctaagttaatacatacatttaggttgctcagtttaggtttcacatgtgcatcgtagagggtgctgcctgtacaaagcccaagccaatatacaaaaccatcgcataatgcacatatccaacaagagaaacgattaaagttgttgaacgagaacaggaacattgccaacatacatattaatatactgaaaataacactatatgcaaattgttgtctaattacgaatccaatcgtatcgaatcgaattgatctagcattgatttaaactttcattagttgttgttgctttgagtgttcgtcacttagtgttattcatatgaaactattattgcctatttagcattcaactaattaactgttacacattaaatatggagccgcagctggggaatcagtttaactactatgaaacatattgttgacaataatattgtatttatatataaatgtatattatattatatgatgtataccctacaacctctgtatttctggaaataagaacgataacgaaatctaaatggactgcatttatttgttcacttgggaaaaggagtttcactagacatcacaagtgctggatgattatttagtcaaacttctagtccccggaaatgctcggctccgaagcactgatatactggatcaagccgagtctcagattctccatctccctctgcttgaggaccttttccgcttccgaaagctcatagttcttggtccggatgtacaccttaagagttggtgcgtatgtggtggtctccgcttcagcttcgagtttcttgaaatccgtcttcagcatggagtatattctactggaggaattaaggtctctgggcggcctttgcggtctcacgccatcgccaccactttcgtcgttctcctcgctcggatcttgattcattgatctgatttcgcttcgcagatctaagcttttccgcttgtacagatccacaaagtgctgctccatggccagtttcagctctgcgaacttggagtctatgcgcccgtaccaacaggccagaccattgtagtcctcatctgagaacttggccgtacgacgcaaatgggccaaggaaatatcgggcacagatctcaggaagctgtgggctccggatgacctgcttattttacttaagttagtagaactttggaaagcgggcttggacttggacatcatttttcgagctttatcgagacatccgaatgccacatcggccatccttaggatcttgcgcctggaatccttcaagtcaggacctatgggcagctcaaacaaaaccactacaggagtaggactcttgaagtcaaaggactccctcaagcaatcgttcatcagggtgctaccattttgcctgcctcggggcaagctcgtaaagaactccaccaaatctggtctgttctcgctgccgaagatgtgaaacaccgaaagatgaatccggtgctccaagaccaggctatcccggtacacaatctcgaagtgcaaatagtcatcaccgatcccacggcctcttaacagggctagatcattagttagccactggtgcagttccttggtgctggagacactttttccgctaggcgaatcccttcgccgcttgggaacgcccttgggttgcaccagcatgttgaccatgtcgaacttccggacatcgaagtagtccacattaattgcttttaggcggcagcgcatctcgaccatcagtgagtcgacttcagtgaccaagagacgtgtcaagaggctgggattatggtttctttgggatgagatccgcagaagacttccattgcgacggtgacgaaacatctgacctagcatatcgcccaactctgtcctaatatggctatcaaattcataaccaataccgtcgaactccaagtggcggtagtaacgaggaggctccatcgagttagcaggcttagttgtgttcttcggcatcctcaacagcattgacttgtggtccaagatcctgatgtcactctccagactttgatcatccaagtaagcacgtctcctggaatctgtaagagcgaccaacactacgtgatcctttttgttcgccggaggtctgttcatggtgaagattttttttctttttttttagaattttagaaaattttgaaagctgtaatttcgacagtctaaaagtagagtttgagattaaagacaaataactcatttcatgattgaaatccagtaagtaaaacaacattaaacttgaaaagtttattggattaacattaaaaaaaactttactgaatcttctttattgcctcacatttacccctttttattaaaaagaggcatttccttaaggtcataaccaacagatatgtaacaattcccaggataactaaagcgccaaccaaaaaagtgccgaagacatctagactgtggtatcttacaaaacccaagtccttgccggcgacttgcatgtgagcagctcccttgtgagacaggacatactcggtccaccagatcgccgtttccatgggcttcattggttgatcccgatatctggcagccgtgatccttgccgtttcttcgaaactcttgttcgttagcagccgtataattgtagacctaaattcctcactggtcatttgctttatgttgaggaccaaaccaagacccacttgccggacatgatccatatttcgaaactgatcgaataggcagggcaaccccaacatgggctttccatggtgaatactctctatagtgctcagtagcccgccgtgggttataaagagttttacattgggatgggccaggatggcctgctgcgggaaccacttactaatgaaaacattggggggttttcctggcagcagttcatcttcgaacttccaaacgattcgctgtggcaagctggcgaaagtctcgagcaatacctttcgacgatcctcggatagcgatttgcttttgacattggttcccagtgagaaatagattacccccgattcaccagcaccttggataaagtggtccagttcggcggacagagcctctgtgctgtgatcgacatgcagaccacccacctggatcatattcggaacataaggacgaggaggacccagtgtgaagtgctgattgaccaggaccaaatcaaagttccgggatatctctgacaagggtttccgctcagcgacgctggggaaaaattgactatagagagtctcctgttttctcacatgtcgccatttatagttcatataagaaaaagttcgctccatcaggtgcaacaaccgctctccataggcctccagatcgtagaatcgagaagagggagactgcaggtaagaaatcggtgagacgttgcccatcagttcgtcaatcttccagtcggtgccataggaagccattccgatgatcggggcatcaaaataggcagccaggccactgagcacgtccattcgccagagatccattatcacaagatcgaaatggggcttctgtgggcctagaatatcgcgccttacgccctcgttattcagcactgtcttcgtaagattaaggacatattcgttgatgaaatcactactttgccaggtgctcctgggagtagatgcaatcctaaggacctctggaaaatatcgtaagtatttctatttgacaaatcagatctttatttatctcatctcaccattaaagttttcgaaaacctcgggaactggaatatcgtgtatattcctaaacggctccctttgtggatacggacttacactggttatttcgtggcccagggaggccaaactcttaaggtagggtaaggcgaaaaagtaatgcgaagaacttggcaaagggaacactgccaggatgcgagcaccttccgagtaaccaggaagaagacatacgagcagaaagattggcggcattgttgcacttggcaagttctgccttctagacgaaatggaagactgaatgctgcagatcgccaatgaaaactctatttccatttcagataaccttaatccgctgcgctttgagtacaattgtcaaattttcaattagataagcaaaaccaacaaggaatgtcaacagtgaagagtgctgttaaatcgcttatcgcggaatcccagtgggaggagttttcttctcttttcaattagttatcatgggaataggcctctttgtgggcaaggcctacgtttgaaaacaaacacttatctatattttattgaaaaccgaccattgtcattcttcggttcaaaagacaacgaagtcgaacgttggcgccaagtatcgatagtgccaacattggactttcaggcttgttatcgacacttgtgcaccactagccttcagtacaaaatacgcaaaaaattttctttttccggaaaattaagtggaaagcgcaacaggttgttctctttacgcaacaaaaacggcaggagttcgcgtagtaactcatttcacatcgaattcaagtcgaatacagcagcaaagtaatgcagcacgcagctgatttggaaacagctgccagcgcagtttgtgaaattgcacaccggctaaaataacccggtgggaaatccgaaggaacttccgatccagtattccaaagcacccagatgtagccaagacttatccactaaccggagatttaatgcagaaatggcggatgaaaaggccaaggaatccttccgcgagcggcaagcgcaggagttggaggttataaaggtgagcagagcaggtgtttcatccaagaagctgatactaaaggcttatctccttatcttggaacagtccatctttggctgtgatgtggaggacctaagaccccaggcgaatccttccctgtggaagccaacggacatacggatacaacttaccccacttcgagactcctcgaacggactggaaacctatgtgtgcacc

SEQ ID NO: 39113 - DNA, 2820 bp, DROSOPHILA
atgccgccaatctttctgctcgtatgtcttcttcctggttactcggaaggtgctcgcatcctggcagtgttccctttgccaagttcttcgcattactttttcgccttaccctaccttaagagtttggcctccctgggccacgaaataaccagtgtaagtccgtatccacaaagggagccgtttaggaatatacacgatattccagttcccgaggttttcgaaaactttaatgaggtccttaggattgcatctactcccaggagcacctggcaaagtagtgatttcatcaacgaatatgtccttaatcttacgaagacagtgctgaataacgagggcgtaaggcgcgatattctaggcccacagaagccccatttcgatcttgtgataatggatctctggcgaatggacgtgctcagtggcctggctgcctattttgatgccccgatcatcggaatggcttcctatggcaccgactggaagattgacgaactgatgggcaacgtctcaccgatttcttacctgcagtctccctcttctcgattctacgatctggaggcctatggagagcggttgttgcacctgatggagcgaactttttcttatatgaactataaatggcgacatgtgagaaaacaggagactctctatagtcaatttttccccagcgtcgctgagcggaaacccttgtcagagatatcccggaactttgatttggtcctggtcaatcagcacttcacactgggtcctcctcgtccttatgttccgaatatgatccaggtgggtggtctgcatgtcgatcacagcacagaggctctgtccgccgaactggaccactttatccaaggtgctggtgaatcgggggtaatctatttctcactgggaaccaatgtcaaaagcaaatcgctatccgaggatcgtcgaaaggtattgctcgagactttcgccagcttgccacagcgaatcgtttggaagttcgaagatgaactgctgccaggaaaaccccccaatgttttcattagtaagtggttcccgcagcaggccatcctggcccatcccaatgtaaaactctttataacccacggcgggctactgagcactatagagagtattcaccatggaaagcccatgttggggttgccctgcctattcgatcagtttcgaaatatggatcatgtccggcaagtgggtcttggtttggtcctcaacataaagcaaatgaccagtgaggaatttaggtctacaattatacggctgctaacgaacaagagtttcgaagaaacggcaaggatcacggctgccagatatcgggatcaaccaatgaagcccatggaaacggcgatctggtggaccgaacctccggcgaacaaaaaggatcacgtagtgttggtcgctcttacagattccaggagacgtgcttacttggatgatcaaagtctggagagtgacatcaggatcttggaccacaagtcaatgctgttgaggatgccgaagaacacaactaagcctgctaactcgatggagcctcctcgttactaccgccacttggagttcgacggtattggttatgaatttgatagccatattaggacagagttgggcgatatgctaggtcagatgtttcgtcaccgtcgcaatggaagtcttctgcggatctcatcccaaagaaaccataatcccagcctcttgacacgtctcttggtcactgaagtcgactcactgatggtcgagatgcgctgccgcctaaaagcaattaatgtggactacttcgatgtccggaagttcgacatggtcaacatgctggtgcaacccaagggcgttcccaagcggcgaagggattcgcctagcggaaaaagtgtctccagcaccaaggaactgcaccagtggctaactaatgatctagccctgttaagaggccgtgggatcggtgatgactatttgcacttcgagattgtgtaccgggatagcctggtcttggagcaccggattcatctttcggtgtttcacatcttcggcagcgagaacagaccagatttggtggagttctttacgagcttgccccgaggcaggcaaaatggtagcaccctgatgaacgattgcttgagggagtcctttgacttcaagagtcctactcctgtagtggttttgtttgagctgcccataggtcctgacttgaaggattccaggcgcaagatcctaaggatggccgatgtggcattcggatgtctcgataaagctcgaaaaatgatgtccaagtccaagcccgctttccaaagttctactaacttaagtaaaataagcaggtcatccggagcccacagcttcctgagatctgtgcccgatatttccttggcccatttgcgtcgtacggccaagttctcagatgaggactacaatggtctggcctgttggtacgggcgcatagactccaagttcgcagagctgaaactggccatggagcagcactttgtggatctgtacaagcggaaaagcttagatctgcgaagcgaaatcagatcaatgaatcaagatccgagcgaggagaacgacgaaagtggtggcgatggcgtgagaccgcaaaggccgcccagagaccttaattcctccagtagaatatactccatgctgaagacggatttcaagaaactcgaagctgaagcggagaccaccacatacgcaccaactcttaaggtgtacatccggaccaagaactatgagctttcggaagcggaaaaggtcctcaagcagagggagatggagaatctgagactcggcttgatccagtatatcagtgcttcggagccgagcatttccggggactag

SEQ ID NO: 39114 - protein, 939 aa, DROSOPHILA
MPPIFLLVCLLPGYSEGARILAVFPLPSSSHYFFALPYLKSLASLGHEITSVSPYPQREPFRNIHDIPVPEVFENFNEVLRIASTPRSTWQSSDFINEYVLNLTKTVLNNEGVRRDILGPQKPHFDLVIMDLWRMDVLSGLAAYFDAPIIGMASYGTDWKIDELMGNVSPISYLQSPSSRFYDLEAYGERLLHLMERTFSYMNYKWRHVRKQETLYSQFFPSVAERKPLSEISRNFDLVLVNQHFTLGPPRPYVPNMIQVGGLHVDHSTEALSAELDHFIQGAGESGVIYFSLGTNVKSKSLSEDRRKVLLETFASLPQRIVWKFEDELLPGKPPNVFISKWFPQQAILAHPNVKLFITHGGLLSTIESIHHGKPMLGLPCLFDQFRNMDHVRQVGLGLVLNIKQMTSEEFRSTIIRLLTNKSFEETARITAARYRDQPMKPMETAIWWTEPPANKKDHVVLVALTDSRRRAYLDDQSLESDIRILDHKSMLLRMPKNTTKPANSMEPPRYYRHLEFDGIGYEFDSHIRTELGDMLGQMFRHRRNGSLLRISSQRNHNPSLLTRLLVTEVDSLMVEMRCRLKAINVDYFDVRKFDMVNMLVQPKGVPKRRRDSPSGKSVSSTKELHQWLTNDLALLRGRGIGDDYLHFEIVYRDSLVLEHRIHLSVFHIFGSENRPDLVEFFTSLPRGRQNGSTLMNDCLRESFDFKSPTPVVVLFELPIGPDLKDSRRKILRMADVAFGCLDKARKMMSKSKPAFQSSTNLSKISRSSGAHSFLRSVPDISLAHLRRTAKFSDEDYNGLACWYGRIDSKFAELKLAMEQHFVDLYKRKSLDLRSEIRSMNQDPSEENDESGGDGVRPQRPPRDLNSSSRIYSMLKTDFKKLEAEAETTTYAPTLKVYIRTKNYELSEAEKVLKQREMENLRLGLIQYISASEPSISGD

SEQ ID NO: 39115 - DNA, 6958 bp, DROSOPHILA
cgtccccgaggtgttgcataatatttaacacccgacaaacccactgatgtttatcattagcagaccaaaaagatactttatctaccatccacggggcgaggaaaacttttcccgcattttgtgtcaaccccgtaggcttgtttattttttttttctcttggtttcctgtaaattttataattgcttcaatatttcgctcttccgcagttgtcgtgctgcggcagcgttttttgtgtttgccacacgtttcatagccataacaaattacttaggtcatcaattatgaggtgagacactcgcacctcaagcgccgacatcgttcttgaatggttttgtttctgtttctgggttctcggttctggtctttggactctgggctctgggttgtctgttctgcgttctgtttctggttgttggtgatgcttttattgctttcattatgatttcatgcggcatgaggcacgttccggatggcttttccccccggaaaattccccaatttccaccggttgacgaccatttgtctaacttcagaggtttgggcattttgatgcggcgctcgtctgtgggtggtctttgttaataatgttatcttttatttataaagctcaactttttgttttcgtttaaactttgctcctgttgcgggggtaaatgtaattgcatttcgtgtttgaataaagtgccaaataatttcacctaaagcgacacagctgatgtaaataatttggattttcaaacattaatttatgatcttatgaactcatttgtttaatcccacattttcacccaacaacactttaattatcgattcaactttcaaaatatatttcaaataaattaaacaaccttagaatgcttagaaagtagacaaaataaataaatgcccaaaggcagggcggctggcagagccacgcataacaagattgagtacctgtgcagccagtggtttcggtggttctctcggtttcggtagtggtggcggtgcacggttgctgatttagggcttgtagacgaaggcaccaccgcagttcttgtagcacaagtagctgggacgggtgcgccacttgcggcagtatctgcgatagcagttgttgggactgggcgacggcgggcggttggtgggtggctcattggtaggaggctgattggtaggaggctgattggtaggaggctgattggtaggaggctgattggtaggaggctgattggtaggaggctgattggtaggaggctgattggtaggaggctgaacggtgggtggctgattggtgggtggctgattggtgggtggctcattggtgggtggcccgtaggtgggtgtctcagtgggagactgcgttggcgaatcagttggcgacccagttggcgactcagttggcgactcagttggggactgagtgggtgcaactgtcgtggtcttgccgctgcagtcattggccacattggtgatcaagtgactcagcaaatcaaccacaagcaacacgctcaaatccacatcaaccagttgaaccacatcgttgttgttaccaatgatctcagtgttgggtccagctgaaaacggtgtataataataattcagtaagtgatcacggatcatcgcggctatcttcacttacagttaagctggttgcaaacacctccactaccgcggactatgttgagaacatcgaggaaggccaacacccacagatcaacgttgatcagcttgacaatacgattattgtcaccaataaccacagtcttgggaccctctgaaagagtaacaaaatgtattcattagaggaggttccaattacgtacttgtttaaccatttaaacttactgttggctgagtttccgattagtcctgtcactcccagaaggttagtaatgctgctcaaaatgggaatgtcggcaaggaccaatccattgacatccaccagtcgaacgatgttgttgttgttgccagtgatcaaagtattggcaccgctgctagcactgtttccgattatggacgaggaaccgtttgaagaggaactacctcccaaaaggttggttacaccgcttagagaactcgaggagctagagctagagccagtcacgccactaagaactccgccaaccaggtcgccgacaacaggctccactgtgttcaggacacctccgagaacgggctccactgtgttcaggacacctccgagaacgggctccactgtgttcaggacacctccgagaacgggctccaccgtgtttaggacacctccgagaacgggctccaccgtgtttaggactccaccaagaacgggtcccactgcttgaacaacgtcgccgacaacttcaccaacaacgggaaccacgccgccaaggacaccaccgagaaggccatctgatgaggatcctgagctacctgttagtccactcaaaagtcccgaagaggaggatccgcttccagaagatccactgctggatccgcttccagaagatccactgctggatccgcttccagaagatccactgctggatccgcttccagaagatttaccggtgatgctgctcaacgccgaaacagctgccaaaacggggacattggcgtctacaacctttgttaccgtattgttatcacctcttataagtacattggatttttctaaaacataggaagccaattagttttcgcacaaccacttttcgaagatgtgttcttacgattcagattattggcaaatccagttccagtaattttgctaaggaccgggacattagccaatgcatcaacgttggcatcaacgaccttggtaacttgattgttatttccaacaatatcaacgctaggatcgactattaaaaaaatgatttcaagtacataagtaactatctatgggctaaagaaactcgtcaacttactgttagcattatttcccactgaggcgccacttgaagtactattcgaagaaccagttgaagtaacgcccgaagaaccagaggaagaaccagtggaggaaccagaggaagtaccagtcgatgagccagtcgatgaactagtcgatgaacccgtcgatgaaccagtggaagagccctgattaataatactcaaaaccggagcggccaaggagatcggcagaccaagatcaagcagtttgaaaaggaaattcttatttccagttatggtatcgcctttaactaaaattaagattgatatgatgtagtcgtatgaacaaagaaagctcaataacaataaagaaattataaaagatggaaagtagcttaccattcacattgttgccaagtacggacgagccagaggaactaggagtgccagaagatgaagatgtggaacccgaacccgaagagcccgacgttgaagacccagaagatccggaactagtagatgaacccgaagaagaggagccagaggaggtgctagaacttccactgttgatcgaagacaaaatcggagcattcgctaaaaccggaattcttgcgcccaccaaacgagtaaacgtgtttcctgttccgttgatcagcacatcagatccctctgcaaaaacgtcagaagttatatatacaaaatatagacgacaccacgatttgaacttacgattcaaagtgttgccggtgaaaccagatccggtgatgctactcaacactggcagggaagctcccactggcacattggcgttaataagatcattaacagtgttggaatcgcctatttcttgaactgatggtgccactgtaaatatacgagtaaaacgtttaaaatgttataagtctggcaattggtcgaagtggggtaaactcacaattgaaattgtttcccacaccagatgaacttcccgatgagctagacgaagaacctgagctagaagatcccgacgacgaggaaccagaagtgccggaacttccactgttgatcgaagacaaaatcggagcatttgctaaaaccggaattctagcgcccaccaaacggttaaacgtgtttccggttccgttgaccagcacatcagttccctctgcaaaaacgtcagaagttatatatacaaaatatagacgacaccacgatttgaacttacgattcaaggtgttgccgctgaagccagatccgtctatgctactcaacactggcagagaagctcccactggcacattggcattaattagatcattgaccgtgttggaatcgccaatctcttggacagatggtgccactaaaaaagtatacaattgtaaaaatccgcgtattcgaaaagataagtaaaactcacaattgaaattgttgcccacgcccccagagccacttccaccatttatattagacaaaattggagcattggctagaacgggaattttggcacctactaggcggttgaaattgtttgagtctccatcaaggactacatcagaggactctgaaatattaaaaagtataaaaggttaagtttgaacggaaatatgcattaataatccaatactaacggttgagcgtgttgccgctagaactggacccatcaattgtgctcaaaactgggagattagctccaacgggcacattggcattaataagatcgttgactgtattcagattgccgatttcctccactgaaggggccactataaatggaaataaagttagtaaatccgttcatagaacatatgcgagaaacttacgattaaaatcgttacccgagcccgaatccactggaaaaattaaaatgaaatattagggcttgtgttcaaaaaggcgaagaagaaaaagagagagattaatcaatggattaatacttgtattttacttacgaatggcacgcttggccgctgtcttttggtcaaccttggacttcgagtttgaaaaatcgccaccattgatgctgttgagcgctgcggcattggtcatttcagcgctggaggagttgacgatagtgcgatcgagggcggtcatcaggcccattagcaccactttgtccacgcccattgccagcaggcggacgatccagctttcgggggaggcggagcacaagccgctgatcttaccctcggcaatggtcgatagactgtccaaaagggatacggatagcatgctgaaagcgttcacttgcaacaggctgacgttatcgggacccactgaaaggattaggaattaaatgaatacaaactgatattaggtatcctgatcgccggatacttactctctcgcaaatttctgatgattttgtgggcctcaccacccgaggcgccgcacaacttcagcagggtattaaggatggtgctcagttccttgatgttgcgtgcctgcaggaacttcagcaccgagttgcgatcatccttgatcacgcccacgcgacgggcggtgcgaagacccgagccctccgactgctggtggtcattgtcatcgtgaacgatcttgatctgctgcttctggcggaagtgggtgctcttgatcacctggctcacctcatccttggcgcactcgatgccgttgaagacgcagagggccaaaaaggatttgagtgtcagagtcaaggtgtttcggtcctgcgactgatcgatgtcctggatgatccttccacaagtggcgttatcacgagctccaatcaagatatcaatgattacatccatgccaatctgcaggaacacattgttgcccttcgtatccttgccttcctcggtgcgcagcgatttcatggtggattcttgggaggaggtcaacttggcaccccgtgcctgcatactggccaagagcaaatcggccagatccttggaggccaatcgtccaatgtttgtcactcgctgagtccttagggtcgttgtttcagtagttgtgggcacatcggtggttccattgccagtttccgtttccaaaagtagcgagaccagtgtggtcgatgaaaatccaaccggggatcgcttcgtgggcttggcatcgtgaggcaccagaaagcaggtggacaggagtaggaacaaatgaagacgccacatctcgatggttgttgccgctagcttgagttgatggtgattgatagatttcgctgctcttcccagctcttttatacgacttttgccggcttatcgccatcaagcccaacgagattatctcactggcatgctgtaaaacgtgccatcccaacatcaatatcgttgtcgatacgcttgcagaattctttcggcatgctccgcaccgatcttcttatctttagcggctaatgagtgggtgctgatcagttggattcgacttgaggaaatcgggcttaaagccgtgtgcccccaagattaccatcgattttgatttgggtctctgcacgagttgtaagcttaaatcagttggctgttacatcagtccacagcagcttcagtctagttctcttaggagaaaatgcttaaagatgtacattgaaaatgtaacatactcattccataagctcttacaacatattctttcttgtctaaagtttcaagtgtttaagtatttcacttaatactcacaaactaaactcaatttataacttcataagcttaatgacacacatttcttgagactaaacattgtttactatgtgttcattcatagctgtgcgcttttcattgagtacaaaaaccacaaaagcactgatgattaactacagcaaatatcttcaaagaatgtttggagcccaaatttagttgttagattagccagtgacccagctggtcgaaaatccaaagaacaatcatattttttggcgcttgcagcacgtaatcccagctgccccgaaatttccgcatagcgattacctgtagtagtataaatgcttaagagctaacagctacattgtgcagtgcctaaagaacttagaacaattaactcgatcgaaatgacagccttcaatagggatcatcacttcgcgtttctaatgatcgttgccctcgtgggaagtagctgtattttaggattttccgatgcccaaaccttcacagccgaggatcgtagctctatacagaa

SEQ ID NO: 39116 - DNA, 4074 bp, DROSOPHILA
atgtggcgtcttcatttgttcctactcctgtccacctgctttctggtgcctcacgatgccaagcccacgaagcgatccccggttggattttcatcgaccacactggtctcgctacttttggaaacggaaactggcaatggaaccaccgatgtgcccacaactactgaaacaacgaccctaaggactcagcgagtgacaaacattggacgattggcctccaaggatctggccgatttgctcttggccagtatgcaggcacggggtgccaagttgacctcctcccaagaatccaccatgaaatcgctgcgcaccgaggaaggcaaggatacgaagggcaacaatgtgttcctgcagattggcatggatgtaatcattgatatcttgattggagctcgtgataacgccacttgtggaaggatcatccaggacatcgatcagtcgcaggaccgaaacaccttgactctgacactcaaatcctttttggccctctgcgtcttcaacggcatcgagtgcgccaaggatgaggtgagccaggtgatcaagagcacccacttccgccagaagcagcagatcaagatcgttcacgatgacaatgaccaccagcagtcggagggctcgggtcttcgcaccgcccgtcgcgtgggcgtgatcaaggatgatcgcaactcggtgctgaagttcctgcaggcacgcaacatcaaggaactgagcaccatccttaataccctgctgaagttgtgcggcgcctcgggtggtgaggcccacaaaatcatcagaaatttgcgagagatgggtcccgataacgtcagcctgttgcaagtgaacgctttcagcatgctatccgtatcccttttggacagtctatcgaccattgccgagggtaagatcagcggcttgtgctccgcctcccccgaaagctggatcgtccgcctgctggcaatgggcgtggacaaagtggtgctaatgggcctgatgaccgccctcgatcgcactatcgtcaactcctccagcgctgaaatgaccaatgccgcagcgctcaacagcatcaatggtggcgatttttcaaactcgaagtccaaggttgaccaaaagacagcggccaagcgtgccattctggattcgggctcgggtaacgattttaatctggccccttcagtggaggaaatcggcaatctgaatacagtcaacgatcttattaatgccaatgtgcccgttggagctaatctcccagttttgagcacaattgatgggtccagttctagcggcaacacgctcaaccagtcctctgatgtagtccttgatggagactcaaacaatttcaaccgcctagtaggtgccaaaattcccgttctagccaatgctccaattttgtctaatataaatggtggaagtggctctgggggcgtgggcaacaatttcaatttggcaccatctgtccaagagattggcgattccaacacggtcaatgatctaattaatgccaatgtgccagtgggagcttctctgccagtgttgagtagcatagacggatctggcttcagcggcaacaccttgaatcagggaactgatgtgctggtcaacggaaccggaaacacgtttaaccgtttggtgggcgctagaattccggttttagcaaatgctccgattttgtcttcgatcaacagtggaagttccggcacttctggttcctcgtcgtcgggatcttctagctcaggttcttcgtctagctcatcgggaagttcatctggtgtgggaaacaatttcaatttggcaccatcagttcaagaaataggcgattccaacactgttaatgatcttattaacgccaatgtgccagtgggagcttccctgccagtgttgagtagcatcaccggatctggtttcaccggcaacactttgaatcagggatctgatgtgctgatcaacggaacaggaaacacgtttactcgtttggtgggcgcaagaattccggttttagcgaatgctccgattttgtcttcgatcaacagtggaagttctagcacctcctctggctcctcttcttcgggttcatctactagttccggatcttctgggtcttcaacgtcgggctcttcgggttcgggttccacatcttcatcttctggcactcctagttcctctggctcgtccgtacttggcaacaatgtgaatgttaaaggcgataccataactggaaataagaatttccttttcaaactgcttgatcttggtctgccgatctccttggccgctccggttttgagtattattaatcagggctcttccactggttcatcgacgggttcatcgactagttcatcgactggctcatcgactggtacttcctctggttcctccactggttcttcctctggttcttcgggcgttacttcaactggttcttcgaatagtacttcaagtggcgcctcagtgggaaataatgctaacatcgatcctagcgttgatattgttggaaataacaatcaagttaccaaggtcgttgatgccaacgttgatgcattggctaatgtcccggtccttagcaaaattactggaactggatttgccaataatctgaatcaaaaatccaatgtacttataagaggtgataacaatacggtaacaaaggttgtagacgccaatgtccccgttttggcagctgtttcggcgttgagcagcatcaccggtaaatcttctggaagcggatccagcagtggatcttctggaagcggatccagcagtggatcttctggaagcggatccagcagtggatcttctggaagcggatcctcctcttcgggacttttgagtggactaacaggtagctcaggatcctcatcagatggccttctcggtggtgtccttggcggcgtggttcccgttgttggtgaagttgtcggcgacgttgttcaagcagtgggacccgttcttggtggagtcctaaacacggtggagcccgttctcggaggtgtcctaaacacggtggagcccgttctcggaggtgtcctgaacacagtggagcccgttctcggaggtgtcctgaacacagtggagcccgttctcggaggtgtcctgaacacagtggagcctgttgtcggcgacctggttggcggagttcttagtggcgtgactggctctagctctagctcctcgagttctctaagcggtgtaaccaaccttttgggaggtagttcctcttcaaacggttcctcgtccataatcggaaacagtgctagcagcggtgccaatactttgatcactggcaacaacaacaacatcgttcgactggtggatgtcaatggattggtccttgccgacattcccattttgagcagcattactaaccttctgggagtgacaggactaatcggaaactcagccaacaagggtcccaagactgtggttattggtgacaataatcgtattgtcaagctgatcaacgttgatctgtgggtgttggccttcctcgatgttctcaacatagtccgcggtagtggaggtgtttgcaaccagcttaactctggacccaacactgagatcattggtaacaacaacgatgtggttcaactggttgatgtggatttgagcgtgttgcttgtggttgatttgctgagtcacttgatcaccaatgtggccaatgactgcagcggcaagaccacgacagttgcacccactcagtccccaactgagtcgccaactgagtcgccaactgggtcgccaactgattcgccaacgcagtctcccactgagacacccacctacgggccacccaccaatgagccacccaccaatcagccacccaccaatcagccacccaccgttcagcctcctaccaatcagcctcctaccaatcagcctcctaccaatcagcctcctaccaatcagcctcctaccaatcagcctcctaccaatcagcctcctaccaatcagcctcctaccaatgagccacccaccaaccgcccgccgtcgcccagtcccaacaactgctatcgcagatactgccgcaagtggcgcacccgtcccagctacttgtgctacaagaactgcggtggtgccttcgtctacaagccctaa

SEQ ID NO: 39117 - protein, 1357 aa, DROSOPHILA
MWRLHLFLLLSTCFLVPHDAKPTKRSPVGFSSTTLVSLLLETETGNGTTDVPTTTETTTLRTQRVTNIGRLASKDLADLLLASMQARGAKLTSSQESTMKSLRTEEGKDTKGNNVFLQIGMDVIIDILIGARDNATCGRIIQDIDQSQDRNTLTLTLKSFLALCVFNGIECAKDEVSQVIKSTHFRQKQQIKIVHDDNDHQQSEGSGLRTARRVGVIKDDRNSVLKFLQARNIKELSTILNTLLKLCGASGGEAHKIIRNLREMGPDNVSLLQVNAFSMLSVSLLDSLSTIAEGKISGLCSASPESWIVRLLAMGVDKVVLMGLMTALDRTIVNSSSAEMTNAAALNSINGGDFSNSKSKVDQKTAAKRAILDSGSGNDFNLAPSVEEIGNLNTVNDLINANVPVGANLPVLSTIDGSSSSGNTLNQSSDVVLDGDSNNFNRLVGAKIPVLANAPILSNINGGSGSGGVGNNFNLAPSVQEIGDSNTVNDLINANVPVGASLPVLSSIDGSGFSGNTLNQGTDVLVNGTGNTFNRLVGARIPVLANAPILSSINSGSSGTSGSSSSGSSSSGSSSSSSGSSSGVGNNFNLAPSVQEIGDSNTVNDLINANVPVGASLPVLSSITGSGFTGNTLNQGSDVLINGTGNTFTRLVGARIPVLANAPILSSINSGSSSTSSGSSSSGSSTSSGSSGSSTSGSSGSGSTSSSSGTPSSSGSSVLGNNVNVKGDTITGNKNFLFKLLDLGLPISLAAPVLSIINQGSSTGSSTGSSTSSSTGSSTGTSSGSSTGSSSGSSGVTSTGSSNSTSSGASVGNNANIDPSVDIVGNNNQVTKVVDANVDALANVPVLSKITGTGFANNLNQKSNVLIRGDNNTVTKVVDANVPVLAAVSALSSITGKSSGSGSSSGSSGSGSSSGSSGSGSSSGSSGSGSSSSGLLSGLTGSSGSSSDGLLGGVLGGVVPVVGEVVGDVVQAVGPVLGGVLNTVEPVLGGVLNTVEPVLGGVLNTVEPVLGGVLNTVEPVLGGVLNTVEPVVGDLVGGVLSGVTGSSSSSSSSLSGVTNLLGGSSSSNGSSSIIGNSASSGANTLITGNNNNIVRLVDVNGLVLADIPILSSITNLLGVTGLIGNSANKGPKTVVIGDNNRIVKLINVDLWVLAFLDVLNIVRGSGGVCNQLNSGPNTEIIGNNNDVVQLVDVDLSVLLVVDLLSHLITNVANDCSGKTTTVAPTQSPTESPTESPTGSPTDSPTQSPTETPTYGPPTNEPPTNQPPTNQPPTVQPPTNQPPTNQPPTNQPPTNQPPTNQPPTNQPPTNQPPTNEPPTNRPPSPSPNNCYRRYCRKWRTRPSYLCYKNCGGAFVYKP

SEQ ID NO: 39118 - DNA, 2459 bp, DROSOPHILA
tccgtttccaaaagtagcgagaccagtgtggtcgatgaaaatccaaccggggatcgcttcgtgggcttggcatcgtgaggcaccagaaagcaggtggacaggagtaggaacaaatgaagacgccacatctcgatggttgttgccgctagcttgagttgatggtgattgatagatttcgctgctcttcccagctcttttatacgacttttgccggcttatcgccatcaagcccaacgagattatctcactggcatgctgtaaaacgtgccatcccaacatcaatatcgttgtcgatacgcttgcagaattctttcggcatgctccgcaccgatcttcttatctttagcggctaatgagtgggtgctgatcagttggattcgacttgaggaaatcgggcttaaagccgtgtgcccccaagattaccatcgattttgatttgggtctctgcacgagttgtaagcttaaatcagttggctgttacatcagtccacagcagcttcagtctagttctcttaggagaaaatgcttaaagatgtacattgaaaatgtaacatactcattccataagctcttacaacatattctttcttgtctaaagtttcaagtgtttaagtatttcacttaatactcacaaactaaactcaatttataacttcataagcttaatgacacacatttcttgagactaaacattgtttactatgtgttcattcatagctgtgcgcttttcattgagtacaaaaaccacaaaagcactgatgattaactacagcaaatatcttcaaagaatgtttggagcccaaatttagttgttagattagccagtgacccagctggtcgaaaatccaaagaacaatcatattttttggcgcttgcagcacgtaatcccagctgccccgaaatttccgcatagcgattacctgtagtagtataaatgcttaagagctaacagctacattgtgcagtgcctaaagaacttagaacaattaactcgatcgaaatgacagccttcaatagggatcatcacttcgcgtttctaatgatcgttgccctcgtgggaagtagctgtattttaggattttccgatgcccaaaccttcacagccgaggatcgtagctctatacagaaattcatggattcattgttgaacttcctggaactggaaattagtaatataacaaccacattgccgccaacttcgaatggcactaccttggagaccactactctggcacctggaaattccacagaagtgaccacagaggtttcgcaaacatctactaactccacatcgagtgccttggatacgaccacgagcagtttgaattccacaacggaggatagcgaaaatacaaccgcaaccacaaccaccgaagcaaatcccactactatgaggcgcaggatttgcttcaagcgtttctgctacaagtttagcaacgacaagggttacatagtttagatcaaataaacgtatagatatgagaaagtattctttttaatttcctgaaattaatctacaggtctgcccattggttaactcaatatcaatatttcaagctaaaagcaactttataaatcgaagtcaatgatgaaggaatcaattagtaacgttgatttccttgtggcattcgggcataaaatatgtgattgaaggaccattattgttttagctgtaagtcaaaatgcctgcagcgttcggaaaagtatttacgttcgtgttcgtgtgtgttatttgaatgtatggaatggggaaatgtttcgcctttttgttcaaaagttgaagtccccttgcggccgccagaggccttaacaaattatttcaattaaaagtttttgagcaaagcacttaatgccaacacaagttggggcgtttatgtgtgcaaatcttaattgtgccaaaaacacaggctataaattcggtatctcaaccagcggatgtacatacacgcatatgtgtatgtacatatgtatgcgtatatgtatgtacatatataacccaaactgacagcgaaagcctattggcagaagctttgtggcttttcattgagtcgtaaacaaatggaatttaattcgtgcaaagatttacttgaatttgttgtgcaaatagttgaatctgaatgatgtcaacgatgtgccgcagcatccacagtcggattccccttgctccatttcgatatttgcaactgcaactgtggctgccactgtggcagtagcagtggcagcggcagtggcagtggcattggtcgtacgaaatggccaaatgaaacgaagccgcaaatatgcctgattgttgcgccctggacgggctcgaaattctaatcaaatgggcgcagtaatctgcaacgaaaatatttacgcttttatatatgatccaaaaagttttggccatcgaaaattcgcatatagacgactatctgtgttaatagtcggcagccatatgcgttgcaagtttataaggc

SEQ ID NO: 39119 - DNA, 459 bp, DROSOPHILA
atgacagccttcaatagggatcatcacttcgcgtttctaatgatcgttgccctcgtgggaagtagctgtattttaggattttccgatgcccaaaccttcacagccgaggatcgtagctctatacagaaattcatggattcattgttgaacttcctggaactggaaattagtaatataacaaccacattgccgccaacttcgaatggcactaccttggagaccactactctggcacctggaaattccacagaagtgaccacagaggtttcgcaaacatctactaactccacatcgagtgccttggatacgaccacgagcagtttgaattccacaacggaggatagcgaaaatacaaccgcaaccacaaccaccgaagcaaatcccactactatgaggcgcaggatttgcttcaagcgtttctgctacaagtttagcaacgacaagggttacatagtttag

SEQ ID NO: 39120 - protein, 152 aa, DROSOPHILA
MTAFNRDHHFAFLMIVALVGSSCILGFSDAQTFTAEDRSSIQKFMDSLLNFLELEISNITTTLPPTSNGTTLETTTLAPGNSTEVTTEVSQTSTNSTSSALDTTTSSLNSTTEDSENTTATTTTEANPTTMRRRICFKRFCYKFSNDKGYIV

SEQ ID NO: 39121 - DNA, 2453 bp, DROSOPHILA
atatgaaagcatttaaaacttaatgccagcttaaccaagcttcactgtgtatctcgtacctgctgccgacagctttcgcagcattcgatggtgtaattaagaatgcaacgcactttgagatacatagcgctggtgaacagcggttttgcggatggtaaactcattagccacccctcgcggccagataaatgcgattttgcaatcgcggagatttcaatcgggttgtggttattgtgttatgcctcgcgtgcccaaccatccaatccatatccagccatccatttcactaaaaatgttctgctatcttaaattccgagcgacacgtgccagacacaactacaataacaacaaattacactaacaatgttgcgaagggcgctgcacaacccccctcccccaccccctccggatgccatgcaaatttgaagcgcctgtcgcagttccttctttgtgtctatggcgtcatcggctctacttggagtcccccgcatttgtacttgattacccatacacatacactttcccccagcatccgcatccgcatccgcagcaggagcagcagtagcaactttaactgtaaatcgatattcagactgtctgcctgtctgccccctgccaacaatcttatcctgcccaccaaactctgactaacttactgtctcgacgccaaagtcggtggttgcgacttaaagatacttgatgcctatgcttattagtatggaaactctactcacagttcagtagtggaaatgtggaatatttagggtttaacgctaagtatgcattttaatgaatatttttgcaatttacaataaatagcaaacaaagttctatttacccaagagttctctctgtaattaaaaatgcgactctaaagttaagctttccattacttctctgataagaaagattgatatagcagtcgtagatttatctgtcacatcaacagttacatattttaggcaggaactgtctccgcacagagcccacagatcgcaggatgttgcacagcagctacaatcgcgcaccgcgccgcaaactcattccgaatttgtttagcaacatcctacaggtgatcgccgatgccgaccatccgctcaccgaacccgagatcatggacgcggtcgccgatcggttggatcgcagcgacgaggagctgaagcgccagatcacagtaagcctccacgacgccctaatctacggctatctgcgagtgaagaactatcgttactcgatagtgcccagtcgcctggatccggacgaacatcgcgatcataacgagcccagttcctccatcaccgccgccccggaacatagtcggctgcaggagaggatctcgagtggaaccagtgctgccatggttgacaaccagggtcgcgatgaagaactcacaccaaaaagcactcaggcgctaaagaggttaaatgctgagccgcaagggcaaactaattgatagaagaaaatttcaaatgtaaacttttaataaattgaattaaaatcaaataaaaccaacttaagtgaatataattacacattaagtgctagtataatgtatataagacagatttctttctgagctaaatccatttgagactataaagaacacagtaacgagcaaatcaacttactgtaggtaataattcctgcgagtaatccccaattagtttcgcagatcctttggcaggtaagataagcccacacacgacgcaggatggccgcttggcctgatggcctgatggtcggtgcggtccgcaaagtccactccttccagctgatcgacgtgcggcgaaggcaatccctgaatcccaggcgacttgtgtgtcagctgcattggggccccactgcctcccctcgaccggttgccagcagctaaacgggctaattgaaatgcaactcgaaggcagagtggccgatgtccaagactccacccgacccctctgaggtgtgatgctggcatttgagagccttgagcttgcggtcatatcaacaaggatacgttgactaagacgggcgacctcaatcgcgtcctttgtgtttgatgtggtgtcagcttcgggcgcaaatcatttactttcgcctgtcccacctgcagtatataccaatgtatatatgtatgtgcagtacatatgtgtgaatgcttcatttcggtttgattagcgatggcaaaaatagactctaatagataaaatatatcattatctaacagtattatatgtgattttagtgataaccgctttagctttttcaaatctatgttgaaaatctatcttatcagcgtgcattgctgtttcgccatccctagcagaatgtgcgaagctattagttcctcactgaataagcgattgtgtgcgggcaactgtttgagttcactgattgttgcgacaccgactagcatttaaagggtccaaacagaatgcggccatggtccgtgccatccccattaattccacacc

SEQ ID NO: 39122 - DNA, 453 bp, DROSOPHILA
atgttgcacagcagctacaatcgcgcaccgcgccgcaaactcattccgaatttgtttagcaacatcctacaggtgatcgccgatgccgaccatccgctcaccgaacccgagatcatggacgcggtcgccgatcggttggatcgcagcgacgaggagctgaagcgccagatcacagtaagcctccacgacgccctaatctacggctatctgcgagtgaagaactatcgttactcgatagtgcccagtcgcctggatccggacgaacatcgcgatcataacgagcccagttcctccatcaccgccgccccggaacatagtcggctgcaggagaggatctcgagtggaaccagtgctgccatggttgacaaccagggtcgcgatgaagaactcacaccaaaaagcactcaggcgctaaagaggttaaatgctgagccgcaagggcaaactaattga

SEQ ID NO: 39123 - protein, 150 aa, DROSOPHILA
MLHSSYNRAPRRKLIPNLFSNILQVIADADHPLTEPEIMDAVADRLDRSDEELKRQITVSLHDALIYGYLRVKNYRYSIVPSRLDPDEHRDHNEPSSSITAAPEHSRLQERISSGTSAAMVDNQGRDEELTPKSTQALKRLNAEPQGQTN

SEQ ID NO: 39124 - DNA, 3458 bp, DROSOPHILA
aatttgaaaattgtgaaattacccaacactgcggagtcgagtcaaaatggagaagtgacgcggcacattaacacccaaccatgccaactgcgttttctttgagggtcgctcactaatgtcggattatccgctttgagcctttttaagagcacccaaaaacacacgaaattagtgcaatccaattgccagagccccaaaatgggaaagagcaacccttgagcaagattggccataattcaagaacaaaatccaattcttgtgattttcgcacctcatcacaatgtctaaaaacaggcccggggcgctccccttattcgtttgcttaacgcataacttttgggccctcggtggcatattgttttacatgttgctcctttggataaacggattcggcttgttttggcctgcggaaaagtcgtcctttttgggtcgaaagcgacccaagcgaaaaactggaacccaaaaattgttatgttgttgaggttttccgtttattccattatttatgtactgcacacgcttaggctaaggcctttcctttgtttgggaacagaagtagtacaacatattttttagaaagtaatattaacaaataaattcattagcaagcacagtaggcagcgattttaccgtctacgttacttgacgtagggccttttctaggtatacataacacatacaccctccattcgatcggcaaaatttatctttcggcaacatactaaaaactgttgtaaattatcgtatctgtatcgtgttcttctgttggattattggtcccaagtgtgtagacgactgcccgttctccggttttcctccagaccgtaataagataaccgcagaaaagtccaacgaagcagctcaacaaaaattctaaatataataccgagaataatcatcaaccatcaaatacatcagtccactagccgaattagcaagcactgtcctgtaaccagcataccacgcctttgggaatatctattgtgacagaggacgagcaatggaggatttgcatttaaaactcggcgatctgccccaggaagtattggctgcacggcacagcatgattatgggccaaaagttggctggatcacttggtgagacacagcatcaccttcagcatcaacatcacctgaatcaccaactgaaccagctcaatcagttgagccacttgaatcagttccatcagttaaaccaattgaatcaattgagtcagctacaccagcatatacaacataagatctcttcggggatgaacctaaatttggatctggaccataagatggagacggagatggagttgggtctgggccttgatgtggatgtgaatctgggagttaatctggacatgaatccggagggcagtattaccaatagtaccagccgtaccagcagtgctagcaggaccagcagcaccaacacgtgcagcgatcaggggcaaggacatggatctgggattggacttggtgacccaaagcgggaccaaagccaagtccactacgcccatgaccctgcccaggataatggcgattcaccgaatgtcaagagttgtactggaatgtgcagccatcaaacagagagcaatatgaataagggggattccctaacgcataccaagtcttcatcgccgaagacggacaagggggagaaggataaggaggagcttaaagcgaaggaggaggaggaggaggagtttaaagaggatacggaggataagaaggataacgaggacgttttccagaaacaggaaccgtcttcttccatgttgattaaggcggccaactccaagctaaatgtcaatgccactgtttacacgatgccagccaaagtagaaccccttcatgacggatcattcgtgccccaaccgagttccagtgccacctcacagggcactggggactatcgcctcaatgcccaggctgctgtattcaagccatctttgatgtgcatttgctcgttggcttcgccggtggttttgcaacgactacgtccgattgtagtacggccaccactaccgggggtatcgcaacacctgatgtcggacatttcacagcctctactgccgaactcgccactgatgagccacgagttcttagcccatggttttcatccaatgcaaaggtcgggccataaaccaagtggccgctggcgcaaacaaccgcttccggacttgttcagcgccgtcatgtcactggtgacggaactgaagcgatcggtgagctatccggagatcataagctgcctatccaagagactccatcgagcggaggtggaactgaagcgccatgtaccgcacacattgcacgccgccgttaacaatggctatttgaagaaggagggcaatcgctattccctgctccccgaagtggaacaggctgagatcatgcgacgcaacatcgcggatgctcttcgggccaaggagctggagaaggagccgttgtcctggcgcaggcgttaatgtacgcaaaaccaatcctcaactacgttcacaacctggcatctacacgcatcatcccgcatcccgcaatccacattctgcatcctgcatctttatcatcacatttcatatccttctgcttcatacattttataattaagcttgcacagcactcgaggctgtgagcatgtagtcctgtgcgttgcacaacccagagccccgagttctgtgccgccgacgagccccgcaatttggttttactgtacgtgacctacgtctgcgaaacagcggtccgtgtgatcctcgatgcgtggcctgtgcttaaaggcacgcaatcttcgatccgcgatcgacgagcagaagaagaattcacgatgacaaaagtatacattgtatacaagtccaatggggacggtttagtcgatatgctgcctccagaggatatttcgttgcctgatgttcccttcagcgttaaaacaatcacgtttttctggttaagcgctttattattgcaagctattcgggtaaattcatcaaacttattaatggatggagatgtggggttaataaatggcttccgctaattggtatgattacgtaagacctacgcagttataaatcaacaattcatatataatttcaaccattcattttgtatttcattggcctgctactgctcattgaaattctgctatggccattagtattttttttttttttttgcattcaactttgtgtttatcaatttagtcagtcgtccatccatctctcagtcagtcaggcattccagtcaggcagtcatttagacggtcggcggttgttccgatctgtacagttaactagctattgtgtgcagagtggcgagtatctaggagctcatcatgattgttttgtaattggaatgcgacaatgcgaggccaacaaggaggacggagatggttgatggtggatagatagaggatgccatctcccagtatgcaaggacaataacaataacaaaagcagcagccacggcaaggat

SEQ ID NO: 39125 - DNA, 1458 bp, DROSOPHILA
atggaggatttgcatttaaaactcggcgatctgccccaggaagtattggctgcacggcacagcatgattatgggccaaaagttggctggatcacttggtgagacacagcatcaccttcagcatcaacatcacctgaatcaccaactgaaccagctcaatcagttgagccacttgaatcagttccatcagttaaaccaattgaatcaattgagtcagctacaccagcatatacaacataagatctcttcggggatgaacctaaatttggatctggaccataagatggagacggagatggagttgggtctgggccttgatgtggatgtgaatctgggagttaatctggacatgaatccggagggcagtattaccaatagtaccagccgtaccagcagtgctagcaggaccagcagcaccaacacgtgcagcgatcaggggcaaggacatggatctgggattggacttggtgacccaaagcgggaccaaagccaagtccactacgcccatgaccctgcccaggataatggcgattcaccgaatgtcaagagttgtactggaatgtgcagccatcaaacagagagcaatatgaataagggggattccctaacgcataccaagtcttcatcgccgaagacggacaagggggagaaggataaggaggagcttaaagcgaaggaggaggaggaggaggagtttaaagaggatacggaggataagaaggataacgaggacgttttccagaaacaggaaccgtcttcttccatgttgattaaggcggccaactccaagctaaatgtcaatgccactgtttacacgatgccagccaaagtagaaccccttcatgacggatcattcgtgccccaaccgagttccagtgccacctcacagggcactggggactatcgcctcaatgcccaggctgctgtattcaagccatctttgatgtgcatttgctcgttggcttcgccggtggttttgcaacgactacgtccgattgtagtacggccaccactaccgggggtatcgcaacacctgatgtcggacatttcacagcctctactgccgaactcgccactgatgagccacgagttcttagcccatggttttcatccaatgcaaaggtcgggccataaaccaagtggccgctggcgcaaacaaccgcttccggacttgttcagcgccgtcatgtcactggtgacggaactgaagcgatcggtgagctatccggagatcataagctgcctatccaagagactccatcgagcggaggtggaactgaagcgccatgtaccgcacacattgcacgccgccgttaacaatggctatttgaagaaggagggcaatcgctattccctgctccccgaagtggaacaggctgagatcatgcgacgcaacatcgcggatgctcttcgggccaaggagctggagaaggagccgttgtcctggcgcaggcgttaa

SEQ ID NO: 39126 - protein, 485 aa, DROSOPHILA
MEDLHLKLGDLPQEVLAARHSMIMGQKLAGSLGETQHHLQHQHHLNHQLNQLNQLSHLNQFHQLNQLNQLSQLHQHIQHKISSGMNLNLDLDHKMETEMELGLGLDVDVNLGVNLDMNPEGSITNSTSRTSSASRTSSTNTCSDQGQGHGSGIGLGDPKRDQSQVHYAHDPAQDNGDSPNVKSCTGMCSHQTESNMNKGDSLTHTKSSSPKTDKGEKDKEELKAKEEEEEEFKEDTEDKKDNEDVFQKQEPSSSMLIKAANSKLNVNATVYTMPAKVEPLHDGSFVPQPSSSATSQGTGDYRLNAQAAVFKPSLMCICSLASPVVLQRLRPIVVRPPLPGVSQHLMSDISQPLLPNSPLMSHEFLAHGFHPMQRSGHKPSGRWRKQPLPDLFSAVMSLVTELKRSVSYPEIISCLSKRLHRAEVELKRHVPHTLHAAVNNGYLKKEGNRYSLLPEVEQAEIMRRNIADALRAKELEKEPLSWRRR

SEQ ID NO: 39127 - DNA, 2549 bp, DROSOPHILA
cgaaagtgcttgctgcagcacattttacacttctttcacttttcagtgcagtaaaaagcaaaaacttacgtgttaacttgcacaaatgtgtacataatggcttgattgcaatttcaatctgtgattgtacacacattcaacaaaatgttttcaactggagcattcattctggaaatgtttgaggcaaattagtggtttgtttggctattaatagcaacatgacaggtgcaattagaagcgctgactggttgcaatgatgacgtgacaacttaaattgatgctaagctgggaaaaacacttcaaaacgaattaggaattgggcgatctgcaacgacggcataaaccactttgtggtgggtccaaagacactcgatccccctccatccggtatgactcctatgcaaataatgggcgcaatgtgtcactgagccaccaactgacagttcggatgaagtgtcgctgacaggacgcggatgtggatgtggatgcggatgcggctacggatacggatatagcagccagtgcctgctttgttggtatgcggtatgatggatcaataccacacatacacataaactatgcaccatacaacacacctaccacctcacctcccagccaagtgcgaacataaaatgtataaaatattggctgtctacacgaatcctaggcaagaaatcaaaccgaaccgaactgaactgaagcggggaattcaatttatatgcaaatgatatgcgaggcgggctgaagacaggcggtagcaagcccaaaccaatacgaatatcaaaaaccgaacctgaacctgaacctgaaaccaagccccaaaaaccgatgcgagcggtgttcagctatgtgaattttaattatatttattaaaaaatgtaattatgttaaaaagcaagacagagcgacagacagacacgtcgatgtgacaggcagagaaaatgcaataaataaatatacgtccatccatccatccgagccaattagccgggttcttggttcaggtaaagtagcgagtaccctccgccgaatcgtccctcacatcgtaaattgtgggcagtgaataggttcgtctgtcgtagctcttgcgttcgtaggtctttcggctgggtttttcagtgacttcctcggactgctcgtattccgcctcggtggcctctgctgagtggtatttagcagtgtcctggtcctgttcctggtagccatagcaaggcttcactgtggtcttcttggacttgctctttttgcccgacttcttggacaacttgccctcgaagaaggccagctccttctcctttttggcctcgaaaaaggccagctccttttctttcttttcgtcccaccactgcttgaatttctcccactcgttctccttcttctccagcttggcctcctccttttcggtgaacaaattgaggaaatccagcttcttgagcagctccgtctgcttcttgccctcgaaccaatccagcattgcctcatccttggcctccttggcttctagtttcgcctccagcttgggcagcttcaatagccatccgtgggccatctgcagagctgtgggtttttttttcgtattttttatttcgccacaaaatatgacaaagctatgagctattgtgttccatttaggttccttgttaaacaaaaaaaaaaaaactcaccaaaacaggccatcgccagcagcattagttgttgtccaaatctcagcattgtcttttggctttcggtcggtgcttggagtccaaaactcttgttcggcttctgttcggtcacaagcagatggtctggctacttataacccgaaaatccgagccactgcatctgggagcacgtgctgcctgcctcgccactgcgataagcacgtgcatttcggttgagaaatctatcaagctcgcggcatatttgggccttctgtgatactgggttcaatgctctgcgtgcaccgcaagaaatactagtttgattaaacatttaattggtgtaacatacagcattccgtacagcaacacaaatgattacgatccctgttcttcttagtggggctacattctagacgctttgttttcgctcagtgatggtggcatggtctgtcccctggtcaactgtcgctctgattagtctggcagttatttagcaatgtctttgggtgactttaggcaattctggcaaagattttaatgcactggctggcgactgcgagtcgaaaagcaggcgctgctaattgagtctgccattatctagtgggtggtgttgcctggcatgtttttgctgatgtgttgaaagtggaagttaaattgtatttgcttagtgcggctcatgcacacggaaaccaaaaaccggcgagggggccctttgactctgcaatgtgtgtttgtgttgggcaaacagtttgccaaattaattgcacaccaactgtttatttgcccgtttgtgttttatgagtttctaccctggtttcctttcccagtttctattaccatttggctagcccgtttgctttctgtaatgtggcacgttaatgaggctcaccagattggaatgtattg

SEQ ID NO: 39128 - DNA, 549 bp, DROSOPHILA
atggcccacggatggctattgaagctgcccaagctggaggcgaaactagaagccaaggaggccaaggatgaggcaatgctggattggttcgagggcaagaagcagacggagctgctcaagaagctggatttcctcaatttgttcaccgaaaaggaggaggccaagctggagaagaaggagaacgagtgggagaaattcaagcagtggtgggacgaaaagaaagaaaaggagctggcctttttcgaggccaaaaaggagaaggagctggccttcttcgagggcaagttgtccaagaagtcgggcaaaaagagcaagtccaagaagaccacagtgaagccttgctatggctaccaggaacaggaccaggacactgctaaataccactcagcagaggccaccgaggcggaatacgagcagtccgaggaagtcactgaaaaacccagccgaaagacctacgaacgcaagagctacgacagacgaacctattcactgcccacaatttacgatgtgagggacgattcggcggagggtactcgctactttacctga

SEQ ID NO: 39129 - protein, 182 aa, DROSOPHILA
MAHGWLLKLPKLEAKLEAKEAKDEAMLDWFEGKKQTELLKKLDFLNLFTEKEEAKLEKKENEWEKFKQWWDEKKEKELAFFEAKKEKELAFFEGKLSKKSGKKSKSKKTTVKPCYGYQEQDQDTAKYHSAEATEAEYEQSEEVTEKPSRKTYERKSYDRRTYSLPTIYDVRDDSAEGTRYFT

SEQ ID NO: 39130 - DNA, 2300 bp, DROSOPHILA
tctggcaaagattttaatgcactggctggcgactgcgagtcgaaaagcaggcgctgctaattgagtctgccattatctagtgggtggtgttgcctggcatgtttttgctgatgtgttgaaagtggaagttaaattgtatttgcttagtgcggctcatgcacacggaaaccaaaaaccggcgagggggccctttgactctgcaatgtgtgtttgtgttgggcaaacagtttgccaaattaattgcacaccaactgtttatttgcccgtttgtgttttatgagtttctaccctggtttcctttcccagtttctattaccatttggctagcccgtttgctttctgtaatgtggcacgttaatgaggctcaccagattggaatgtattgctattgcattgcctgtgctttttgccatacaaacataattatgcgcatggaaaattgcctcgcaaaactaagactttcagcaaaaacattgaatgtggacaatgtcatggtcttagaacataattgttgaacattagtgctttgtgcgttctctttgcaaagaagttgatattgattaaatttaaataggatttgttatcatttaaaatgtttttcattgcaatagaaacctgaatacttcagatatcttaaaacaatatttaacaaaaatcatgaataatcattagtttctgcaaaatagttttgccttgtacgataagttcgatgtttaaatgacgtaaatcgaatttactaccgaataattgccagaactctttgttcttcaactaggtgccaacacgctcattgatatgatagacgataataacgtttaatagtgtgcccttttatacacacaagatatgaatgtgacgaacaattaactagatagaacttgcattttgtaaaacaaatactttattaaatacattgacaaacttaaattgtaaaatgcgaaataaaaatgggactccagttatcagtgtcagtctcctggagaatggtgcaattgaagtgttacttggggattctgttgttgtcgatatttcctaagtcgaggggcaactccggaaatggttccaatacgttgttcgagttgaggacgagatcgtcgtagtcctcgctgaaatcgtcaaagccactcaacgtcgtcctgacggttgttgttgtggtggttgtggtgctggatgtcagtggtgccggggtggtgcgacgacgaggtctcctgcctctgcgccctttgcgaccctttcgcaattttcgctgtggcttggcaatctcgttcgatcggccatatatattcggatagggttccatggtgtaaacggtgtaagcaattggtgttgtgctggttgttgttgttgatgtggtggtgcttccagcagttgttgttgtagttcctatttcagtgctgctcgtcggtgcaggagtggttgttatttcggactgcgatgttgttgaagcttgtgtagttgtggttgtcgttgtaggtacagttgttgttgtgggttgcggtgtagttgttgttgtaggttgtggagtagatgttgttgttggaagtggagtagttgttgttgttggaagtggagtagttgttgttgttggaagtggagtagttgttgttgttggaagtggagtagttgttgttgtgggttgtgttgaagtggtcgagacttgagtggttgttgttggtggagattgtggtgtcgttgttgaaggttgtgtagctgtggatgttgattgtgttgttgttgtcgtcggagcttgtgtagatgtggttgaagttgattgcggtgtagttgaagttgtgggttgtagtgttgttgttgttgaagcttgcacgagtgttgttgttgttggtgcttgtgttgtggatgttgtggaaggtggtgtagttgttgttgacggtgctgccgttgaagtctgagtagttgttgtagaagcttgggttgttgttatggttatggaagtactagtggtgggcagttgcgttgttgttgaagcttgtgtcgttgttatgcttggctgtagtgttgttggagcttgtgtcactgtagattgcgatgtttctgttgttatagttggagtgtttggtgtagtggatgtgtctgccagaatggtagaggtcgactgtgcacttgtggatgtctctgtggatgtggtgatacctgcttgtgtggtggacgaactggttagcgttgtgcttgctggcactgttgttgatgttgcagatgatgctgttgaagtcgatgtagcttctgtagttgtcgacaaaggtgctgtagtgctggaggattctgtagtatttgatgccgct

SEQ ID NO: 39131 - DNA, 300 bp, DROSOPHILA
atggaaccctatccgaatatatatggccgatcgaacgagattgccaagccacagcgaaaattgcgaaagggtcgcaaagggcgcagaggcaggagacctcgtcgtcgcaccaccccggcaccactgacatccagcaccacaaccaccacaacaacaaccgtcaggacgacgttgagtggctttgacgatttcagcgaggactacgacgatctcgtcctcaactcgaacaacgtattggaaccatttccggagttgcccctcgacttaggaaatatcgacaacaacagaatccccaagtaa

SEQ ID NO: 39132 - protein, 99 aa, DROSOPHILA
MEPYPNIYGRSNEIAKPQRKLRKGRKGRRGRRPRRRTTPAPLTSSTTTTTTTTVRTTLSGFDDFSEDYDDLVLNSNNVLEPFPELPLDLGNIDNNRIPK

SEQ ID NO: 39133 - DNA, 3161 bp, DROSOPHILA
ttgcattgcctgtgctttttgccatacaaacataattatgcgcatggaaaattgcctcgcaaaactaagactttcagcaaaaacattgaatgtggacaatgtcatggtcttagaacataattgttgaacattagtgctttgtgcgttctctttgcaaagaagttgatattgattaaatttaaataggatttgttatcatttaaaatgtttttcattgcaatagaaacctgaatacttcagatatcttaaaacaatatttaacaaaaatcatgaataatcattagtttctgcaaaatagttttgccttgtacgataagttcgatgtttaaatgacgtaaatcgaatttactaccgaataattgccagaactctttgttcttcaactaggtgccaacacgctcattgatatgatagacgataataacgtttaatagtgtgcccttttatacacacaagatatgaatgtgacgaacaattaactagatagaacttgcattttgtaaaacaaatactttattaaatacattgacaaacttaaattgtaaaatgcgaaataaaaatgggactccagttatcagtgtcagtctcctggagaatggtgcaattgaagtgttacttggggattctgttgttgtcgatatttcctaagtcgaggggcaactccggaaatggttccaatacgttgttcgagttgaggacgagatcgtcgtagtcctcgctgaaatcgtcaaagccactcaacgtcgtcctgacggttgttgttgtggtggttgtggtgctggatgtcagtggtgccggggtggtgcgacgacgaggtctcctgcctctgcgccctttgcgaccctttcgcaattttcgctgtggcttggcaatctcgttcgatcggccatatatattcggatagggttccatggtgtaaacggtgtaagcaattggtgttgtgctggttgttgttgttgatgtggtggtgcttccagcagttgttgttgtagttcctatttcagtgctgctcgtcggtgcaggagtggttgttatttcggactgcgatgttgttgaagcttgtgtagttgtggttgtcgttgtaggtacagttgttgttgtgggttgcggtgtagttgttgttgtaggttgtggagtagatgttgttgttggaagtggagtagttgttgttgttggaagtggagtagttgttgttgttggaagtggagtagttgttgttgttggaagtggagtagttgttgttgtgggttgtgttgaagtggtcgagacttgagtggttgttgttggtggagattgtggtgtcgttgttgaaggttgtgtagctgtggatgttgattgtgttgttgttgtcgtcggagcttgtgtagatgtggttgaagttgattgcggtgtagttgaagttgtgggttgtagtgttgttgttgttgaagcttgcacgagtgttgttgttgttggtgcttgtgttgtggatgttgtggaaggtggtgtagttgttgttgacggtgctgccgttgaagtctgagtagttgttgtagaagcttgggttgttgttatggttatggaagtactagtggtgggcagttgcgttgttgttgaagcttgtgtcgttgttatgcttggctgtagtgttgttggagcttgtgtcactgtagattgcgatgtttctgttgttatagttggagtgtttggtgtagtggatgtgtctgccagaatggtagaggtcgactgtgcacttgtggatgtctctgtggatgtggtgatacctgcttgtgtggtggacgaactggttagcgttgtgcttgctggcactgttgttgatgttgcagatgatgctgttgaagtcgatgtagcttctgtagttgtcgacaaaggtgctgtagtgctggaggattctgtagtatttgatgccgcttcagccgctgcaattatttcactgatgttaattgtaattgtttcattgttcaagctggttccattcgccgactgcagctggttgtttgaactagtgatcgaggccagaaatgaagactcctggcccacagttaaacaaactgaaattaactagaaattagcatccgtgtttaaatcatgtaaaccaccactaattacctaatgttgtcaccacaacgaaggcaattaaatgattacgtgacggcagcattgttggtcgacgtgctgctttcctttccgtttccttaattagccctgaattgaaggcttcagtcgaggtgttgcttctgtgactgggcgtactgctctataaatttggctaattgaactgatttgctgagtgctcagatggtccagttttatatcgatgtgcactgggctccacgtccggaaacgtgtactccgtacgtgcgattgccgattaacttatcgcgtcttcagccgattccaatctcgatgcgccagctgtttccactcactctcgctctcaatccccggtttcattctccactttccgcccctccgccattgaagaagatgtcttctgcttgtgattgtgaattccgattccggaagtggcttacacttgttgaacttttttaaaatatgtactacgaacagacgaaccggatgcattgctcttgcattcgattagcaaccgggcacgtaatcttggacaacatcgaaaacagatggtcgaagtaaaacacaaaacaaacaattttgaatgcaatgcgtttaaatacgttcattaatgaagttttggaaaaattatgctatgtggattcagtttagtaaacactagtgcttagtgtattaaggcttgtaaactttttcctcccaaaaaaaatacataaaacaaaaaaatcaaattaatcctgaacactatgcatttaccagcactttgttatttcctgaacatacaaaaacattttagtaaaaggtagtataacagctattaattaaaaaaagatatataaatatatctaacgcttaactaattccagttaattgtaaaagtaataaaaagtgattcaaaaaaccactatgaataaatcgaatgaaatgtaaacagacaatgcgacatccgattagctctgataacagcggcgaatgcaatgggaattatttaattgctggtgttcaaaaaagcataaaaaaaaaacaaaaaaaaaatactcacgcaatttttaattatgtatttacatgtc

SEQ ID NO: 39134 - DNA, 1014 bp, DROSOPHILA
atgctgccgtcactttgtttaactgtgggccaggagtcttcatttctggcctcgatcactagttcaaacaaccagctgcagtcggcgaatggaaccagcttgaacaatgaaacaattacaattaacatcagtgaaataattgcagcggctgaagcggcatcaaatactacagaatcctccagcactacagcacctttgtcgacaactacagaagctacatcgacttcaacagcatcatctgcaacatcaacaacagtgccagcaagcacaacgctaaccagttcgtccaccacacaagcaggtatcaccacatccacagagacatccacaagtgcacagtcgacctctaccattctggcagacacatccactacaccaaacactccaactataacaacagaaacatcgcaatctacagtgacacaagctccaacaacactacagccaagcataacaacgacacaagcttcaacaacaacgcaactgcccaccactaacttcaacggcagcaccgtcaacaacaactacaccaccttccacaacatccacaacacaagcaccaacaacaacaacactcgtgcaagcttcaacaacaacaacactacaacccacaacttcaactacaccgcaatcaacttcaaccacatctacacaagctccgacgacaacaacaacacaatcaacatccacagctacacaaccttcaacaacgacaccacaatctccaccaacaacaaccactcaagtctcgaccacttcaacacaacccacaacaacaactactccacttccaacaacaacaactactccacttccaacaacaacaactactccacttccaacaacaacaactactccacttccaacaacaacatctactccacaacctacaacaacaactacaccgcaacccacaacaacaactgtacctacaacgacaaccacaactacacaagcttcaacaacatcgcagtccgaaataacaaccactcctgcaccgacgagcagcactga

SEQ ID NO: 39135 - protein, 337 aa, DROSOPHILA
MLPSLCLTVGQESSFLASITSSNNQLQSANGTSLNNETITINISEIIAAAEAASNTTESSSTTAPLSTTTEATSTSTASSATSTTVPASTTLTSSSTTQAGITTSTETSTSAQSTSTILADTSTTPNTPTITTETSQSTVTQAPTTLQPSITTTQASTTTQLPTTNFNGSTVNNNYTTFHNIHNTSTNNNNTRASFNNNNTTTHNFNYTAINFNHIYTSSDDNNNTINIHSYTTFNNDTTISTNNNHSSLDHFNTTHNNNYSTSNNNNYSTSNNNNYSTSNNNNYSTSNNNIYSTTYNNNYTATHNNNCTYNDNHNYTSFNNIAVRNNNHSCTDEQH

SEQ ID NO: 39136 - DNA, 2382 bp, DROSOPHILA
gcatctatctacccgaattgatactctcgagtccctgccagttggtctcagtgattgggaagtcctaaagctgctagaaggctataatgaaagtcaaacacccactaaagttcctatggctgcgctcgaaattttctttgattatgcaaatgtcacagctgagagggcaaaatctgtttcaattggcatcctgatttgtctacaatctatgtatgtacgaatttcagaataaatgcattaaaatagaagctttcattgagaagttcattttaggatgaagtaagtaaaatgaagtgcttatattggggtcaaattcatctagaattgaaatggcatgctagtcatttcggggaatagttaactagtgcagttcaatcaactttccgtgcgcttttcccgtatgtttgtcacgcccccattaaccccatggaaaaagtgacatgacagacaggaatcagacttgagctggggctcaatccatcacatcagtgcggaagagaccagtcatcatcatcatcgttgtcgtcagtgcgcttgttcccctcttggccaccatcgttgcccactgaccaccattgtcatccccgtatccgaatataatatagagtagcggaattgtatctttattacgataattgctcattgaacaggaaattattatatgcgtccggggctcggcatgtcctccaattccaaagcccatcaattttcttggggagatggaaaaatcatcaacccagaactcaacggggatataataatagaacaacatgcgtccgaacagggtccgttcttctccaagggttactggttcaggtggcaatgagaatggaagtggtagtggattgtgtttggggtttcgggccttttagctgatgatgacatttttcttcttttttgcggacgacgctcagaaatgaaaaaaaggacatcacacacgcacaggaaggggagaggcaaaagacagtgatggcaagtgtggtaagagaaggtacagatcctaggggtttggtggcagtccccgcaatggtggatgatagtcaccagcgtaattaccatagccaccgccatcacaatcgccctcgccaatcaaaccgcttggcatcggaggctccctccagttccacacgccgatactatcgccgcctcccatatttaattccgtcctccgtcgatgtagcattacacgcatattgatcatgaaacgattcacatcccgctgatgatcgatgcgcaattgaatcggtggaatttgggtgattcgacgttcatcagtcgatggctgtatattgcgctcttcttcgcccggcacgcgatccatattcaagcgaatgcgaaaactctgacctggatttggcctaaatggattcattttgaatattttaaagctgttcttactgaaatttcgatcgaaacgttctgctgctgttggggatttcgaataactaatatttttctgacacggtagcacacaataccgattgatagaaatctcaatgagacctgagcatctgaaatatgtgacaagacaaataaagctgaattgtggaatggtattatgtgaaatattgtacaagagataagagataaccaaaaaatttggataactaattccgacataatccgactgggggacttccggtgaaatatctatgcgatctatgtggcccacaagtacacatacttgtgtacgctcgatgcatatttaattaaactttcacctactcaaagacgacaaagaatctttggcgagggcgacaggagacaagtccagaacactttggtctctcgcttcaatcattttcatggggtggattggatgcgctagtggatgtcctagctcgaggacctgttactctcatcctggttcctgaagtacttaaaagcaacacgacaagctttaattaaatcagttttaattaatgcaaaatgcgaaatttcaaaagacgtcgttgagcaagcgcttggctcaaattgccgacaacatggaaaacagaacacagaggcggtgagctccaaaggaccccaaaaaggatccgcatcccctcgaacgcaacgttttgttgtcgcataattacaactcaattgtaatccaattttggccaggcatataaatccgattcaggcacaaagtcacgcccccggcctggtgtctgtgtcaactttttcggtgtcaaataaataaacttttgacagtcggcagacaggccagcggggttttccgagctccaactccgcccgaaaaagcccatccgcacacctttcgctttttgtggccaccaccggaaatggaaatttgttaacaatggtgggtggattgggtttggtggcatgtatctgggatgccaaaatcaatgccccaacagatggattagatacaga

SEQ ID NO: 39137 - DNA, 382 bp, DROSOPHILA
aatattcaaaatgaatccatttaggccaaatccaggtcagagttttcgcattcgcttgaatatggatcgcgtgccgggcgaagaagagcgcaatatacagccatcgactgatgaacgtcgaatcacccaaattccaccgattcaattgcgcatcgatcatcagcgggatgtgaatcgtttcatgatcaatatgcgtgtaatgctacatcgacggaggacggaattaaatatgggaggcggcgatagtatcggcgtgtggaactggagggagcctccgatgccaagcggtttgattggcgagggcgattgtgatggcggtggctatggtaattacgctggtgactatcatccaccattgcggggactgccaccaaacccctag

SEQ ID NO: 39138 - protein, 106 aa, DROSOPHILA
MDRVPGEEERNIQPSTDERRITQIPPIQLRIDHQRDVNRFMINMRVMLHRRRTELNMGGGDSIGVWNWREPPMPSGLIGEGDCDGGGYGNYAGDYHPPLRGLPPNP

SEQ ID NO: 39139 - DNA, 2300 bp, DROSOPHILA
ttttttttttattttgttgccactggtttctgggctcctgcataaatcatcaacggaatggcctttaatgcataatttatctaccgtttcaggatgcccagctatctctgtctgcggttttcctcttgtttttgtattgtttttgaatatgcttggttttagagctgagcaaatttatagctgacgaacatttccgcttccgtttgcaattacacgagcggctaaaataataacggacagcgattgcaacatcaagatgtcccccacaatctattattccaatggaactccaatagacttggcttatatcttcacttactactagtggatgttcttttggctatacaaatttcatttgaaaaagatgtaccttgattgctttcataaatcgtactagattggttccgctttaaaacatccatttcgcggcaagttcatttggttttaacttcatatcgtcactttgcataggggaccgaagagaatcgggcacaggggaaaagtgagcttgtgaaaagttggcagcacacaaccccctaccccaccaccacccacacggtgatcaacttcaaattttcacattaccatcgcaccgtagaatgtttgattttcaccgcttaatttatgatttaattgcatatttggcggtgcaatgcaaatatgcacccctctgtggttggcctgcaatgccacgcatttcatttagataaccacaaatatttgccacagaacgcgtctgccaccagagggccaatcgggcgtgaataattcggtgccaaatgtgaattattggtgcacctgcacattaaggcaattaaatcagaacaaaaagacccatgggacatgataatttgttaacttcccgaccaaataaaacaacaggattctctattctgttaaggactctaattaatttccaggagcttttgttatattctgttcgtgtacgctctgtttcggggtattcttaatatctgtaggcttggcggtttcccaaagtttagcggtttggcgaggatccaagagtagacatcagttcaccaaggcgtcgggatcgcagcgaaaactggtttccctggcgtttcagaatgccgtattcgacgccatcgcgcaggttgacttgcacttggcgatagaactccggatcgttgcgtcggtactggacgcccaggacgaagttcaactctttgtcactcatgggtcggcgcgtctcctccaggacgcgtagtatggacctcagtaggttggggaccaacttccgctgttgcggcagtgtgcgagtcctgtaggtgacgggcatggtagtaaaattttttacatttttttgttgacttttttatattccttttttggaaaccaaatgtgtagacaaattttgcgaccgactcgccgggcagcctgagtcgttatgagctcgggaacgaaagccccagatacgtgtgacagcaaaaaggcaagccaactacatgaatttcctgactgcttcgatcctcgaaattttcacattatcatcactccgtagaatgtttgattttcaccgcttaatttatgatataattgcatatttggcgattcaatgcaaacattcacaaatatttgccacaaaacgcgtctgccaccagaaggccaatcgggcgtgggattcggtgccaaatgtaacgtttaacgttggtaaagcacagtttcgactaatatctgactttgcaggatacggattgcgaccctgttacagctgctactgcgtcgattacccggatgttcaacaattggcaaggccctctttacgtatataattaaagtgcatactttaagaccgagatgtatatatgtgtccaaacgctttagccgccgttgcacagtacaaaaagccccatggaacatgataatttgttaacttccctaccaaataataaccaaataaaacaaaaggatacactgttctgttaaggattattcttcttatctgaagtgtgggtttggcggttttcaaaggttcatcggtttggtgaggatccaagcgagcagcgaaatctggtttccctggcgcctcagaatggcgctttcgatgccatcgtgcagattgatttgcacttgggcaaagaattccggatcgttacgttggtactggctgcccaggaagatgttcagctctgtgtcagtcatgggtcggctagtatgctccaggaccattataatggacttaagtaggttgggtaccaaccgacgtttcggcagtgtcgtgaagatgtcggccatgtttaatttttttgtcgtttttttttgtgatttttttttttttt

SEQ ID NO: 39140 - DNA, 300 bp, DROSOPHILA
atgcccgtcacctacaggactcgcacactgccgcaacagcggaagttggtccccaacctactgaggtccatactacgcgtcctggaggagacgcgccgacccatgagtgacaaagagttgaacttcgtcctgggcgtccagtaccgacgcaacgatccggagttctatcgccaagtgcaagtcaacctgcgcgatggcgtcgaatacggcattctgaaacgccagggaaaccagttttcgctgcgatcccgacgccttggtgaactgatgtctactcttggatcctcgccaaaccgctaa

SEQ ID NO: 39141 - protein, 99 aa, DROSOPHILA
MPVTYRTRTLPQQRKLVPNLLRSILRVLEETRRPMSDKELNFVLGVQYRRNDPEFYRQVQVNLRDGVEYGILKRQGNQFSLRSRRLGELMSTLGSSPNR

SEQ ID NO: 39142 - DNA, 2270 bp, DROSOPHILA
cggtttcccaaagtttagcggtttggcgaggatccaagagtagacatcagttcaccaaggcgtcgggatcgcagcgaaaactggtttccctggcgtttcagaatgccgtattcgacgccatcgcgcaggttgacttgcacttggcgatagaactccggatcgttgcgtcggtactggacgcccaggacgaagttcaactctttgtcactcatgggtcggcgcgtctcctccaggacgcgtagtatggacctcagtaggttggggaccaacttccgctgttgcggcagtgtgcgagtcctgtaggtgacgggcatggtagtaaaattttttacatttttttgttgacttttttatattccttttttggaaaccaaatgtgtagacaaattttgcgaccgactcgccgggcagcctgagtcgttatgagctcgggaacgaaagccccagatacgtgtgacagcaaaaaggcaagccaactacatgaatttcctgactgcttcgatcctcgaaattttcacattatcatcactccgtagaatgtttgattttcaccgcttaatttatgatataattgcatatttggcgattcaatgcaaacattcacaaatatttgccacaaaacgcgtctgccaccagaaggccaatcgggcgtgggattcggtgccaaatgtaacgtttaacgttggtaaagcacagtttcgactaatatctgactttgcaggatacggattgcgaccctgttacagctgctactgcgtcgattacccggatgttcaacaattggcaaggccctctttacgtatataattaaagtgcatactttaagaccgagatgtatatatgtgtccaaacgctttagccgccgttgcacagtacaaaaagccccatggaacatgataatttgttaacttccctaccaaataataaccaaataaaacaaaaggatacactgttctgttaaggattattcttcttatctgaagtgtgggtttggcggttttcaaaggttcatcggtttggtgaggatccaagcgagcagcgaaatctggtttccctggcgcctcagaatggcgctttcgatgccatcgtgcagattgatttgcacttgggcaaagaattccggatcgttacgttggtactggctgcccaggaagatgttcagctctgtgtcagtcatgggtcggctagtatgctccaggaccattataatggacttaagtaggttgggtaccaaccgacgtttcggcagtgtcgtgaagatgtcggccatgtttaatttttttgtcgtttttttttgtgattttttttttttttttgggaaaccaaatgtaaaagtatagaaaaattttgttactgactcaacggctggcctatatcgttattagctaggtaggggaacgaaagtcccagctatttgtgacagtaaaaggcaatgccaactacatgaattttcagcctgcttcgatccttgctttttggccttcttgccggtgtgcttcaacagcatggccaattaatcagatggcgactgtggcgggttgaacttgaatgacctcgaggcataaaaacgaaaactgcaacaacaaaggcaacagccagaaaagcaacaaagagcaggaaacacagcaactaaagaaaggctgatcgagttgatagtgtcttcaataaattaaaatacccactaaagtatcttgatttgcaagttaaagtgcgcctcttattttgtaacttttagattttgcgttgcaaaaatacatgtatatttctattgcatctttgggtgcaacaattttccgagtgtagccaggaagcgaagggcccacaaacatcaagtgacattcgagcagagacaaaaagtcattatcacggcgacgtcgggccgctctcatctccacatctccgcatctccaccactcgtgcccacgatctcggccatatatacatatatgtatgtatacccaggatccccttcgcattcgcattcgcattcgcctcatgttcagcatatggagcacgtggtttggagtcatagtcatcgccatagtcgccaccgtctttgtcgccatgttttttgccttttccggcattttgtttacgattactttttgtttttgtgcttttacgtagcatctgtgcagctcaggagtgcattgaagggggatcggtgtaatttgagttattggttgctatacagtaaaatataaagggcagtattgagcgaaaagaagccgccggtaatcataacagttttaagtttgtgacaaaatcgt

SEQ ID NO: 39143 - DNA, 270 bp, DROSOPHILA
atggccgacatcttcacgacactgccgaaacgtcggttggtacccaacctacttaagtccattataatggtcctggagcatactagccgacccatgactgacacagagctgaacatcttcctgggcagccagtaccaacgtaacgatccggaattctttgcccaagtgcaaatcaatctgcacgatggcatcgaaagcgccattctgaggcgccagggaaaccagatttcgctgctcgcttggatcctcaccaaaccgatgaacctttga

SEQ ID NO: 39144 - protein, 89 aa, DROSOPHILA
MADIFTTLPKRRLVPNLLKSIIMVLEHTSRPMTDTELNIFLGSQYQRNDPEFFAQVQINLHDGIESAILRRQGNQISLLAWILTKPMNL

SEQ ID NO: 39145 - DNA, 3763 bp, DROSOPHILA
aaaaagaagtatgaatccagcggaaaacccaaggagtaaaattcgccctgaatgcaatgtgtggtgtgtgtgtgaaaaattgaaatttattgttactgtaagctccgtgcaaaagcacacacacacacatacgcagcgcaattgtggggttaaggcggccaagggttaaggcggtggtttcacctttttaccgtttgccattgaatcactccagtcgccgacaaaataataatgtaataataatttttccaactcgttaacacatgaaaacgtgtatgctccacacacgcacacatcctgaaaacacacacacacacgcacacacacagcagtgaaatgagcatcggggattccccgcgtggacaaaattaatgatgcgaaaccgtttgtggacggaaaaggtaggacctaagtatttgaacatttaagctaaagtaaagatttgtaaaattaaataacaatgtgcaggaatcttagcaaattatttattaccagcaagtgtccttttttggccccaattcgcgacacctgcttccttcgatattgttcctagcagcagagacaaaaaaaaaaggacacaagaaatccatttgtgacaagtggtctgtgcagcggggagcggggagcggggagcgttgacaggacgaccgcacaaataattgaaatcgattcatcggcataaattgctttaattaaacgagcggaaataataaaagcgcagtgataaaaacgcttagcacagctgttcgggctgaaaaattgtgacagctattgagacaattttcccctcggccaaattcaacaattttatatatatgtacatatgtatttgccaatcaatcttatcgatcttatacatttttgaggcatttcaatcgaacatttgttattatgtcattttgttaactgtaatttaaagggtgtaatgggtgtggttagggggggggggagtatgtgtgtttctcatatgcgaaatatatatatatatgttcatatacatttaaaagcctaggactttgatcatttggtcggtttcgagcacatagctctccatgggacgcacactctcctcggacgatttctcgataggaactacaactttcggctggaccaactgcctcattcgacagacatgaagaaaaaaatacgcatcgatggcgtccaggttgctcgaatagaaatcggtttggagaaagagatcttcttgaagatcttcctgtgcagcacaagtcattgctgttggcaatacaaatctcgacatagcgttgggtataaacctgggccttaatgtaccatcacgtataagattgtcaatgcgtcgctcaatatttctgtcctgcgcggccatcacttcgttcagtcgcaatagtgtgccacgaaagaggcgagcaatgaaacaatcatcctcttcgggctgcggtagaccttcggacatttctggcgctgatggctctactgacacctgcgcctcctcatccttgtcctcgggcagctcattgatggtctgtagatcatcggacggcggcatgtatgtattaacacgtctgggccaacgctttgaggattccattagacgctgagccctttgtatcgcataattcgaaatgacatgaacacagataagatgagagtagggaccaccaggtcgcggcaaatgataatggcactgctcatcgtatatccactccctgggcatatcgaccagcaagcccttggagcgacagaagtcgagaaactcacgacgacttgtatgcaaatggtgcatttggaccacagtaattgcacagctgatcctctcacgaatgtgaatattgccacgaacagcgttcataaagggctcgtcgggcaccggtggtgccatggcacagcgccaaaatcttttcaaaattggcagtggtaagagtgtcagccgaaggcagtccatcaatagtggcgtcgcctggtcaatgcatttcgattgacaattcagccatcttataatggccacaagcacctccatttccgaattgacacccaatgagtcctgctgcagcatggtaatcacatcctcgagaggcattcgctgaaaatcatcaccacccagcacggccagaaaagcagcaccgatcctttgcagcatcagtttgcgcagctcctcgagttgcggatatttcaaagccctcaagtaaacctgaaaggcggtctcctcgcgaaagcgatcggtgcacagttgttcatagcacaatgctttcagtgccggcatctccagctggacggctgtgtgcaggagcgtcattagtttatctggttgcatgaatggatccagtggctcctgcagtctcatccaagtgtaggcagctcgaaagcccacggcaataaggtcggtgccctcgcgaaagcaattcacctaaggtacagagtacagtgctaagttatcgacatatacaaatcgcgcaattaacaatatcatcgataaacgatatcgatgaaatgtgttctcttatttaccggacaaatgttgcgatcaaaatagttgctatgaaattgcaaaagtgacgaagtacaccaaaatgttgatgtgccaatgcacacacgcgtcacggcacccagacttctaaacaccgacgcatggaagtccatcgcatcgttgcacggatggatggcctcaccgtggcgtcgatggatctcattgctccatggcaccacgctattgaaggccagttcgctggtgaatgcgggacgagcgaagcctttcagtttatttgtgccatcgatgtgccccatattttctttagcggcaatcgaaaaaaaaataaaaacacaaaataaaagaagtaaattattaacgcgtagaacgcacaaaatttcatttccaattattttcttaagagtgcgcacaattaatatccggttttgaaaagcacacgccgcgaggcattgcggaattcgattatgcacgccatttcacttaccgtttcacaaacgagtgcagtaaaatatatatatatacaaaacttgtaagaattctacacaattttaaaagtagtgttcttctcagtctggttgtgcaaactgactgaaacaatgtccgatcaccaaaaaccgactgtcatccaaaaactgacattaaaagcatggcatgcctgggtttggctaacaatgttcggatttaattatttataaacaaaaaataaataaaataaatactaaatcgggtatagagattgtttagtacgcgatccttgcaacaaatatgcaaaatcgctgatgtggacatttcattctcctcattctccaaatcgatttaacgtcgcaggattagcagggttgccgcagggctagctaaatttttcgactaatcatcactgtgcgtgatgggattcggtgattgattttggccattccatgcccgcccgaaagccaatcactcctgctgagcatatttctcggccagctaatggaattttaacacaaattagttgtattacttagatgccagctatttggtaatttggtaatttggtaatgccaagtgccaagtgccaagtgccaggaacaggaagaaggaagccgggagttgccctgcggcatttttggtaattacgagcgaagcctcgagaaccgaccgcaaaagcaattttcttgccaggccaggacatttaccgcccacttttgccaaaaggatgtttgcctaacctgatctcgccgcgacgtcggccacctttccaccttacccattttgttcgcattcaatacttttcttgctgggcaataaaatcaaatc

SEQ ID NO: 39146 - DNA, 1569 bp, DROSOPHILA
atggggcacatcgatggcacaaataaactgaaaggcttcgctcgtcccgcattcaccagcgaactggccttcaatagcgtggtgccatggagcaatgagatccatcgacgccacggtgaggccatccatccgtgcaacgatgcgatggacttccatgcgtcggtgtttagaagtctgggtgccgtgaattgctttcgcgagggcaccgaccttattgccgtgggctttcgagctgcctacacttggatgagactgcaggagccactggatccattcatgcaaccagataaactaatgacgctcctgcacacagccgtccagctggagatgccggcactgaaagcattgtgctatgaacaactgtgcaccgatcgctttcgcgaggagaccgcctttcaggtttacttgagggctttgaaatatccgcaactcgaggagctgcgcaaactgatgctgcaaaggatcggtgctgcttttctggccgtgctgggtggtgatgattttcagcgaatgcctctcgaggatgtgattaccatgctgcagcaggactcattgggtgtcaattcggaaatggaggtgcttgtggccattataagatggctgaattgtcaatcgaaatgcattgaccaggcgacgccactattgatggactgccttcggctgacactcttaccactgccaattttgaaaagattttggcgctgtgccatggcaccaccggtgcccgacgagccctttatgaacgctgttcgtggcaatattcacattcgtgagaggatcagctgtgcaattactgtggtccaaatgcaccatttgcatacaagtcgtcgtgagtttctcgacttctgtcgctccaagggcttgctggtcgatatgcccagggagtggatatacgatgagcagtgccattatcatttgccgcgacctggtggtccctactctcatcttatctgtgttcatgtcatttcgaattatgcgatacaaagggctcagcgtctaatggaatcctcaaagcgttggcccagacgtgttaatacatacatgccgccgtccgatgatctacagaccatcaatgagctgcccgaggacaaggatgaggaggcgcaggtgtcagtagagccatcagcgccagaaatgtccgaaggtctaccgcagcccgaagaggatgattgtttcattgctcgcctctttcgtggcacactattgcgactgaacgaagtgatggccgcgcaggacagaaatattgagcgacgcattgacaatcttatacgtgatggtacattaaggcccaggtttatacccaacgctatgtcgagatttgtattgccaacagcaatgacttgtgctgcacaggaagatcttcaagaagatctctttctccaaaccgatttctattcgagcaacctggacgccatcgatgcgtatttttttcttcatgtctgtcgaatgaggcagttggtccagccgaaagttgtagttcctatcgagaaatcgtccgaggagagtgtgcgtcccatggagagctatgtgctcgaaaccgaccaaatgatcaaagtcctaggcttttaa

SEQ ID NO: 39147 - protein, 522 aa, DROSOPHILA
MGHIDGTNKLKGFARPAFTSELAFNSVVPWSNEIHRRHGEAIHPCNDAMDFHASVFRSLGAVNCFREGTDLIAVGFRAAYTWMRLQEPLDPFMQPDKLMTLLHTAVQLEMPALKALCYEQLCTDRFREETAFQVYLRALKYPQLEELRKLMLQRIGAAFLAVLGGDDFQRMPLEDVITMLQQDSLGVNSEMEVLVAIIRWLNCQSKCIDQATPLLMDCLRLTLLPLPILKRFWRCAMAPPVPDEPFMNAVRGNIHIRERISCAITVVQMHHLHTSRREFLDFCRSKGLLVDMPREWIYDEQCHYHLPRPGGPYSHLICVHVISNYAIQRAQRLMESSKRWPRRVNTYMPPSDDLQTINELPEDKDEEAQVSVEPSAPEMSEGLPQPEEDDCFIARLFRGTLLRLNEVMAAQDRNIERRIDNLIRDGTLRPRFIPNAMSRFVLPTAMTCAAQEDLQEDLFLQTDFYSSNLDAIDAYFFLHVCRMRQLVQPKVVVPIEKSSEESVRPMESYVLETDQMIKVLGF

SEQ ID NO: 39148 - DNA, 2285 bp, DROSOPHILA
gcagtgccggggataatggcccaaaatccggagttgtgtggccccaaaggtgaacgcagcgcaatgcgcggcctgccagctgaaaatttaattacatcacaatggcggtgcgggtggaaattttcgagaaagtccgagccaagacagcgccacatttttcacattaacgaaatgcttttaattgtgcacttaacgctcgtaaaatgtgatttaatagtttcggcgaatgccaaaggccaggactcggaaaagaggactttccttttctcttttctttctttcattacgtcgtgttggtggccaaaaagggggtgtgaatgtccttggtgcgcgcctcgtcggatgcggaagcggaagtggaaatgaaagttgcctgcctcataagttggcgtagttcctacttaaccgcaacacgagcaaacacttgcaagcactggcagaaaagtatatatactaaatagcatttacaccacttgatgctccatcaaatggcagactgaccaagatttctccctgtgcaatcggacccatacaattacaggcgactgacagcccaatttggaacggcatgtatataggtgcgagcttatcggagactccatctcggcccaactttggggaattctccaggctgccggccggcaaacaaacaatagaggccaacagtttgggcttcacaacgatgaggaggcggagtgctgaaatcaatacgaagtgggtcaccaaatggctcccagtacggtcacttaacccggaagcggagcgcagagttccacgatgcccaacaaactggcggcatgtcgaacttggagcaggttgcaagtggaagctgtctgttttgtgatggaaacacttcgattggaaagcattacggttttatttctagcaattttcggaaattatccaaacaattttgtgccctattttttttttttttttttttttgcaaagcccacaccatggtagagcgacacgatttttgattctaatagattcactattaactccttagcattgctttcgctgtgtggcgtctccctttcttgccgccgctcggctgcgtctcgtcccagtagccgcaggccagcgtgaacagcccgtcctcaatggccaggaaaccgtgcatccagccggcggtcagcgtgttatccaccgccagtcgcacctcgtcaacagtcttggcctccatttcggccacatacgaagccacctcgtccaggttgagtggacgatggaatacgttgaaggcctccaaaatgtggtcagcgtacaggtaacgcgccattgccacaacaaaattccaagggaaatgcttggtgaaaatagaatttaagagagtaaatctgtcgtatctgtttggttggagttaattgaacaaggtctctagacggaatgaaactgaatttggaaatttcatacgaaacatatgaaacttcggtttatatcctgaaattttccagcactttaagaatcgtccatattccattgaaacaactttcagttgactgttagctgttttccattttggcttcaacttggggggtagaaacccagtccatggcaaaaaaaaaaataaagaagatggagactggcgattatatcgtttacatttacatttacaccaaatgcaggaaaattggagcgccaggcattttcccattttccagagtcttttggcccatttagttgttggtcgtttagcattcgcattcacttctagatttgtcatttatgataagcagcagcagtgccttgcccagcaaaaggcacgatccagtcattgtttagcgttcctttaagccagtaactactgtacagccgcatgtatacgggtatatagttatttattcgcaaatcacgctcagttcaaatgcatttggtgcacatgcaaattgaaatgcagcagagaagcataaaaaaaatctgaaaatctgaacagagatgcatatcatttggaggactaaacaaatagcaatatacaattaaactaagcataaaatttctctattgtcctgctgctgctcgagtataaaattggtccaaaaatcgatgaaaagccccccctacggaaataatttgactttgactaatgaaagtgcgaaatgctgcatggcaaataaaataattgctttgggacatcattgcattaagtacacaggctcgagatacatatgtacatatgtacataccatacatacatatgtacgtggaaatcgcaaaggaaagtgctttaaaatccatttattcgcccggcggctatctaacgtttgaacttgccacgtaac

SEQ ID NO: 39149 - DNA, 285 bp, DROSOPHILA
atggcgcgttacctgtacgctgaccacattttggaggccttcaacgtattccatcgtccactcaacctggacgaggtggcttcgtatgtggccgaaatggaggccaagactgttgacgaggtgcgactggcggtggataacacgctgaccgccggctggatgcacggtttcctggccattgaggacgggctgttcacgctggcctgcggctactgggacgagacgcagccgagcggcggcaagaaagggagacgccacacagcgaaagcaatgctaaggagttaa

SEQ ID NO: 39150 - protein, 94 aa, DROSOPHILA
MARYLYADHILEAFNVFHRPLNLDEVASYVAEMEAKTVDEVRLAVDNTLTAGWMHGFLAIEDGLFTLACGYWDETQPSGGKKGRRHTAKAMLRS

SEQ ID NO: 39151 - DNA, 3288 bp, DROSOPHILA
cacacgtggatgccacgctctgaagacaacttcaaaaagcacctttatgaatccccgaaaatatgtatttaaaaaaaatcccaatggtagactgctgtgactggactgtcaatcgtcgaggataacatgcacacattcacatcgaaataaaggttcaaacagtttcagaacaaattttcattaacacataactttttcggcacattttgacccataaagatattgaatacatagaacacagcattattttaagacttaatttaggataggcaaccatgtccgcaccgaagcggtcaaacactaaacaaccattcgacaatcagcaggacctggaggagttgtatcccgtcgacgtggatacactcaatgacccaatgactaactggaaggacgtggatcgccagttggaggagggcatgggtgagcttgacaatcaatgtgcatttttagaagaggccaggggtctttaagctttacagaaaatccaaagttcaaagtttagtaacgagctcatcattgcaatatctcaattcatattagtaatggtcctatggtccttttgacggaaaattaaaaaaatgtaatttactaagaaattcgatagttcttcgaacagtgctttcatcacaacttggctaaaaatggtcataaagctgaacagtaaactgttttatgaagctaattaccaatgctaactagccgtattacttttaaatggattttcaaaaattaattttttcgtgaattttcacatttttgataaggggtaacatcatcaaaatttgcaaaaattggcaaaaaattaaagttcccaaatttgaatgccaatcgattgggaattgaattacgagctcaacgaggtatgacagtcactatttcgacaaatttttgccacttttaagatggaataagtgattattttcagtcgaaaatacagaaaaacgacttcttgccttaatttggcatgaatcaaataattatttgtggtattttttcttgcatgtgcaccacagacgagttggagctcatgtttaatagactcgtatcgcagcctttgaagggaaaaggactgcccaatgacaatagtcgcaatttaaacagctccaatccgattatccaccacttgtatgatagtccgctgccggttgccaagggatcatgtgagccttcagctggtaatagtaatagtaatctgctccaaaatccagaagataatgacccgaagatcgaagaatcagaatcagaacaggcggatgtcctggaaatagatgcgggagtccgtttcctggccatcaggttctttaatatattactggcaaaatgttggcgtcggcgaacggccgaagtcaacgatctgcacacgctggttcgcaagtaccaagcccatgtaagtagcagccaccagatgtacatatatgtatgtacatacacagatataacacatgtaagttggctctccttcgcaggccgttcgcacccaaacagagctgctaacgcgcaaccaaatgatctgcacgcaacagcgacgtgggcagctgctgaacaatcagctgttgcaggccatcgatcgcctccgcgtggccatgcaaaactgcaccgagctggacaccgaactgaagcagctgagggagcgggaagtggcgctgaacaacaagctagcctccaagtcgctggagtgtgaatatatagacgaaatgctaaataactttcgcagcgatatgtttcaccagctggccaattatcgcgagggagccgccgagttggccaagcagcagcggcgggccctccaattggagtatgaaaacgccgatctggaggatgcactgctaacgatgaaggataagtttctcatgcagaacgatcaaatgtcggtggcgcttggcgagaaacagcgaaaactggacgctgcttatgagacactaagatactatgaacaggaactgattcacctggagatgtatgttgtcactagacactaggttctcactaaaatcgtttgttaaaaaacgttttccaacagaaggtaccgggagacgttgagccaaaccggactggaagtcgaactgcagaaggaggtttcgagtctgaaggagaaaatgagctttactcgccggctgatcttatacatggctgccgtcaaatggcagtctttccgttcttgcatataccacgtggtggccggaatactcgattgtgtggcgccatcgttcaccacacccccaatgaaggacaatttactccgaataggcatggtcgccatctttttgctaaatgctagaatgtattgatttggctgaaggatgcgaaaaggactctggctacgcatccagggacgtgcaacgacgaatgagaagcgtattaactaggaatcaggtagctgagcaacacaataccacaaattttatgcgtatattagatatatttcatctttaatgtgcccacggtttttcctaaacgaaaaacaaatttcgaataaattttgtaccagtcttaaactttacattttttcttatttcctttttgctttaaaataaaactaaagcgaaataaactcataacgtgcatgtccaaatcccattttttccaactcacttgattgcaacatccgaatgtgacgactgtccccacacattatagtttcgttgcggcggaccgcaaaatacacaattcattctaatttcgaaatggtattcaaacacgattgacagtttggtagtgaatagccaatagcctgccagaatgttatgactgtttgtatttggtcaataaaatacccattacttttgcacacagcaatgtgctttctcctctactttgaactgtagactgtaactctgcattaagtacttggggattaatttgtttcaataattagtagcctaacactgaaatggtcttgtatttaattaataaacactgatcaagtagctactgacgatatgttcattggacacaaagagtgtcgagtaaatatgatacaaagtgcggaaaagctttacaaaaattacgcatacgccgtgtgctcacttcgaatattggcattcattggagggcccaatgtcatccgaattacggaatcgctggctcaactcaagcgaggtgaactgagtcgacgtaggcacaaaggccttaactcgataaatgcataatacaatgcgaaccataattgtggcaatgggtatgaaagtgcgaatggcaatggtgttcattgtatgtatgtatgtatgtacgtatgtatattgtatcatccaaatggatatgccaaatggagcacggagactcgacgtt

SEQ ID NO: 39152 - DNA, 1146 bp, DROSOPHILA
atgtgcaccacagacgagttggagctcatgtttaatagactcgtatcgcagcctttgaagggaaaaggactgcccaatgacaatagtcgcaatttaaacagctccaatccgattatccaccacttgtatgatagtccgctgccggttgccaagggatcatgtgagccttcagctggtaatagtaatagtaatctgctccaaaatccagaagataatgacccgaagatcgaagaatcagaatcagaacaggcggatgtcctggaaatagatgcgggagtccgtttcctggccatcaggttctttaatatattactggcaaaatgttggcgtcggcgaacggccgaagtcaacgatctgcacacgctggttcgcaagtaccaagcccatgccgttcgcacccaaacagagctgctaacgcgcaaccaaatgatctgcacgcaacagcgacgtgggcagctgctgaacaatcagctgttgcaggccatcgatcgcctccgcgtggccatgcaaaactgcaccgagctggacaccgaactgaagcagctgagggagcgggaagtggcgctgaacaacaagctagcctccaagtcgctggagtgtgaatatatagacgaaatgctaaataactttcgcagcgatatgtttcaccagctggccaattatcgcgagggagccgccgagttggccaagcagcagcggcgggccctccaattggagtatgaaaacgccgatctggaggatgcactgctaacgatgaaggataagtttctcatgcagaacgatcaaatgtcggtggcgcttggcgagaaacagcgaaaactggacgctgcttatgagacactaagatactatgaacaggaactgattcacctggagataaggtaccgggagacgttgagccaaaccggactggaagtcgaactgcagaaggaggtttcgagtctgaaggagaaaatgagctttactcgccggctgatcttatacatggctgccgtcaaatggcagtctttccgttcttgcatataccacgtggtggccggaatactcgattgtgtggcgccatcgttcaccacacccccaatgaaggacaatttactccgaataggcatggtcgccatctttttgctaaatgctagaatgtattga

SEQ ID NO: 39153 - protein, 381 aa, DROSOPHILA
MCTTDELELMFNRLVSQPLKGKGLPNDNSRNLNSSNPIIHHLYDSPLPVAKGSCEPSAGNSNSNLLQNPEDNDPKIEESESEQADVLEIDAGVRFLAIRFFNILLAKCWRRRTAEVNDLHTLVRKYQAHAVRTQTELLTRNQMICTQQRRGQLLNNQLLQAIDRLRVAMQNCTELDTELKQLREREVALNNKLASKSLECEYIDEMLNNFRSDMFHQLANYREGAAELAKQQRRALQLEYENADLEDALLTMKDKFLMQNDQMSVALGEKQRKLDAAYETLRYYEQELIHLEIRYRETLSQTGLEVELQKEVSSLKEKMSFTRRLILYMAAVKWQSFRSCIYHVVAGILDCVAPSFTTPPMKDNLLRIGMVAIFLLNARMY

SEQ ID NO: 39154 - DNA, 4693 bp, DROSOPHILA
ttgctctgaagaaatactccaagttgagcatattcacaaagctttgcagagccaggaatgctataggtgcacaccgtgccaaattatttccttacaactttaaaactaaacattttattatatgatacatcctggaatatagcccacataggtaggaagtaacagctcttccgggaaaatattatagcttatcaacagtaccactataattaaataataataaatatgcattaaaaatataaatattttatatgtcctggtcacaagaattgatacaaagtcgtttggttttcttaagtgcagcgtctttgttggcaggagcagctacatgcactatggaaaccacttccaaactgggggccatctccgatccaggcacaaaggcacccggacaggacgagcacactcagcgagcagctctaacaacatctatttttatttcattaggtagaaaaatagccggcaaggtgaagctcctggcagcttcgccatcaaaacaaagcgctgaatattggccaaaacggaatggaacggggcgggcgaagcggggctggccacaaaaagaaactgctcttcgcttctcaattaggttagcttaatttaaatttgcttcgagtgcttggcaagtgcttgcgagacattagcagcaaatattagcaaacgcttaaagagcgccgtaagtggaaaatatcttaggcgagttttcttaaattagccgttgtaaacatttgttacgcactcgggtcgggatttagagtgtcttaaatgaaaaccggacagtttttaatgaggaagtacgtttggcaggtgcgagataactaaaacataaaacatgttcattggagtatgaagatagacaaacggcacttccataaatgtattaaggtgcactggaacacatgggttaaaaccatgttatacttatcgatcactttcagaaacaaacttcaaaaaaaaagactttcaacgcacaaacaaacatactcgaaaataactccatatggactttgaagatgatgaggaggttgtgcaaccgcactatgctcagaaattccgggctcccaccgatcccctccttctggccacatatgagctttttaagccctctcatcagaccttgaacctatacagcgaacggaatcgcgagatttttgcggaggcctttatagagggaaacttgaacactttagtcaatctgagcgtaaagagtctggccaagctgggcattcgaggcatatctccaactttgcaggcgagtccccagcttatgaggatattttacgacgcactggatgtggagctgcctttgaggtatgtaacgaaacggatacaagtattttcattacataacctataatttaacatttgacgccactaactttatatcgttatttactatggttacaaaccctaataactttatatatatttcaaagagattgctatttgatcgaggatcaacgattttggcgacgcgtcgtactaagcaagactttggacaaaacgttgcacctgaagcgctggaacgagttcgactggaaggctgagggtgtgagccggaagtttgtggagcaggttgaatcatgtcctgtgaacgtgaagccgcagagaaggctggctcagttggctgaaattgtttggcagtatgtcaactccatgcacatccgcaagctgcaagctctgcccgactatgccttcattaagcacttggagagcgagcctgaagaggatatatcctcggagtcatccgacgaggaggagatatctagcgatgagccggatacggaaatggacgagggcgaggaggagcacaagtctagtagttccagcagcgaggcagctattactttctggcgtgcggaaaccgagaacgaggacacaattcgccggaatgcgcgacatctgcgcaacgccaaccgccagcaggctcgggatgccattgctaggaaacgggaggatcgcaaggagcgcaagaggaagcgccaggagaaactggacgccttgaagaatgcggatcaatcgggcaagaaaaagaagaaaaagaagaaggaaccgcccattcgagacgtgttcagcataaacgttgctccagaagaaggtgatgacgaggacacaaaaccggacaagcgcaacaagcagctgctgctggagcggatcaagcggtatgactatccggaggaccattgtcatcacattgatctgggatttgtacgatattttgaaaatatgatgtctctgacgctggagtttttgggaccacctgatgtaaaagactatcaaaggtaagctcttaaattagaatgttatggtaagaaacaacatcgaagaagtgaaacgtgctgtacacgatttgtataacatgttttctctgagataaatggaaccaaataaatacatgtgaagtagagttctaaaagcgccaagagtctacagctgcatcgcctaccaccagcatttaaattaaaattgctagcttaaacttaacttaacttgtaccttacagccgttatatgaagttctcagacagtgatatggttcgtcttagcaaaggtctgaaatacttaccgagcctcaagaccttcaggcttcgaaacagtcgcctgagtatgaagaagtttcgtatcctgacccgtgcccttcagaacttagacacccttgatgaggtggattttggttatgaccaaatgacggatgagtgcagcgaaggcctggcctatttgctaaagcgccctttgatgtaccgcagtatccagctggaacacaacaaattgggcgccaattgtgcaattgtgctgggcgaggcgttgagccaatcgcaagtgggggttttggagtatctgggcctggctcacaatccgcttaatgaattggccctgcattcgctcataacgtgtattatcggaaccccccatgtgtgggccctcaacatttcggggatcaacaccaccctgggttcgttttcccgtgatataggaaccctcctgcgcagccacactcctctgatgagcctcgaaatggccgccatcaacattggcatctcgcaagggaatcaaatactgagatccctggaaaagaatacccgagtaagtataacattgaattaggttggatcgctgataatgaccacttttgcgaaaggggtgctgaagatcatttttaactgagtattgaacttacattcctatcctaagatcctatacgccgacttccgggaatgtgagctgagcttcgaccaggaattcgaagtggacatgatagtgcgtcggaataactacattcatgaaaacctccaccacggcgagaatctgtgtaaggtggtcaaggagcgccgccatccgattgtccagcgaatcgaggaggatttcgcccggcggaaggggtgcacggaggtgcggccgaagttctcgagctccagcaaggaatccattccggaggtggtcgttgagaagaaggaggtcgaggaggagggcgacatctgggcaatgttggctcggtggaaccagccgacagcgcctgaagtgagggaatcgcacacttcaaaggattcgcacccctctcaaaatggaaagacagaaccatttgttttcgaacccaacaagttcgatctggaccagttccggaagtctgtctttctgccaggccctggcaatcgctttttctacctgcaaaggaacaaaactccctaatttgtagcccttttcaccacctacaattgtacattgcataacattgtactctgagtatattttcaaagcattaaacgcaccacttagcagtccaacatagtccctatcattctcgagggcttggaatgtcattcgacctaatggtcactttaaaccttcgccataaagtgccgcgctggcataaactgagatctaattaagtcgctggcaacgtgttcgccttggagccacgcccacaattccgggggccacacctcgaccgaaggtcattgcagagcacagcaagtgcaacaaagttgagcagtttgcatttaagcagcggagatttgggcaacagtgtctccaatttaatgccacttcccctggctacttctgccttccaagctccacagtcaattccataaaatcgtgggcgtacactcggaaaaaatagtataatttccatgttgataaaacaaactagaaagcacttaaaacaccagtcctaaaaacagcatgttaaatccttttaacactttagttaaaagaatttttcaattcatattacttcatttgaagacttaatttccaatgttaactagcggtgattttattggaaggcttcatttcttttaaagtttttctaaacaagatatatctgctttttcagtgcaaagaaagaagctcgaacagtgcttagaagttcgtcttgttaacaaagccaaacctcagcgagtataaacaaattaatgcatatgccggttcgcctgaggtaatgtgtgtctatcttgcaattgggagacgtttccagggaagtggggtaacatatatcgagggggctaaaggaaaggaaggaaagcgcggaggggttgggtatgagttcacggccccattttgacaggatcccatgaaagatatatgtgcgctggtaactcaacttatcaacgcgccgagccacaaacttttctcatctacttaacgcagataagcggctgccttttcgccatgtttggcttctaatttgccca

SEQ ID NO: 39155 - DNA, 2239 bp, DROSOPHILA
atggactttgaagatgatgaggaggttgtgcaaccgcactatgctcagaaattccgggctcccaccgatcccctccttctggccacatatgagctttttaagccctctcatcagaccttgaacctatacagcgaacggaatcgcgagatttttgcggaggcctttatagagggaaacttgaacactttagtcaatctgagcgtaaagagtctggccaagctgggcattcgaggcatatctccaactttgcaggcgagtccccagcttatgaggatattttacgacgcactggatgtggagctgcctttgagagattgctatttgatcgaggatcaacgattttggcgacgcgtcgtactaagcaagactttggacaaaacgttgcacctgaagcgctggaacgagttcgactggaaggctgagggtgtgagccggaagtttgtggagcaggttgaatcatgtcctgtgaacgtgaagccgcagagaaggctggctcagttggctgaaattgtttggcagtatgtcaactccatgcacatccgcaagctgcaagctctgcccgactatgccttcattaagcacttggagagcgagcctgaagaggatatatcctcggagtcatccgacgaggaggagatatctagcgatgagccggatacggaaatggacgagggcgaggaggagcacaagtctagtagttccagcagcgaggcagctattactttctggcgtgcggaaaccgagaacgaggacacaattcgccggaatgcgcgacatctgcgcaacgccaaccgccagcaggctcgggatgccattgctaggaaacgggaggatcgcaaggagcgcaagaggaagcgccaggagaaactggacgccttgaagaatgcggatcaatcgggcaagaaaaagaagaaaaagaagaaggaaccgcccattcgagacgtgttcagcataaacgttgctccagaagaaggtgatgacgaggacacaaaaccggacaagcgcaacaagcagctgctgctggagcggatcaagcggtatgactatccggaggaccattgtcatcacattgatctgggatttgtacgatattttgaaaatatgatgtctctgacgctggagtttttgggaccacctgatgtaaaagactatcaaagccgttatatgaagttctcagacagtgatatggttcgtcttagcaaaggtctgaaatacttaccgagcctcaagaccttcaggcttcgaaacagtcgcctgagtatgaagaagtttcgtatcctgacccgtgcccttcagaacttagacacccttgatgaggtggattttggttatgaccaaatgacggatgagtgcagcgaaggcctggcctatttgctaaagcgccctttgatgtaccgcagtatccagctggaacacaacaaattgggcgccaattgtgcaattgtgctgggcgaggcgttgagccaatcgcaagtgggggttttggagtatctgggcctggctcacaatccgcttaatgaattggccctgcattcgctcataacgtgtattatcggaaccccccatgtgtgggccctcaacatttcggggatcaacaccaccctgggttcgttttcccgtgatataggaaccctcctgcgcagccacactcctctgatgagcctcgaaatggccgccatcaacattggcatctcgcaagggaatcaaatactgagatccctggaaaagaatacccgaatcctatacgccgacttccgggaatgtgagctgagcttcgaccaggaattcgaagtggacatgatagtgcgtcggaataactacattcatgaaaacctccaccacggcgagaatctgtgtaaggtggtcaaggagcgccgccatccgattgtccagcgaatcgaggaggatttcgcccggcggaaggggtgcacggaggtgcggccgaagttctcgagctccagcaaggaatccattccggaggtggtcgttgagaagaaggaggtcgaggaggagggcgacatctgggcaatgttggctcggtggaaccagccgacagcgcctgaagtgagggaatcgcacacttcaaaggattcgcacccctctcaaaatggaaagacagaaccatttgttttcgaacccaacaagttcgatctggaccagttccggaagtctgtctttctgccaggccctggcaatcgctttttctacctgcaaaggaacaaaactccctaatttgtag

SEQ ID NO: 39156 - protein, 743 aa, DROSOPHILA
MDFEDDEEVVQPHYAQKFRAPTDPLLLATYELFKPSHQTLNLYSERNREIFAEAFIEGNLNTLVNLSVKSLAKLGIRGISPTLQASPQLMRIFYDALDVELPLRDCYLIEDQRFWRRVVLSKTLDKTLHLKRWNEFDWKAEGVSRKFVEQVESCPVNVKPQRRLAQLAEIVWQYVNSMHIRKLQALPDYAFIKHLESEPEEDISSESSDEEEISSDEPDTEMDEGEEEHKSSSSSSEAAITFWRAETENEDTIRRNARHLRNANRQQARDAIARKREDRKERKRKRQEKLDALKNADQSGKKKKKKKKEPPIRDVFSINVAPEEGDDEDTKPDKRNKQLLLERIKRYDYPEDHCHHIDLGFVRYFENMMSLTLEFLGPPDVKDYQSRYMKFSDSDMVRLSKGLKYLPSLKTFRLRNSRLSMKKFRILTRALQNLDTLDEVDFGYDQMTDECSEGLAYLLKRPLMYRSIQLEHNKLGANCAIVLGEALSQSQVGVLEYLGLAHNPLNELALHSLITCIIGTPHVWALNISGINTTLGSFSRDIGTLLRSHTPLMSLEMAAINIGISQGNQILRSLEKNTRILYADFRECELSFDQEFEVDMIVRRNNYIHENLHHGENLCKVVKERRHPIVQRIEEDFARRKGCTEVRPKFSSSSKESIPEVVVEKKEVEEEGDIWAMLARWNQPTAPEVRESHTSKDSHPSQNGKTEPFVFEPNKFDLDQFRKSVFLPGPGNRFFYLQRNKTP

SEQ ID NO: 39157 - DNA, 3048 bp, DROSOPHILA
tgtattagacaacagtgcgtatgatgaatgccatcggaggactttcgaaacaaaaggggattaattgtatgcgaaaggtggccaccttcccacccactaatacggggggaaacaaagggatagggaattttattgtgttaattctgcggtttccttacttcggcagaacacttttaaaattccccaatgtgcagtaattatgagcatgcaaacaatgtgaatttcctaggcatgaggatatctttaaagcattaagttattgagctccttaacgcattagaatgaagaacatcgaacatacattttaaggaacctagtataaccttatatagaaggaaagcagatacattaattcactctgaatcaagaataggtacatatgtatgttcccagatggacaactcaaatcttgtaatttcacaaagcaaatagtacaacaattaaagtagataatgacaaaattacttgcaacttatgataattgcagtgacatttgcagtcccgctgtgaaaacaaatgttttcgtataaaaggggaaaaactggaggattaattcagttccatcacaatgagtacttctgaaagtccttcaagtcgctttcgcgaactatccaagtacatcaatagtttgactaatttacttggcgtggattttctttcgcccaaattgaaatttaattatcgcacctggaccacgatctttgcaatcgccaactatactggcttcacggtatttactatactaaataatggcggtgactggagggtgggactgaaggccagtcttatgactggtgggctattccacggactcgggaagttcctgacttgtctgctgaagcatcaagacatgagacgtctggtcctttactcacaaagcatttacgatgaatacgagactcggggagattcctaccacaggaccttgaattcgaacatagatcgactcctcggcatcatgaagatcattcgaaacggatatgtattcgctttttgtttgatggaactcctgccattggccatgctaatgtacgatggaacccgggttactgcgatgcagtatttaattccgggtctaccgcttgagaacaattattgctacgtagtcacgtacatgattcagacggtaggagccactaaagctgttgagattctgtcaacacttcctccctctcctaaccaagttattttcgtcgattgcaggtgacaatgctcgtgcaaggagtcggattctactccggtgatttgttcgtatttctcggcttaacgcagatcctaactttcgccgatatgctgcaggtgaaggtgaaagagctaaacgatgccctggaacaaaaagcggaatacagagctctagtccgagttggagcttctattgatggagcggaaaatcgtcaacgccttctcttggatgttataagatggcatcaattattcacggagtaagaaacacttaatttctccttttaaaaaataaataaaatcaaaaaggaacggcttatcatatgtcatttctcccatacatttagctactgtcgcgccataaatgccctctactacgaattgatcgccactcaggttctttcgatggctttggccatgatgctcagcttctgcattaatttgagcagctttcacatgccttcggctatctttttcgtggtttctgcctacagcatgtccatctattgcattctgggcaccattcttgagtttgcagtgagctttagtaaaattaagtctatgagcacttagttcttacgcattcttatttgtcttcaacagtatgaccaggtgtacgagagcatctgtaatgtgacctggtatgagttgagtggcgaacagcgaaagctttttggttttttgttgcgggaatcccagtatccgcacaatattcagatacttggagttatgtcgctttccgtgagaacggctctgcaggtgagtaagtgggcttttagtttataataccacattggattttcgtatacttttagattgttaaactaatttatagcgtatccatgatgatgatgaatcgggcgtagaagacagagaacactaaaaaaaaaaaaatctgacacgcattacacaatatcttgatacacaataattctaaagagatatgcgagtttttagattcgttgaacagtatgcatgcagtatagaaagtattttttctcaatcaggaccattagctagtgggaattacaaaagctagtttatgcactcagacgcacccacgtagttcaaatttgattcagaaattgccacgcccaccaatcgcctatactattactattaaaacttttggttaatccaaatgttagcccggaatcagcttacaaattttattcagccaactttgaaatgctcttctcccactttgctcctgatgaactcgtcgtcgggattttttctgctgccattaaccttggccactaattaccaacacacagagctgaatttatggcatcggtttatggagccccgactcgaaaacattaattgtgcgtctcattaaggggagtttcttatgcacaaaacatttaatacatttcgcatacacgcataaaaatttaatttattttgaaatggtgcgttcacttccccgatatttggccggcggacattaatagctcctgaccaggccatgaataatgggcattttataaatgtggtcgggacaatggcccggatgcttggataaaaaataataacaataattgtaacgtcgttataatgcagtcgtaattaagtacaccgttgttgtacggaccttccgccacccagcgactataaaaacgaaatgattttaataaaatcaacagtcgaaaggacagaaaggaccagagcaacagtttggtcagcggactcatcgacctcttggattcagatttacgaccgcttcgcattccataatttactcatttttcatgcgctatttaattacgctaaattatggccgcaaagggttgagcggttgtttgtttatggccagtataacactcaaaagtagaggtgatgctgtacatcatttggatacaa

SEQ ID NO: 39158 - DNA, 762 bp, DROSOPHILA
atggaactcctgccattggccatgctaatgtacgatggaacccgggttactgcgatgcagtatttaattccgggtctaccgcttgagaacaattattgctacgtagtcacgtacatgattcagacggtgacaatgctcgtgcaaggagtcggattctactccggtgatttgttcgtatttctcggcttaacgcagatcctaactttcgccgatatgctgcaggtgaaggtgaaagagctaaacgatgccctggaacaaaaagcggaatacagagctctagtccgagttggagcttctattgatggagcggaaaatcgtcaacgccttctcttggatgttataagatggcatcaattattcacggactactgtcgcgccataaatgccctctactacgaattgatcgccactcaggttctttcgatggctttggccatgatgctcagcttctgcattaatttgagcagctttcacatgccttcggctatctttttcgtggtttctgcctacagcatgtccatctattgcattctgggcaccattcttgagtttgcatatgaccaggtgtacgagagcatctgtaatgtgacctggtatgagttgagtggcgaacagcgaaagctttttggttttttgttgcgggaatcccagtatccgcacaatattcagatacttggagttatgtcgctttccgtgagaacggctctgcagattgttaaactaatttatagcgtatccatgatgatgatgaatcgggcgtag

SEQ ID NO: 39159 - protein, 253 aa, DROSOPHILA
MELLPLAMLMYDGTRVTAMQYLIPGLPLENNYCYVVTYMIQTVTMLVQGVGFYSGDLFVFLGLTQILTFADMLQVKVKELNDALEQKAEYRALVRVGASIDGAENRQRLLLDVIRWHQLFTDYCRAINALYYELIATQVLSMALAMMLSFCINLSSFHMPSAIFFVVSAYSMSIYCILGTILEFAYDQVYESICNVTWYELSGEQRKLFGFLLRESQYPHNIQILGVMSLSVRTALQIVKLIYSVSMMMMNRA

SEQ ID NO: 39160 - DNA, 3768 bp, DROSOPHILA
gcacagcttccgtacataagagataattgacatctggatgtgaaagtgatacaagccttttaaaaatggtctaggaaggagtttgctggcgaattgcttaaagctcattttgcgttggaaccaacaaatcaatgtaacttgtactttccaggcactagctgacctttctggtgatgcccagactctggaaaagtgcctgcggcaacttagttcgccggagagcattgctggcgatcttcgaaagctggaacggtattcatcttggacgcgggaggaggtaccttgcctgatgcgctgcttggccagagaaaagggctggttcgacgtggaggaaaacaagtggaggctcaagcaactgactgaggacctgggcgccgatgtctataactactgcagattcgagctgcgccggatggggtccgatggctgcagcttcgcctatcggggactcaggtgcctgaagcaggccgagatgcatgcgggcaccagcctgagcacactgctacagtgttcccgccagctgaacgccaccaacgtggagctgctgcagtacagtaagctgaagtcaaaggaacctattccctgcctctttcagtgctttgcggatgccatgggattctacgatcccgatggaaactggcggctggaaaactggaagcaggcgtttgggccttccggaaatgaggatcagtcttctggcgctgactacagtggctgtcgactaagtgggactcagcgggaggtggcgctaagcaagtgctcgtggatgtaccatgagtacaaatgctgggagcgagtaaatgggaataagctagtggaggacaacgaagagcagtagtattaaattaatgggacacttgtcaatgtcaaaaattaataagcacattgtaagatctatatatttcaaaattcggaaatattatctagacaaatgaaagcatacttttatcattaaattagtatgtaatcatttataaattttgcttacaataatagctgcctaaacagccatcgcgtagcaggtgaactgtttgtaatatgtggcacatcggtccctgccgcggtgccgatggcaggtccttatgcgagctcctttggccggaatgcccaggttttgcttcatcgcctccagtttccaaagacgcgttttctcctcgaagatatgcagcttgtccacgaagcaccgggtgaagcacggaatcggttcattgacaggatagtaggcgaaggcatcgaagctcttccactcgtcctggtggacatcctgaaggcagtccttcattgcatccttggccgacggggatatgtttggcatgttgtcaataaccgtgaacgggtggctttccatctgtaatatattaagtaatgtagtgtaaatacgcataaatagtaatatttaaaagcataaacaatttttaattgacggtcgatttccctactcagctagtaagaatcgtttcgaaatttaacatcaaaatagtaaaatcaacataaaaatctaatcatttttcaaaaatgtgaaagtggcagaattggtcgtattggtagtagaatagaacctgagtaataaatcggtaccttctagctttaatggttagcgatgtcttaacatttgtatggacggtcggaaggacaaacagagagaatgtccttttactctacaagtaactggtataaatagcctgattacattatgacaaataatgattcatgaatataggagatatgttatacaacagatctattatagtaagtacatagcattttttcaagagaactgtgtatatacggatggtcagaattctttctgcacgcgtttaattgaattggtccagttttaagcaaatgttccaaagggagcttttatatgtaataaagcacccggtaacgatggttaaaaaaaaactttggttaaactccttaatactcctttggtatctggtaccatcacctatgaagatcagtgaaattcaaatgcctactcacgttggtgatgcagtggaagccctcgtaggcatgtttgcagctgctctcgcctgattcgaatggcagttccaatttctttcggcaggcttcgtagacgggtcttccaaagacgcccacaattccgtccttattgaagcccgttaagttattgtaaaagtcgaacatctcggacaaatagcagcgcgtgaagcaggggatttcctcgtagctatccgaccattccttgaatcgttctagacgttcggcattttccgcagtaagtccgccatagttttggatgcatctgttgatggtctcgccttcgtgctccagaagggccaggccttcgttctaaccagtattttgtattaaaatactgttaaaaagtttccaatcaaaagtcttcttactcaccaacgaaaggcatagacataatgctattaatattccacttttcatctgcattgctaaacaattctcaatattctagtagtttcctgcacgttctttgcttgattaaatactgaagcttcagcaaaaaaatcatctaccacctcgctgctgttaggcattgcacacttaaagaaaatatggcaaccaatgggattgaaaaaataatgagggctccaatatatggagatctaaaagaaaatacaatcctaattagctatccataaaaaacattttcacatatattatttatgttcatttgatgccctatggcggatatacagtactatagtttaactgatttttctttgttctacttagctgactaatcagtaactcactttccggctcatttatttttaaagaaaggcaaatctagctttcagtaattactattgtttgcggataagggttataatatacattttatgaattatttgctgggaagctcagtaagtaataagcacatacgttgcacaaaggctttaaagatttatttccagtggtctcctctgtccctactaatagataaccccattttcgactccctcaagttcaagccaaagcttcccaaaactttgatgataagaacgcactgatcaaggtgcctcggtcgagttttcaaaacccgattgcgcaaagaacctccgcgaagattacgcaactgtcacagatcgatggcgatgggccgccagctgctctgttgcatttttattgatcaacacctgccaatggggccacagaaatagtcactgggatggtgcagctattgaatgccgttaattgattttgtgtttttgttttggcattttgcccagccacttgtcgggcttttaataatgtcgtttctggtcggccggcttgtaaaggagcgacatcgtcccactttacgcatttttgagcaaccggattcgggttttgggtaccgagttgcggtctgtaggtaagcgaaacatgtttaacaaaacacgtcgcatcatcccaactcgatgaagaggtcttcatcgacgcaattgcaagtgggcaaaatatcttcaaagtggttctgccagatcggccaaacagtcaacaaaaacaaccgccgctgcttccacgaacccgagacacggagaaaaaagggcattaagtttgaagttatatcttaactattccgatatatctccgatatttttacaatcttttcaccaggaacccatgtgagctcatatcattttccgctttgttccgattctggttcgggccaaacctattgatatggttccagtttgcgaaccggttcgggtttatgctaaaacgagattccggttcgattcattacttaaaatatttacaatacatagataattttttaaa

SEQ ID NO: 39161 - DNA, 690 bp, DROSOPHILA
atgagccggaaaaacgaaggcctggcccttctggagcacgaaggcgagaccatcaacagatgcatccaaaactatggcggacttactgcggaaaatgccgaacgtctagaacgattcaaggaatggtcggatagctacgaggaaatcccctgcttcacgcgctgctatttgtccgagatgttcgacttttacaataacttaacgggcttcaataaggacggaattgtgggcgtctttggaagacccgtctacgaagcctgccgaaagaaattggaactgccattcgaatcaggcgagagcagctgcaaacatgcctacgagggcttccactgcatcaccaacatggaaagccacccgttcacggttattgacaacatgccaaacatatccccgtcggccaaggatgcaatgaaggactgccttcaggatgtccaccaggacgagtggaagagcttcgatgccttcgcctactatcctgtcaatgaaccgattccgtgcttcacccggtgcttcgtggacaagctgcatatcttcgaggagaaaacgcgtctttggaaactggaggcgatgaagcaaaacctgggcattccggccaaaggagctcgcataaggacctgccatcggcaccgcggcagggaccgatgtgccacatattacaaacagttcacctgctacgcgatggctgtttag

SEQ ID NO: 39162 - protein, 229 aa, DROSOPHILA
MSRKNEGLALLEHEGETINRCIQNYGGLTAENAERLERFKEWSDSYEEIPCFTRCYLSEMFDFYNNLTGFNKDGIVGVFGRPVYEACRKKLELPFESGESSCKHAYEGFHCITNMESHPFTVIDNMPNISPSAKDAMKDCLQDVHQDEWKSFDAFAYYPVNEPIPCFTRCFVDKLHIFEEKTRLWKLEAMKQNLGIPAKGARIRTCHRHRGRDRCATYYKQFTCYAMAV

SEQ ID NO: 39163 - DNA, 4468 bp, DROSOPHILA
tttttttcactacggacctcctgcgtgtggcaggtgggaaaataaatgtgtgaaaaaaatttgtccgggatgcggaattgtgcaggaagctgacaccgaggtgttagaatttggtgcaacgaaaaaggcaagtaaggcgaacaacaaatggcaaacggagcacaacacatttttcagagccacacaaatgtgccgcacaggccaagtgaatttgtggaacgaaaacaaatcgtttaattggcttaaggaaaacgtaaccattatacgctcgctccgttgcgattatataaccgtccatatcccagctcggcccaacaacgaagctgctgacagcggcgttgactgcgacttgacttcgattcgagttgggattcggaatcaggtaaaccagtttgctttgctcgtttccctctgcccgctctgcgactgccccacttagcccagctccggcgatctgtttgcttcgtttttgagagcaactgacgcaagggtgcctcaccaccaatcacaccacacaccatacaccatacaccacaagagccaacaccgtcgcaccaccgaccactgcgcaccacttagcaacgggtttggtgtgctagcacagtgaactttggctaaaaagactggtcgacattaccccaagctgaaatagcattcactaccaatactaaatcataacctgtaaattatttgtaactatttttttttatttaccccatttagactgcctgcaataataataactaagtgttcccttttacagattaacatggtaagattatcctagattaagattattaccaacatcttatttaaaagcaactttagcgagacagttaacatagttatactgtggccaactccagtccacaatctggtccaacccgagaaattcgtgtgggccgtcgagcgagagcatataagataatggaaaatcttggcgcgacttagtcgctaacccgtcggcacattcgcacttgagccctcgtccgagccagaaatgcagtcccaatccctcctgctgatcgttgcagccgttgccacgtttctggtggcccaggtcagagcccagtggttgcccttgctgatggaggtaactccttaacctcgccttattttgcagactacggccaagttcctgctgaaggaccacgccgacgcagagaaggcgttcgaggagtgccgtgaggactactacgtgccggacgacatctacgagaagtacctgaactacgagtttcccgcccaccggcgcaccagctgcttcgtcaagtgcttcctggagaagcttgagctgttctcggagaagaagggatttgacgagcgcgccatgatcgcccagttcacctccaagagcagcaaagacctgtccacggtccagcacggcctggagaagtgcatcgaccacaacgaggccgagtcggatgtctgcacctgggccaaccgagtcttctcctgctggctgcccatcaaccgccacgtggtgcgtaaggtcttcgcctgacctgaatgtgatataatacactgtacgccttacaggataatgtagaaataaacatttttagttttcagatatattttcttttgtattacttattgaatttaaagtttaccctacaaagaaatgttttccccttttcattatgtcatttgatgtaagtactaaatacaatttcaggattttgggattttttttctacattttaattaaaatgtaatttaataatgcttactgggaactaggaaactcttgttcaattaacataggtgcaaaaatgttccaagtgtgacgataatcaattgctccgtatgacggtctattatatttaatcgcttcgcaagggaggagtctgtttcgctccaccctccatccatactcaacaaatcttaaataagcattttgagtaattgcacagcaaataacctccaaactttaattgcgttgcttaatatatttttgccccaccttttcagctttctaaaatctaagtacgtacacatactcgtatcatgtagcctgagtataactgacctagaccaaggcgatcgggccacgtgctactctgtcctgtgcatccacatccactctccggcggatgaagaggcattcgttgacccgccgacttaatcacgacttgttgataacctccactccaatgcatcgtcggcgctgatcattgactccgcccgggcggatgttttcgaagctagttcagtttgtgcattgcccgcagagagatgagttcccctcgtgcggttctagtcagcctgttcctgatctgcagtcaggtgagcccccacaggattcaaaaaacaaaggggtgctctttgcgcggttaccaaattcttccaaaattctatttttgctgctgggataattaagacaagcacaatcgaccaaacaataagtgctacaagcatacaggaaagtgaaattatttcattcactttatgaagacctcatgtttttttttcacctgcaaatctattccaaaacaatcagttcaaacagttcaatatatatagagtaaataataacaagatcggcattatttaatcaaagactcttatcaatacatgactttgttagtacgccactgaaatttttattaagagattgtgccaattgagcacagcttccgtacataagagataattgacatctggatgtgaaagtgatacaagccttttaaaaatggtctaggaaggagtttgctggcgaattgcttaaagctcattttgcgttggaaccaacaaatcaatgtaacttgtactttccaggcactagctgacctttctggtgatgcccagactctggaaaagtgcctgcggcaacttagttcgccggagagcattgctggcgatcttcgaaagctggaacggtattcatcttggacgcgggaggaggtaccttgcctgatgcgctgcttggccagagaaaagggctggttcgacgtggaggaaaacaagtggaggctcaagcaactgactgaggacctgggcgccgatgtctataactactgcagattcgagctgcgccggatggggtccgatggctgcagcttcgcctatcggggactcaggtgcctgaagcaggccgagatgcatgcgggcaccagcctgagcacactgctacagtgttcccgccagctgaacgccaccaacgtggagctgctgcagtacagtaagctgaagtcaaaggaacctattccctgcctctttcagtgctttgcggatgccatgggattctacgatcccgatggaaactggcggctggaaaactggaagcaggcgtttgggccttccggaaatgaggatcagtcttctggcgctgactacagtggctgtcgactaagtgggactcagcgggaggtggcgctaagcaagtgctcgtggatgtaccatgagtacaaatgctgggagcgagtaaatgggaataagctagtggaggacaacgaagagcagtagtattaaattaatgggacacttgtcaatgtcaaaaattaataagcacattgtaagatctatatatttcaaaattcggaaatattatctagacaaatgaaagcatacttttatcattaaattagtatgtaatcatttataaattttgcttacaataatagctgcctaaacagccatcgcgtagcaggtgaactgtttgtaatatgtggcacatcggtccctgccgcggtgccgatggcaggtccttatgcgagctcctttggccggaatgcccaggttttgcttcatcgcctccagtttccaaagacgcgttttctcctcgaagatatgcagcttgtccacgaagcaccgggtgaagcacggaatcggttcattgacaggatagtaggcgaaggcatcgaagctcttccactcgtcctggtggacatcctgaaggcagtccttcattgcatccttggccgacggggatatgtttggcatgttgtcaataaccgtgaacgggtggctttccatctgtaatatattaagtaatgtagtgtaaatacgcataaatagtaatatttaaaagcataaacaatttttaattgacggtcgatttccctactcagctagtaagaatcgtttcgaaatttaacatcaaaatagtaaaatcaacataaaaatctaatcatttttcaaaaatgtgaaagtggcagaattggtcgtattggtagtagaatagaacctgagtaataaatcggtaccttctagctttaatggttagcgatgtcttaacatttgtatggacggtcggaaggacaaacagagagaatgtccttttactctacaagtaactggtataaatagcctgattacattatgacaaataatgattcatgaatataggagatatgttatacaacagatctattatagtaagtacatagcattttttcaagagaactgtgtatatacggatggtcagaattctttctgcacgcgtttaattgaattggtccagttt

SEQ ID NO: 39164 - DNA, 1107 bp, DROSOPHILA
atgcagtcccaatccctcctgctgatcgttgcagccgttgccacgtttctggtggcccagactacggccaagttcctgctgaaggaccacgccgacgcagagaaggcgttcgaggagtgccgtgaggactactacgtgccggacgacatctacgagaagtacctgaactacgagtttcccgcccaccggcgcaccagctgcttcgtcaagtgcttcctggagaagcttgagctgttctcggagaagaagggatttgacgagcgcgccatgatcgcccagttcacctccaagagcagcaaagacctgtccacggtccagcacggcctggagaagtgcatcgaccacaacgaggccgagtcggatgtctgcacctgggccaaccgagtcttctcctgctggctgcccatcaaccgccacgtggcactagctgacctttctggtgatgcccagactctggaaaagtgcctgcggcaacttagttcgccggagagcattgctggcgatcttcgaaagctggaacggtattcatcttggacgcgggaggaggtaccttgcctgatgcgctgcttggccagagaaaagggctggttcgacgtggaggaaaacaagtggaggctcaagcaactgactgaggacctgggcgccgatgtctataactactgcagattcgagctgcgccggatggggtccgatggctgcagcttcgcctatcggggactcaggtgcctgaagcaggccgagatgcatgcgggcaccagcctgagcacactgctacagtgttcccgccagctgaacgccaccaacgtggagctgctgcagtacagtaagctgaagtcaaaggaacctattccctgcctctttcagtgctttgcggatgccatgggattctacgatcccgatggaaactggcggctggaaaactggaagcaggcgtttgggccttccggaaatgaggatcagtcttctggcgctgactacagtggctgtcgactaagtgggactcagcgggaggtggcgctaagcaagtgctcgtggatgtaccatgagtacaaatgctgggagcgagtaaatgggaataagctagtggaggacaacgaagagcagtag

SEQ ID NO: 39165 - protein, 368 aa, DROSOPHILA
MQSQSLLLIVAAVATFLVAQTTAKFLLKDHADAEKAFEECREDYYVPDDIYEKYLNYEFPAHRRTSCFVKCFLEKLELFSEKKGFDERAMIAQFTSKSSKDLSTVQHGLEKCIDHNEAESDVCTWANRVFSCWLPINRHVALADLSGDAQTLEKCLRQLSSPESIAGDLRKLERYSSWTREEVPCLMRCLAREKGWFDVEENKWRLKQLTEDLGADVYNYCRFELRRMGSDGCSFAYRGLRCLKQAEMHAGTSLSTLLQCSRQLNATNVELLQYSKLKSKEPIPCLFQCFADAMGFYDPDGNWRLENWKQAFGPSGNEDQSSGADYSGCRLSGTQREVALSKCSWMYHEYKCWERVNGNKLVEDNEEQ

SEQ ID NO: 39166 - DNA, 3023 bp, DROSOPHILA
aatcgattcaaatctgtaatacgtgcatgcattttgctaatgaaattattatcatattatggataagaaattgtattttattaaattaccataaatcttaataattaaatgcagaacgatatttaagtagcttaataacagctctacaaaatctgtgctcacctaaacattcttgagctaacttatatatactttaaatgctcgaattttccaagtattttccaagttaatactaatttttcaaaagaaaacatttggtatttataggctctcgactactgctgccgaatcaattagcgaccaaccgctaaccgaaaaagtgggtcaactaggtcaagttccagcgattccattccctaattgaaatattatttaataggcgctgctggagtgtccgctaactcgcgttcttacggttctgcgatctcggaactccaatctggccaagcgatcgggcttactaaatttcccagttggattggatcgcgtcacagtcacgcgcaggcgtcatgccaactttggcagctgctgcccccggctctgtaggccaattgctaattcgcgaggcggccagaaacttcttctccggctaatgacaaacaatttgagcccggcaacgggctttaaattaccaaatctaataacgcgcggcggaggtgcaatctggccgaaagaaagccaccgcggagttgctgaatctccagctgagagctgaataaagtggcccggagagcgaataagagaaagagagagagagagagagagagagctgagtggagtggatccattgcagctctggcttgccatcttggccagaaaaagtcggtccagtctagcgacgatatctgaagcataaagacatgcgacgtctcgggtgcaacgtccgtcagagtcattgaacgcttgcattttcctgggccaatccgataaaagccaatactgtacagtgccagccgaaagacggcttactccgcagactctagatagccagataagtgatatggtgctggccacgccccctgtgagcaagggcggtaacgcgggcggcctcttcatggaccagtatcagcagtacgcggcccactgtgaaaccgccgacagtggcaatggcagtgacctggagagcaccggattgcccaccaaaccggatgacagcgaggagagtggcccctcctcgctgggcagcgactccatgcacgggagcagcacggagtacgtgcgacagtccgcctcccagcccagtggccagcggcagcgacagaagtccttgcgggtcctgggtgccctgctccccgacagcctgctccgcgacatacgggaccggaggagcaccgagtatgtggtacagttctcgcagccagaggatgaggagaagatccaggtccccgacaagattccggagaaacccagtccgttccgcctggcccgcgaatcgctgagcgaggacaaaatagaggagctgcgggccgcagtggagcgggccaacttcgttcaaaccggtgaggagacgctggacagcatcgatgccacatcgcagtctcttccagccagcagcaacatcggcggacaccgcggcaatatcaattacaagtatgctgacgaccaatactacagctttcacatcaacgagcacgagaacttcggtgcgagaagcgcgagaagtggcgacgaggcggaccactccacgggagcgggatcggaggctggctccgacagcgggatcctaacggagcagcaagacctcttcgccggctatcgggacgtgcgatgtggggccagttccacccagtccactatccgatcggccaagggaacggtgcggggcgtcaagaaccgtgtgcgcaatggaatagccacgttcttgcagctccagcagcagcccaatgccaaggtgagtttcgtgatcatgtcgggtagggatggtatggggacgtatgattggataacgggatgggatgcgtacggtattaaaatgcttctcaggtcagagtcgactgattgcctatcagttgcatacccctaaataccggtttactaatcactgtcttaatcttacattcaagaaagaaatctcactttaatctgatatcggattaataacattttctttccaatttaaaatgcatacataacacagtcgttaacaccgtaacaacacaatcgttgaaaagtgattaacagatgtacaagcgtagatcagtctgttttccattataatgccgaaatatcggaaatttacgcccaccagcagctgactaatgggtatctagtatatgtaatgggtataatagttgaggaagtcaatagtaacgatatgtctttttttaattagttttgttttacattttttttgttctgggttaaattaattaataatacttgatttaacattttagcacacactaaaccatatacttagaaacattataattatataagttatttattttaaggaagtattttgagctaaactttattgttgaaaaaaaattgtttgatcttcggatctaacaagatcagcacaatatatatttacaccgctcacattacttaatgcaacgatttctgcagactttactaaaattttgacctccgctgtggttataagtaccgatatgaatattcagatatcgatggttattcggttcccacgctgctgggcgtcggcagaggcctccagtggcgttgagtcacctgctcgcccaaattatgcaattggcctgcatctcgacatttcggcatttcagttggctgaaatggagaaagtggtggccaacaattgcggcggccgatatgtggctgtggcttttcaatatacgagtatctttcacatttcgtgtttcgtgtttcgtatttgcccgtaatctaatgaacagctcgtggttccccatcgtccccttggaagccccgagatctgggaaaccagctgcgctttcagcgtcttcgtcggtttcttcttcaattataatggaaaccgttaagtggcttattttgtctccgccgatgtcgttttgtatgcgctt

SEQ ID NO: 39167 - DNA, 1023 bp, DROSOPHILA
atggtgctggccacgccccctgtgagcaagggcggtaacgcgggcggcctcttcatggaccagtatcagcagtacgcggcccactgtgaaaccgccgacagtggcaatggcagtgacctggagagcaccggattgcccaccaaaccggatgacagcgaggagagtggcccctcctcgctgggcagcgactccatgcacgggagcagcacggagtacgtgcgacagtccgcctcccagcccagtggccagcggcagcgacagaagtccttgcgggtcctgggtgccctgctccccgacagcctgctccgcgacatacgggaccggaggagcaccgagtatgtggtacagttctcgcagccagaggatgaggagaagatccaggtccccgacaagattccggagaaacccagtccgttccgcctggcccgcgaatcgctgagcgaggacaaaatagaggagctgcgggccgcagtggagcgggccaacttcgttcaaaccggtgaggagacgctggacagcatcgatgccacatcgcagtctcttccagccagcagcaacatcggcggacaccgcggcaatatcaattacaagtatgctgacgaccaatactacagctttcacatcaacgagcacgagaacttcggtgcgagaagcgcgagaagtggcgacgaggcggaccactccacgggagcgggatcggaggctggctccgacagcgggatcctaacggagcagcaagacctcttcgccggctatcgggacgtgcgatgtggggccagttccacccagtccactatccgatcggccaagggaacggtgcggggcgtcaagaaccgtgtgcgcaatggaatagccacgttcttgcagctccagcagcagcccaatgccaaggtgagtttcgtgatcatgtcgggtagggatggtatggggacgtatgattggataacgggatgggatgcgtacggtattaaaatgcttctcaggtcagagtcgactgattgcctatcagttgcatacccctaa

SEQ ID NO: 39168 - protein, 340 aa, DROSOPHILA
MVLATPPVSKGGNAGGLFMDQYQQYAAHCETADSGNGSDLESTGLPTKPDDSEESGPSSLGSDSMHGSSTEYVRQSASQPSGQRQRQKSLRVLGALLPDSLLRDIRDRRSTEYVVQFSQPEDEEKIQVPDKIPEKPSPFRLARESLSEDKIEELRAAVERANFVQTGEETLDSIDATSQSLPASSNIGGHRGNINYKYADDQYYSFHINEHENFGARSARSGDEADHSTGAGSEAGSDSGILTEQQDLFAGYRDVRCGASSTQSTIRSAKGTVRGVKNRVRNGIATFLQLQQQPNAKVSFVIMSGRDGMGTYDWITGWDAYGIKMLLRSESTDCLSVAYP

SEQ ID NO: 39169 - DNA, 3189 bp, DROSOPHILA
caaagaaggtcttctgcgggctggcctgacaaaagatgtgatccaccgatgggcaatattctgccggttgaatattttcctcttccggaaaacaaaagtttttttttttttttttttttttataaatgccgacccgcgaattttttattaactcacgggagtttcttcggcactaatttaaccaacgaatttttttttgcaaaattttattttgcttcgcgacttagaattttgtctgtcgtacgcgttattcgctggtccctgttcgggcgccagtaaataattacagtttattgatttttattttgtagatcgcaagcgaccgtttattgtaattgttcatttgaaactaaagctaagatacaaaatatttccctaagtccctagcaatcaagtgtgggcgtcggcagcgtcgcagcaggcgtcggcagcgaatcagtggtcgtcagcggctacgcggcggagaagtgcagatgatcgcacttttagctggtcgttgacagcggaaagaatgcagacctttggtcagcattttgggcacttgtgtttacccagaaatgatgttgaaatataagatgtgggacgataacttatagggcaataacttatacatgtaaaatttgccttgtgaaatatttacattctgactgcgcgttttgctgacgttgcactaattttttttttgtaaatcgcccgtattaatgaaatcgaaatttcgcatggcattatattagcaattttgtaatgaaaatgtgaacataataaatacgatttaatgtgtaatcagtttccggtctttccactcggaacctctgttaatattgttttgagccatcgttttattaaaactacatcgtgtaggtttgcacattaaaaaaaataaatacctttattaggatacaaataaattacctaagctaatggcgcgatggcgccgacgagtaacaatttactaggtttcggtatagttggcacaagtccgtttggttcctcggatcctctactgtatccgcttgctgatcgtgtcaagatagttgtgcgcgttgtaggccttactcgtggcccagtccttgctgtagctattgccgcccaactcgtgaggagcccccgatccggagctgtacggggagtacgagttggagtagctaccgctgcccacgaactgggagtagtccgagggatctgactcgtagacgtgcgagtgcgtctgcaccagatgcgggtggatcttgcacatggtcttgtacttaaggtagtggatcagccagcccacgccgccgaccagcagcacgttcatgccgagcacgcccatcagcatgctcaccaaagtcatcttcaggtgggcaatcttcatcagaatgacgaggggcaggataatgagccacttcttcttcttgcgcttcaatcgtgcttctaaggagggtgtatgtgcattatatttcaatttttaatggtagctttcttaaacacctacccgattcctccatgactctcgctccaccctcgctgttcagcctcagttggagtccgtggtttcgcccaaacgtctccattgcccttttcaggaacttgagaatcatcgtcagttcactgtcaccttcaaaacaaacaaagtcaattagagccacgagaaatgcaagaccagaggctataattcttcaaattaatttacaaccggatggatcgtaaacatccgcagcgtgtcatccatttgctgtggatactgaccaggcgcagttgatcaattaattcaagctagagattttctcgaaaacaactttcgattgcgcagacccaccttctaagctcttagcgtcgttgaacacgaccacctcatcggcgggctcgcccaactggactaatctcagccagcggcctctgtccccggccagatcgcgcccgtactcgctggggaagaagcccatgctgttagtggccagtttccagatcaatttgctggtcttgtacttgatgcaggacaccagactgcgggtctcaaagcactgcttctggttgcgcgagatgaagggatcggcttggacgagctgcgatcctgccgatttggccatgttctcagtcagtgagaccagcactgctccacgctgtgtggtttcaccttcatccttcgcctggcagtagtggagtagcaccagcagcagcagtgccagcacaacgcgacacagcagcatgtttgtggtcgaaacttggattgctgatcgatataacgcgggatgattgcaagatcactgggacactaccgcacggctgaatggacgactcgcaaatggcaaccgagaggtgcttggtgctccttttatcgcgcagccgcaaccactacccaactctactggttttcgcagccagtgctcatgtagatggagcatggagcatggaacatggagtgtggagcatggagtatgagcttggggcatgcaccggaatcgcaattcctgccgccaatgccaatgccaatgccactgccaccaccactgaaagtttctgggttagcgatctgcgatcggtgatcagcgttcgatcgacaacaaattgaatcgcattgtcgcgggattatgaagccaggcaaccgccaattgaccgccttcccgctgcgtgtgagtgttcgtcccaatgaaagccggccatcgaaagtgaatagcgatccgtactccgatacaattacgatggcctggcgccactggctgtggcagttgcagttgccgttcgagccaacgatgccaatcagaataagtgcaaatgtgcatttatgcgggtttaagctggccatgcaccgggtggctattgcatcgtgcaatttgcatacttcaatctactccagtgctcgcagcctgggaataaatgactatttcaggctggagatggggatggagctgtgaccgtcttaattacaaagccgcagacacgggatgcgaaagttgttgttgttgtcggagatcgagatgcattgcccctgttgcattattgactagtgaaagtaacaattggcgcagcttgccaactctttttgcgtcgaattctcgagtggcgctgactgacaccactcgcagtgagattgattggatgatggctaaatgctcatcggtggccaccgtctgtggtcgcatttaatgagaatgaggtaatcgtttgagtggcccactggctggaatcaatcggatagaatacatcggc

SEQ ID NO: 39170 - DNA, 927 bp, DROSOPHILA
atgctgctgtgtcgcgttgtgctggcactgctgctgctggtgctactccactactgccaggcgaaggatgaaggtgaaaccacacagcgtggagcagtgctggtctcactgactgagaacatggccaaatcggcaggatcgcagctcgtccaagccgatcccttcatctcgcgcaaccagaagcagtgctttgagacccgcagtctggtgtcctgcatcaagtacaagaccagcaaattgatctggaaactggccactaacagcatgggcttcttccccagcgagtacgggcgcgatctggccggggacagaggccgctggctgagattagtccagttgggcgagcccgccgatgaggtggtcgtgttcaacgacgctaagagcttagaaggtgacagtgaactgacgatgattctcaagttcctgaaaagggcaatggagacgtttgggcgaaaccacggactccaactgaggctgaacagcgagggtggagcgagagtcatggaggaatcggaagcacgattgaagcgcaagaagaagaagtggctcattatcctgcccctcgtcattctgatgaagattgcccacctgaagatgactttggtgagcatgctgatgggcgtgctcggcatgaacgtgctgctggtcggcggcgtgggctggctgatccactaccttaagtacaagaccatgtgcaagatccacccgcatctggtgcagacgcactcgcacgtctacgagtcagatccctcggactactcccagttcgtgggcagcggtagctactccaactcgtactccccgtacagctccggatcgggggctcctcacgagttgggcggcaatagctacagcaaggactgggccacgagtaaggcctacaacgcgcacaactatcttgacacgatcagcaagcggatacagtag

SEQ ID NO: 39171 - protein, 308 aa, DROSOPHILA
MLLCRVVLALLLLVLLHYCQAKDEGETTQRGAVLVSLTENMAKSAGSQLVQADPFISRNQKQCFETRSLVSCIKYKTSKLIWKLATNSMGFFPSEYGRDLAGDRGRWLRLVQLGEPADEVVVFNDAKSLEGDSELTMILKFLKRAMETFGRNHGLQLRLNSEGGARVMEESEARLKRKKKKWLIILPLVILMKIAHLKMTLVSMLMGVLGMNVLLVGGVGWLIHYLKYKTMCKIHPHLVQTHSHVYESDPSDYSQFVGSGSYSNSYSPYSSGSGAPHELGGNSYSKDWATSKAYNAHNYLDTISKRIQ

SEQ ID NO: 39172 - DNA, 2282 bp, DROSOPHILA
ccacgccgccgaccagcagcacgttcatgccgagcacgcccatcagcatgctcaccaaagtcatcttcaggtgggcaatcttcatcagaatgacgaggggcaggataatgagccacttcttcttcttgcgcttcaatcgtgcttctaaggagggtgtatgtgcattatatttcaatttttaatggtagctttcttaaacacctacccgattcctccatgactctcgctccaccctcgctgttcagcctcagttggagtccgtggtttcgcccaaacgtctccattgcccttttcaggaacttgagaatcatcgtcagttcactgtcaccttcaaaacaaacaaagtcaattagagccacgagaaatgcaagaccagaggctataattcttcaaattaatttacaaccggatggatcgtaaacatccgcagcgtgtcatccatttgctgtggatactgaccaggcgcagttgatcaattaattcaagctagagattttctcgaaaacaactttcgattgcgcagacccaccttctaagctcttagcgtcgttgaacacgaccacctcatcggcgggctcgcccaactggactaatctcagccagcggcctctgtccccggccagatcgcgcccgtactcgctggggaagaagcccatgctgttagtggccagtttccagatcaatttgctggtcttgtacttgatgcaggacaccagactgcgggtctcaaagcactgcttctggttgcgcgagatgaagggatcggcttggacgagctgcgatcctgccgatttggccatgttctcagtcagtgagaccagcactgctccacgctgtgtggtttcaccttcatccttcgcctggcagtagtggagtagcaccagcagcagcagtgccagcacaacgcgacacagcagcatgtttgtggtcgaaacttggattgctgatcgatataacgcgggatgattgcaagatcactgggacactaccgcacggctgaatggacgactcgcaaatggcaaccgagaggtgcttggtgctccttttatcgcgcagccgcaaccactacccaactctactggttttcgcagccagtgctcatgtagatggagcatggagcatggaacatggagtgtggagcatggagtatgagcttggggcatgcaccggaatcgcaattcctgccgccaatgccaatgccaatgccactgccaccaccactgaaagtttctgggttagcgatctgcgatcggtgatcagcgttcgatcgacaacaaattgaatcgcattgtcgcgggattatgaagccaggcaaccgccaattgaccgccttcccgctgcgtgtgagtgttcgtcccaatgaaagccggccatcgaaagtgaatagcgatccgtactccgatacaattacgatggcctggcgccactggctgtggcagttgcagttgccgttcgagccaacgatgccaatcagaataagtgcaaatgtgcatttatgcgggtttaagctggccatgcaccgggtggctattgcatcgtgcaatttgcatacttcaatctactccagtgctcgcagcctgggaataaatgactatttcaggctggagatggggatggagctgtgaccgtcttaattacaaagccgcagacacgggatgcgaaagttgttgttgttgtcggagatcgagatgcattgcccctgttgcattattgactagtgaaagtaacaattggcgcagcttgccaactctttttgcgtcgaattctcgagtggcgctgactgacaccactcgcagtgagattgattggatgatggctaaatgctcatcggtggccaccgtctgtggtcgcatttaatgagaatgaggtaatcgtttgagtggcccactggctggaatcaatcggatagaatacatcggcccacacagctgcgaagaaagttttctgtttcagccgaacgccaatttattgtaaacatcgtatttgagccaggatcgaaaatatttggacggcaagcggctaacaataattaccaaaagcccaccccactgcccgccccattttatgcctacatattaaatcacgaggagcacgcaaacgtgcgggtattccgaggattttggatttgcaccacaatccacggcccgaaacgacttttacgagaaattaacaaaggcggtgagaggccgaaaccgagaccaaattgcccaggcaattaagcaaatccgatgtgcgaagatttttggaccatttgtctacccgatgaggcggccggatgggct

SEQ ID NO: 39173 - DNA, 282 bp, DROSOPHILA
atggacgactcgcaaatggcaaccgagaggtgcttggtgctccttttatcgcgcagccgcaaccactacccaactctactggttttcgcagccagtgctcatgtagatggagcatggagcatggaacatggagtgtggagcatggagtatgagcttggggcatgcaccggaatcgcaattcctgccgccaatgccaatgccaatgccactgccaccaccactgaaagtttctgggttagcgatctgcgatcggtgatcagcgttcgatcgacaacaaattga

SEQ ID NO: 39174 - protein, 93 aa, DROSOPHILA
MDDSQMATERCLVLLLSRSRNHYPTLLVFAASAHVDGAWSMEHGVWSMEYELGACTGIAIPAANANANATATTTESFWVSDLRSVISVRSTTN

SEQ ID NO: 39175 - DNA, 2195 bp, DROSOPHILA
attatttaatatatgttatttcaatgggcctccaaaaatcccttggcatcaagaattggtaatattgtgtcaattcttctctgaatttccccgttttcatacatcgcgtcctgagacttgatggcttctgcggtttcccgatagaaatttatgaagtcgcagtcctcgctgccttgatataccattatgggttgaaatacgttagcaatgattaagccattacaagaaaatttggcagctgatacttaactaggctggggatggatcccttataggaaagtgcctccaaggtgattttcaaggcatagtaatggtattgtacaagctccaattccaccgccttcacgtcgaacttcaacgaagtactgaagaagtaatgcaaatccactgccggagatgtccaagtattgaactggaagtcaacggggaggactgtggttgaattttcctcatcatcgtacaggtacatcatgttggtggtccagcaatcgccgtgaaccagagtctgcaggtccttttctccaacatcgacagatttggcggcgtattccattaaattagtgacaatattgtcgaacttgttcgcatagcgactcttcagattcggcttggtcttaacaaccaacaaacatttttgccccttgagaagaagtgcgaagagtagttccgactgaagagtttcggctcccgttgattcaggataatggctgcagagtgaaactttgccatcatatccaggacgagcttggtatgtgccatgtccagttgcttcaccctgtctgcgttcgtgtagcgcagaggagccagatcctcgaggatcatgatggtgcgttcccgaccaacgactatggcttccgccatcagcttatcgttgaaagcagcctcttggaaaatctttgacattttgggcaggaaaatgtcgtacatatccaattccctgttgtataaatatactcagcgaatattttcgcctgtggagtatctgaagaaactgcctgatttaggatgtacgactgcttttgccatctccatgctcaaagtccacatagattcgagtcatcacacccacgaagttcgctcctttccctgtagctggcttggcacagaccttctggacacgtagctgatcgtccttgtggaactcctgcagggccctttggatgtaatcctctgttagccagctgggtagtgacatgttgactagttatagggcactgcaatctcaagtgtatgagctcgcagcatctagaagcgtttttatttacaccaaacgactttcttatcagtcaagtctgttagccgccacgatagtaataatttaccatacataacctggggtaattactagattgtataccgtaaatctgattgcagttcttatcgtcgatgggttgctatccatgaatatccctgaattattacgtggattaaggtgaccaaatccgcagaagccacgtcactcctcgaactgcttaaagtgattctttcatcatctatataactccagtataactccctaacacacattatataaataaagtaatcatatcgtaggtcagaaatttgtggcatgaaattgcatttgcaacgaaagttgataaggaatctctattgaaatttctgttcatatccgaatagtattgaaaggaataacccaaatctgtgtttaatatccagcataaatagatataagctactactcgaatactttctgtgcacgtaacagttgcattaagttattgaatctcctcgtacgacgttcagttaacctcaaagcccataaattcattcgctgacagcactttccattcgtgttgtttttctccacatatctgacagttgctggagcaacactaaaattcagccttttgttggctttgcatcagggcatcgggccataaatgagagcaaacagatagatgaatgtgcgcactgatattagcacggctaaaccatttacatgtgttgcggcagatatcagccagttggcccgatggggacttaactggcattaagccaattgattacgggtcgtgcgtacttggctggccaaacaattcgtggcatggcttcttcggagtccacagcaaattgtacggcacacaaaggcaggcctgataagaagctggtaaacatcggaacataaaggtcgccgaacatagaatttctatattggcccggctggggcctagaag

SEQ ID NO: 39176 - DNA, 195 bp, DROSOPHILA
atgtcactacccagctggctaacagaggattacatccaaagggccctgcaggagttccacaaggacgatcagctacgtgtccagaaggtctgtgccaagccagctacagggaaaggagcgaacttcgtgggtgtgatgactcgaatctatgtggactttgagcatggagatggcaaaagcagtcgtacatcctaa

SEQ ID NO: 39177 - protein, 64 aa, DROSOPHILA
MSLPSWLTEDYIQRALQEFHKDDQLRVQKVCAKPATGKGANFVGVMTRIYVDFEHGDGKSSRTS

SEQ ID NO: 39178 - DNA, 2716 bp, DROSOPHILA
gtccagctactgcattgcattgatgaacttatacggcacaagatcctccagaattatggagcttctggatcttggtccatggcatattcaacttgctttccgcccagcccggcttccactagcagttccttctacggaagacagatctacttaccagatcgatctgtccattttccgcacgtatggctattcccaaagatagcctccgccataggaacgtcttcgggaagggcctgcttcaaggtctcttctgtaacgttccagcgctgatagtcaaaatttgtatcagctcacgaattaatagttttcccgatcgacggcttggtccagatttcaatagctggcctttcctgcattaataataagtcttatccaggtgatttccatacgtggtgcggttcctcgatcttttggcgacttagctcggttgctcacggttgtgagatcattaataataatactattattattattattgtgtagatgtctcaatggcttttgttgtgctatctcagatctcagagtgatttcactataatacgaggtcatcgtgaaatgtcacattctaccatgtcaagtcattcccctaggtaactgtttgaggtctgtctagtcattatcgtttctaacattttactgttttgcaaatacacaatcctcaggcttaattgtgtgtatccgtgcttaaatataatccgaatttagcaatttgcataacgtgtcctctgaaaaaggcttgtcatttttggttaaagctcaaaattattattattcatagctgataaacggattatttaatatatgttatttcaatgggcctccaaaaatcccttggcatcaagaattggtaatattgtgtcaattcttctctgaatttccccgttttcatacatcgcgtcctgagacttgatggcttctgcggtttcccgatagaaatttatgaagtcgcagtcctcgctgccttgatataccattatgggttgaaatacgttagcaatgattaagccattacaagaaaatttggcagctgatacttaactaggctggggatggatcccttataggaaagtgcctccaaggtgattttcaaggcatagtaatggtattgtacaagctccaattccaccgccttcacgtcgaacttcaacgaagtactgaagaagtaatgcaaatccactgccggagatgtccaagtattgaactggaagtcaacggggaggactgtggttgaattttcctcatcatcgtacaggtacatcatgttggtggtccagcaatcgccgtgaaccagagtctgcaggtccttttctccaacatcgacagatttggcggcgtattccattaaattagtgacaatattgtcgaacttgttcgcatagcgactcttcagattcggcttggtcttaacaaccaacaaacatttttgccccttgagaagaagtgcgaagagtagttccgactgaagagtttcggctcccgttgattcaggataatggctgcagagtgaaactttgccatcatatccaggacgagcttggtatgtgccatgtccagttgcttcaccctgtctgcgttcgtgtagcgcagaggagccagatcctcgaggatcatgatggtgcgttcccgaccaacgactatggcttccgccatcagcttatcgttgaaagcagcctcttggaaaatctttgacattttgggcaggaaaatgtcgtacatatccaattccctgttgtataaatatactcagcgaatattttcgcctgtggagtatctgaagaaactgcctgatttaggatgtacgactgcttttgccatctccatgctcaaagtccacatagattcgagtcatcacacccacgaagttcgctcctttccctgtagctggcttggcacagaccttctggacacgtagctgatcgtccttgtggaactcctgcagggccctttggatgtaatcctctgttagccagctgggtagtgacatgttgactagttatagggcactgcaatctcaagtgtatgagctcgcagcatctagaagcgtttttatttacaccaaacgactttcttatcagtcaagtctgttagccgccacgatagtaataatttaccatacataacctggggtaattactagattgtataccgtaaatctgattgcagttcttatcgtcgatgggttgctatccatgaatatccctgaattattacgtggattaaggtgaccaaatccgcagaagccacgtcactcctcgaactgcttaaagtgattctttcatcatctatataactccagtataactccctaacacacattatataaataaagtaatcatatcgtaggtcagaaatttgtggcatgaaattgcatttgcaacgaaagttgataaggaatctctattgaaatttctgttcatatccgaatagtattgaaaggaataacccaaatctgtgtttaatatccagcataaatagatataagctactactcgaatactttctgtgcacgtaacagttgcattaagttattgaatctcctcgtacgacgttcagttaacctcaaagcccataaattcattcgctgacagcactttccattcgtgttgtttttctccacatatctgacagttgctggagcaacactaaaattcagccttttgttggctttgcatcagggcatcgggccataaatgagagcaaacagatagatgaatgt

SEQ ID NO: 39179 - DNA, 582 bp, DROSOPHILA
atgtacgacattttcctgcccaaaatgtcaaagattttccaagaggctgctttcaacgataagctgatggcggaagccatagtcgttggtcgggaacgcaccatcatgatcctcgaggatctggctcctctgcgctacacgaacgcagacagggggcaaaaatgtttgttggttgttaagaccaagccgaatctgaagagtcgctatgcgaacaagttcgacaatattgtcactaatttaatggaatacgccgccaaatctgtcgatgttggagaaaaggacctgcagactctggttcacggcgattgctggaccaccaacatgatgtacctgtacgatgatgaggaaaattcaaccacagtcctccccgttgacttccagttcaatacttggacatctccggcagtggatttgcattacttcttcagtacttcgttgaagttcgacgtgaaggcggtggaattggagcttgtacaataccattactatgccttgaaaatcaccttggaggcactttcctataagggatccatccccagcctagttaagtatcagctgccaaattttcttgtaatggcttaa

SEQ ID NO: 39180 - protein, 193 aa, DROSOPHILA
MYDIFLPKMSKIFQEAAFNDKLMAEAIVVGRERTIMILEDLAPLRYTNADRGQKCLLVVKTKPNLKSRYANKFDNIVTNLMEYAAKSVDVGEKDLQTLVHGDCWTTNMMYLYDDEENSTTVLPVDFQFNTWTSPAVDLHYFFSTSLKFDVKAVELELVQYHYYALKITLEALSYKGSIPSLVKYQLPNFLVMA

SEQ ID NO: 39181 - DNA, 4626 bp, DROSOPHILA
taacaaactgcatgttttaagtaaaatactatagcacacatttttccaaagtcattccgccgacttttttatatgatttcttagtcttttgttagtgcagattcaaggttctatacttgtgtaaaatatagatattttatcaaaaacgtttgacaacatatcttgcgaaaaatacaaattgactaactagtttcgattgcttattgtcactaggatcacttcattaaagctgaaagcaatgaaccacttaaaagcacgtaacttacatataaatgcatatacttaccagacactcaaacacatgtttgcttgtaattaagtttcttgctgccccaagtcctttagatatttctgtataatgcaaatgtttgcactaaaataggaaaggtgttttcgagctggtgtcgtcaggcaagctctttctccatgcaaccaatttaaacaggaattcgcttaagaagccatgcccttgtttcttcgcccaatcaagcgcaaagagatttcaataagtttggtttatttctggtggtacaacatgattttgttgaataatttaaggacattgaacaatgctcgctgactaatcgcataataacaacagaataaatagttaaaaatagtcgggttaggtttaaaaatagtcgtaggctagaaataaatacttaaaattcagctaaatggctaaaaataacagcatcctccagtaattggtgctggtgctaattaaactacgaaacaaacttttctatttacagcgtattaatgaagccccgtccctgcccctgcgcaccaacccccacccgccgccgacagctgccgtctgacgaacctctatatatggctaggctatcctatctaaagtacgatttgcataattacaccgcccatccccagaaggcaggcatccgtcagacggacttttgacgtgactcccacgaactttgctgtcatctcgaccccataccgtccgagagatggctccgagacctttagaccccgtctacgccagcttgcgggcctggaccagtttgttgatgtcgttgtaggtggacagcattgccgggttctcgaggtccttcagctccttgcacttggcgaaggactcgtcgcagtcgacgccgtcctgaccgtccttcgccgctcgcatgtacttgaagaatcgcaggatgtccgggttgtcggaagtaggcttccgcagctcgttcagttccctaaaagtgggagtgacggtagttgaattaaatgtaaagcacacaaatgttaaagctattaatatgaataagtgatttctgtgactgcctaagttagaaagctcattcgttgatctcctttgagaagcgtcagcagattttgattgtttcaatgttattaattttgttaacattaaaattaaaaatgtagacaattacaggtagcttaattaaaagctgacatggtattaatattaatcttattaatataaaacataaataaggcaaccaagcataccgatacacgtactgacaccttaagctttcatttaaatttcgattgatggttatttctacccttattaatttggcctcgactaaaggcactttactgaaatgaaataaggaatggtattcctttaatcaataccctactgtaattgctcaactgcgattaattacggcatactttcgggcggaaaccgaactcacctgctttttttttttttttttttttttttttttttttttttttttttatttatttagaagcgatgaatcaatacaatgcagtaacagtaacataacagcgcaattaacatataaaagataaaaccaaacctctcactaatcatgtgaggacttacaacactcacctgctgagttgagctgagaccaggttgctgtacggagcatacttcgcggggttggcgtacatcaggcagatgagtttctcgcggcaagcttcgttctccggattcaatttgagctgggcaaacaccgagtccaggcgggacaatagtggactgtagaaggggtcatagttggacagcaaaagcgacgagctgggcaccttctggaagctctggaacgtgttcatcacggccggcgttggtttcttcgtcattcctggagctccgccaccagctccggcgctgaaggatcctgacatgctctgggagtttttgaaggaggcagcgccaatgctctgcagagcactcagataggtgtcctgcatcatctgctgacctccatagcgcgacaaagtggcctggttcaccgagttcccattgacctgggcatattgcgcctgctgctgtgatgcctctgcaaggtaaaaaaaatcggaataactatcatctagacaacatcttctatttcagatggcccacctgcattgtactcgtagccggctggcgttttgccctcgtccgccagggaaaatttgctgtcatcatcgaaattcatgctgttgtcccggaagtccagttcttgtggcggctcaatggggcggataaacaacggcaccgacccagccgagccggaagtgatgcctagcccaaagtaatacaaatgtttaaatttattcaagtgccttaagccgatgtacttacccttgccaatcagtcggcttacactgctgatgatggttggcaggaacatggcgaagagcacgctcttcagcacttgcaaacccatatagatgggccacatcaccttcttcaaacctgtagtggaaaatggtatgttgttaattaagttaacaagaagcaaataccaagcgagaatcaatgacgtaaagaaattcagtgttggtttgattacaactgattgagatactgttgtgagtaacgatgtttgaggtatccgatttttctttctgtttttagtcactttaaagttgtggtataaatatttgttgatctgtactaaatttttacttaatttattttctgcttcaggaatggtttttcatggagaagacattaaatatgtcaggcaaatgttgttattaaaaaattaagttttatatatttacttaagtagaaaaacaatgaatggagatttaaggatcaaaatagttaggacattcttttacttaccgctaaagaaaagcagtcgggcgctttcaaaagcccttggaacattcagctcaacgttggtgtcctccaaaatgcttcgggtggtgcgcttgccagtataagattgtgggtgcgagtggttctgctgaagagccaggaccaaaccaggagtgggctcatatctgccgttgctgaagaactgctccacgtagtccacgagcagatcctccagaccttttagttcggcgtcgatagaggtaatggtttggtttttaaaagcggctgccgaactttcggactcctgctttctgggtgaatccgaggggtgtttaaagttccgtcgacgcatggccaccgccaagcgcagatcactctcgctctccgccggctggaacactctgtactggcccgactttgtgaatacattcctcgaaatgaactccggactgatgtcgatgggtaggatgggccggaatgtgtcatcgttgcgcggctgtcccgccatcgtagtgaggggctgactatagagggctcctgcatccaattccgattccggaacagctgccggtatcatcgccactttgcagagcaagataattccataaagcagcggactgcatcgccgctttctgtggctgtttgcttttaatttcgccccgtcgatgtactggctacccattttcattatccttcgccttgcagctgcactcgcatgccaaggttctcgcttcgcttcgactcgactcgattcggttcagttttctgtaacgaataattgctttttcagaggggaattctcttctcgacgcgatggagttgtggccaatttccgcgaactcagcgcggttggcacacgaataaataactttggggaacgtgacaagcaactggaaaaaatacgcaacctgataagcgcattacgtgcgtccttgaacggataaaagtacacggaaactcaggtacagttggaaggcacccttttcttttattgtcccaaataaataattaatttaagccccattcgaaaagtttaaaaactgcgcactctatctgcgccggcatatttacgaatttataatggaatttagtctggaaagagttaaatttgtcatcaatttttgtgtaaaatcactcatttaattgttgtatttaaaatctttgctagccatttgctaactaatagtttttccattggccataatcgtttattgactggctatatttatttttaacattcagtatgtacatatgtaaaatgaacagtgtgtatgcaaaaggtaatatatgaatataatctatttaattacataaattggctgcccaccaatttattgtttcagtttatgtttgccaatttaaggggttgatacaattcattcactgattgccctttctaaaactattttcacaattttcacagttcgtgcgtgaattttagctaattttgttaagcacttaaaccttttcgttgtttgagtcaaacgatcaggcaactcgattttgtgtataaatactttccatttctattgaggaaaccggcaattgaaacagtttatttaactaattttccgaag

SEQ ID NO: 39182 - DNA, 1449 bp, DROSOPHILA
atgataccggcagctgttccggaatcggaattggatgcaggagccctctatagtcagcccctcactacgatggcgggacagccgcgcaacgatgacacattccggcccatcctacccatcgacatcagtccggagttcatttcgaggaatgtattcacaaagtcgggccagtacagagtgttccagccggcggagagcgagagtgatctgcgcttggcggtggccatgcgtcgacggaactttaaacacccctcggattcacccagaaagcaggagtccgaaagttcggcagccgcttttaaaaaccaaaccattacctctatcgacgccgaactaaaaggtctggaggatctgctcgtggactacgtggagcagttcttcagcaacggcagatatgagcccactcctggtttggtcctggctcttcagcagaaccactcgcacccacaatcttatactggcaagcgcaccacccgaagcattttggaggacaccaacgttgagctgaatgttccaagggcttttgaaagcgcccgactgcttttctttagcggtttgaagaaggtgatgtggcccatctatatgggtttgcaagtgctgaagagcgtgctcttcgccatgttcctgccaaccatcatcagcagtgtaagccgactgattggcaagggcatcacttccggctcggctgggtcggtgccgttgtttatccgccccattgagccgccacaagaactggacttccgggacaacagcatgaatttcgatgatgacagcaaattttccctggcggacgagggcaaaacgccagccggctacgagtacaatgcagaggcatcacagcagcaggcgcaatatgcccaggtcaatgggaactcggtgaaccaggccactttgtcgcgctatggaggtcagcagatgatgcaggacacctatctgagtgctctgcagagcattggcgctgcctccttcaaaaactcccagagcatgtcaggatccttcagcgccggagctggtggcggagctccaggaatgacgaagaaaccaacgccggccgtgatgaacacgttccagagcttccagaaggtgcccagctcgtcgcttttgctgtccaactatgaccccttctacagtccactattgtcccgcctggactcggtgtttgcccagctcaaattgaatccggagaacgaagcttgccgcgagaaactcatctgcctgatgtacgccaaccccgcgaaggaactgaacgagctgcggaagcctacttccgacaacccggacatcctgcgattcttcaagtacatgcgagcggcgaaggacggtcaggacggcgtcgactgcgacgagtccttcgccaagtgcaaggagctgaaggacctcgagaacccggcaatgctgtccacctacaacgacatcaacaaactggtccaggcccgcaagctggcgtag

SEQ ID NO: 39183 - protein, 482 aa, DROSOPHILA
MIPAAVPESELDAGALYSQPLTTMAGQPRNDDTFRPILPIDISPEFISRNVFTKSGQYRVFQPAESESDLRLAVAMRRRNFKHPSDSPRKQESESSAAAFKNQTITSIDAELKGLEDLLVDYVEQFFSNGRYEPTPGLVLALQQNHSHPQSYTGKRTTRSILEDTNVELNVPRAFESARLLFFSGLKKVMWPIYMGLQVLKSVLFAMFLPTIISSVSRLIGKGITSGSAGSVPLFIRPIEPPQELDFRDNSMNFDDDSKFSLADEGKTPAGYEYNAEASQQQAQYAQVNGNSVNQATLSRYGGQQMMQDTYLSALQSIGAASFKNSQSMSGSFSAGAGGGAPGMTKKPTPAVMNTFQSFQKVPSSSLLLSNYDPFYSPLLSRLDSVFAQLKLNPENEACREKLICLMYANPAKELNELRKPTSDNPDILRFFKYMRAAKDGQDGVDCDESFAKCKELKDLENPAMLSTYNDINKLVQARKLA

SEQ ID NO: 39184 - DNA, 3034 bp, DROSOPHILA
gctgcggctttaatggtattgtgtaacagaacgcacatcatcttgtttttccccctttttcggggtctgctatgggtctgtcatactttaatttgttgctactctggccaacggctcttttggtggtcggaaagaaccgttggcgctgccaaaatccagtgaaagttggacacgcattatgcaaattcaatctctgcgctggctgactccagtgagccagtggtcgtgtactagattccacgaaaatgaagagttcggcggctatccgaagcgcagatcagcagagaaccgatgaagagtatccgaactgcgatatccagtatctggcagcttcatcgataacactgcacgaaagcgggctgacaaatgacgacaccgtaaactagaattgtgcttagcggaaattgaactaggaatactctcttactttgacgaaatttaaaaattaaattttacctataacgatgaattgagccattcgtagcccagttaatatctggttattagatgtataagccgtaaaatgtggtaaattatcgcatttgttaataccaatatgagccttaacgatttttttaaaatcatttttctcaatccttttgataccattttcaggatactactgtgattaaagcaactaggtactttaaaatttttagcatcatcggatttcgtataccccaacgttagggtacagccacaaatacaatcgttatggccatgtgtaggttggccttctgccgctgcggatgctgatggctacacaatgcgagcgcgtctcaaataaactttcaccgatttcataaaccaaagagcagcaacagcagcaactcgactctccgatgcggcagcaacgtctcaagtggcgctgcactcgattcgattgcagtgcggataaaaacaacttggatctgttgcatgatggataaattattaaattatttaagtgctacatgagaactaacaaaatgcacgataacatcatgggcccctcagtgcctcagtcccagcctctgtaagccaagggttgttggccggacgagcggcgcctccgtttgtggtgatgtccctcgccggtcacatacgatatgctgtgactagactctccgccatgctgggcggctgtcttaagacccagcatcccggccatcatcagagccaccaaggacacgcccagtgccttcatggccaatgccgcgatgccgcccaaccccattacggccatcatcttgccaaacatcagagccattgccaacagcattccctggcccttgtcctttttgcgggcttctgaaacaatcaaaaatatattaatgactctgtgtgtactgtgcactttcagcagatttcgttcgcttaggattttttgacagcattggatgttatgcaaatatttgggatcgatggcaaatacggttttaatattgatgcaacgagaacgatacttgaattcaataaaaaacggcgtttaacaacggcttcttttttttaaaatatcatacaaacaattaatttagcctaagcatataagcttaagttattagcacgttaataaaaaatatatttctttttcgacaaagtaaccttcttttgatacataccacattagtattattattagtatatgaatatagcaagcaaactagaaacatttgtaaaaatgttttttttttttaatttcacttttttcgatatcatttgataaactcactcacctgaaacttgggactcgtcctccaggagatctgccagctttacattgatttcgtgggtgcgcagatagaaggatagactgtccaaaagaccctgctcctgatccggctcctcatcagaaattgaattgttctgcagcggaactatctccaatcctctaatcaccacaaggggtttatcactgcgatttaaattccgcaagacatttcgcagagctcgttcaccgcgacaatatagcgtggcaccggcatcctgatcacagttttcggaacggacagccgtaaggaacagcaaacagagcagaggaaaagtgcggaacatgttgccaaaacgcttgaagttcaactaaaagccttgacaattgcccggtcattttttatagctcgcatttccacggcgcactttcccagggggaaaacggaggaggcgaagtcagtcaagcgtccccggccgaattgtcacaattgtaaattaaaacaatgctgcttctggaaagaaagaaatgtgccttcagttcgcgtttctctgctttttgcctcggccgtgcaattttcttcttcaccggccgttgcaatttttccaattttcaacggtcagttggtcggacagccgtgggatgcgcttggctgccgcccgttccaccaacaacttggcctctggttcactcaactcgacggctccggccaaattatacagatcagaagtggttaaagtgctgcgggtttgttcctagtccacacctggttcctactcaacttcacacgattctcgcggcccaaacaactccattaaccaactagcaagcgtgtcagccgaaaaagcgaaagttaccccgcccgaaagatgagcgatgaagacgtttagtggcaatttgccttggcaagcgcatgcaaagtccataaaaatgggtcgacagaccgtgaagggtgcgaggcacggggtctcattaatcgaaagtaattcagactagaagcattgttgttatcgcgtaagataaagtccttttaagtcctttttctggctggaatcaaaattattcaacaagaacaatgacatgtcactgttcttacggttaccaaatttcaatttcaatcggccttatgtaaaagagtaatttctaaaagttttgctttcgttttcaacatgtatttttttgtattattattcattccgacgtatttgctacgacttttgcgaacgaagatttaaatccatctgaaagaagctttgctctctaagcgggtttccgactgtgatattcatgatctaagggctgtgttagtttcttaaagattttgttgctctattttataagattctt

SEQ ID NO: 39185 - DNA, 609 bp, DROSOPHILA
atgttccgcacttttcctctgctctgtttgctgttccttacggctgtccgttccgaaaactgtgatcaggatgccggtgccacgctatattgtcgcggtgaacgagctctgcgaaatgtcttgcggaatttaaatcgcagtgataaaccccttgtggtgattagaggattggagatagttccgctgcagaacaattcaatttctgatgaggagccggatcaggagcagggtcttttggacagtctatccttctatctgcgcacccacgaaatcaatgtaaagctggcagatctcctggaggacgagtcccaagtttcagaagcccgcaaaaaggacaagggccagggaatgctgttggcaatggctctgatgtttggcaagatgatggccgtaatggggttgggcggcatcgcggcattggccatgaaggcactgggcgtgtccttggtggctctgatgatggccgggatgctgggtcttaagacagccgcccagcatggcggagagtctagtcacagcatatcgtatgtgaccggcgagggacatcaccacaaacggaggcgccgctcgtccggccaacaacccttggcttacagaggctgggactga

SEQ ID NO: 39186 - protein, 202 aa, DROSOPHILA
MFRTFPLLCLLFLTAVRSENCDQDAGATLYCRGERALRNVLRNLNRSDKPLVVIRGLEIVPLQNNSISDEEPDQEQGLLDSLSFYLRTHEINVKLADLLEDESQVSEARKKDKGQGMLLAMALMFGKMMAVMGLGGIAALAMKALGVSLVALMMAGMLGLKTAAQHGGESSHSISYVTGEGHHHKRRRRSSGQQPLAYRGWD

SEQ ID NO: 39187 - DNA, 3118 bp, DROSOPHILA
acatgcctctgcctctggtgcgcttgggtaattttcaattaatgaaagtccccccatgacgtcagtggtgcgccagcaaagggcgcccacaactaacaaactgaataagtgagcgaggggcttgggaacgtcgttggccaggttcaatgttctacactgagcggcagcagctcattaatatttcgtgtagtggcccaaaagtgaaattgtcgcataccaaaaaaggtagccacaacaatggacagggagggaaaacatatgagccaagaagccaggaaagtggcgcgcaattttctatctatgaatattgcattcagcaaatgcaggccaacagaaaacagaaaactgcatgtgcagtttaagtcaactttgcattgtggaatttacagggaaattatttgaaggaatccaagtggaaaactacgtattcaaatatgttaatcatctttcaccaatgttagcaaacaaaacatatttgtccaataatagagaagcgaagaatagtgtctaaagaaaattgttataagtctttaaaagtacatttatttattaatatttacttagttaatttctttttaggtatacttacatataaaatccaatcgaaaatcaactgctgttgcaaccttatatcgtacatctgacattgagtttggtagaaagcgaagcagcttcgtcagccatttttggcacgcacgtaagcccgtttcaatgaaacttaattgtcatcataaattcatgtttggggagcggccacgaaaccataaaaaactcatcttcatgcgaatttcgggtagcagaatttactatatttaattagggcttacttaaacctaacacacacatttagttcgttaaattaaggatcgataaggcgaattaaactagacattagtcagacagttcttgcggcgctcgattctttggttcactctccacgataatctcccgagaatctcccttctaggagatacttctgtttccaaatgcaaatgcgagctcacaggctcttggcgctgcccgccgactccttggccgccggcttccagccgctgtaggcggtgtccagctcccgaccccagccggaatgtcctcctgaggagacgaccacctcgtgggaggactccttcccgccgccgcctccactcagcagcttcttgattccgatgatcgaggccagcaccagggccagcttggacacaatcagcgcctttcccgccaacatggccaaggctccgtaggccaggggcacaatggtgccgccaagcagaaggggaatcatgatcattgcgccgttgcccttcttctcctttttcttgcgaccctccaccgaatttgcctcgttatcgaatttcacctgaagttaaatttaaaacaaattttaaataaaacagaaacactaagactcttacaaagaagcttaaaatatgaatgatagactttaatatattatacatattttgtgattatgaattactcggaaggcaattacaatttctctaatttctctaaataaacaaaagtcaaataaagtatttagttcataagtatttttgttagtttaaaatttgaaaagtatccctttattaatcaaaaatatttctttgttacatccttgtataacttcacactgtctcaaactacactcacctgtagcgtgtgatcctgtaggaagttgcccacccgcttcaggatcatgttgtttaggacctgctccttggcgtccacacttctcggcaagacggcttcaatatccttttcgctaatgggcgctcttttggtctcctcactttctccaccagaactgacgaactgaatgccctccatgagcgagagagactttgccgatcgaaaggccttctccaagccggttagcagtttgacctttaggcaaacggacatgttatcgcccgagcactgctggtatatgcggtagaccattgacatgtccttccacaagcccgtagaccccattccggggttactgttttggacttggggcctgggggccgagctcagactgttcgggttctgatgctggtagctggcactgcgggcactggagagccaacagaagacgatcatcagagcagccacatgccacacgtacttgatcatgactgtgctgggtattgctgttggacgctggacgagataaggatccttgggcgatccttgagctgaggcatacactggggagatgacgccgggcgctgctctttgggtgctcaactgagtgctggccggttggtcttatgcattttatacctgtggcggataaatcgcatgtcggccggctgcctgaaattaaaaaacacaaaaacacacgctttgtcttagtctaaatatcacggcaattagccagatgctgttggcgagcggggctgcgctttcgtgatttcgctgcgaagccgccgaaatgcagtttcgttggcaattatattcccactttttagcccgttctaagctattgagctcgtgcgtgactgccgttgccattgccattcttctctgtctctgcgcccgacttactagaccgttaacatatgcattttcggttttttgcaaatattttggggcagattcactgtcgtcacccaattttcgcgataacttttcttttttcttgtacactttgacaaaccatatttctattgcttacttttaggtgctggagaaaaaactgcttctccttaaacgaaagagtcaagacacgaacttgattgcactgaacgaaagcagagaagagcataatatttaattacatctggcttgctgaattggccgacaggtggcgtttgaaataattgaagtgataaaaattagcaagcaggtgtcaaatcggcacaaagaaataataattggcagcagccaaataattattaagtggtagaggttgtaaaaaatgtgctaaagaagtgggagatgttaaagtgtcgtcattattgctatttatctctctcttaattcagcctgatcgccccaggctcctccagagcccgtcacagatcccattaaatcccgccacagccttccagagcatgcatgcttaatcttaactttctagcttttataattcctgagatcaaagctcttattgggactaggctattgatcc

SEQ ID NO: 39188 - DNA, 825 bp, DROSOPHILA
atgatcaagtacgtgtggcatgtggctgctctgatgatcgtcttctgttggctctccagtgcccgcagtgccagctaccagcatcagaacccgaacagtctgagctcggcccccaggccccaagtccaaaacagtaaccccggaatggggtctacgggcttgtggaaggacatgtcaatggtctaccgcatataccagcagtgctcgggcgataacatgtccgtttgcctaaaggtcaaactgctaaccggcttggagaaggcctttcgatcggcaaagtctctctcgctcatggagggcattcagttcgtcagttctggtggagaaagtgaggagaccaaaagagcgcccattagcgaaaaggatattgaagccgtcttgccgagaagtgtggacgccaaggagcaggtcctaaacaacatgatcctgaagcgggtgggcaacttcctacaggatcacacgctacaggtgaaattcgataacgaggcaaattcggtggagggtcgcaagaaaaaggagaagaagggcaacggcgcaatgatcatgattccccttctgcttggcggcaccattgtgcccctggcctacggagccttggccatgttggcgggaaaggcgctgattgtgtccaagctggccctggtgctggcctcgatcatcggaatcaagaagctgctgagtggaggcggcggcgggaaggagtcctcccacgaggtggtcgtctcctcaggaggacattccggctggggtcgggagctggacaccgcctacagcggctggaagccggcggccaaggagtcggcgggcagcgccaagagcctgtga

SEQ ID NO: 39189 - protein, 274 aa, DROSOPHILA
MIKYVWHVAALMIVFCWLSSARSASYQHQNPNSLSSAPRPQVQNSNPGMGSTGLWKDMSMVYRIYQQCSGDNMSVCLKVKLLTGLEKAFRSAKSLSLMEGIQFVSSGGESEETKRAPISEKDIEAVLPRSVDAKEQVLNNMILKRVGNFLQDHTLQVKFDNEANSVEGRKKKEKKGNGAMIMIPLLLGGTIVPLAYGALAMLAGKALIVSKLALVLASIIGIKKLLSGGGGGKESSHEVVVSSGGHSGWGRELDTAYSGWKPAAKESAGSAKSL

SEQ ID NO: 39190 - DNA, 3237 bp, DROSOPHILA
aaagacgtacgaggcggcggcctggccttttggccattttgagccttgggttttgtcggctttggccatttatatgccgaatggcgatgccaggccacggccataaattgcagccgcggggcgtgctcccagctggaactggaatccatgctctcatccacacacctaatttgtttggggcgtacgtgttgcactgcgtgtgcgaaaaaaaaaaaaaaaaaacaaaaaagcaggtcgcaacattcattagattttcccgagatgccgagatgtgagccagtttctggagcgacattggatatacatatgtgtttatatataactgaccgagaccgaggaagaggcttctgctgcgctttacgcctggctgactggctgactagctggctcaagtgaaatccggcgatcttgctccgtgattttgtgtgtcgcccatgcaattgatattgctggcctagttcgccttagccggtgaaagagtgaaagcaattcgctgcgtatgagcgatattcgattgaaacagtaagacagcaatacacatgttcggaataaatgcggcatttcttttattgttttgtgtgggggagggcttggccaggggggctttttctgcgcctagcggcagttcagagttaggcagtttagtttaatagtttggttaagagttcagttgagttaagttaagttaagcgtagagttttaaataataaagctctgagtattaatacgacagtggcagtcatttttaagaatagattaaacgacgccaggtgttcccctctggcggcagtccctagctgctgattccttagacctatttgtgtgggttcgggatttacctttccttctatttctcttgatggcgccttaagtgtgtaagcctggcatgaactatgctatacaaataaattaaataaatagataaattagacggccctccgagtattgcactgattacggttgcctcagcattcagcattcagaatatttggcatgcagcttattgcttatacgccgcataggccagctgctgggcctgggagtcatcagatggcagcgagcggccgtagctgtgctcgtgctcgtagtgcgggtgcgcaacgacctcgtagttctccttcttcgactcgagcagtttcttcagcccaatgatgccggagagcagcagggcgatcttgccgatgaccagggccttgaaggagatcagggccaggaagccaatggccaggggcagcagggcggccatcttcagcttgaagagcattagcaggggcatcaggtacttcttcttctccttcttcttgccgcgagctgcagggggagaaacgatttggtagttagttatatgatttgcattactttcgctggagcggagctgtccgctcattagcaactggagcacagataattagcaagcgaacaggatcgaccgctttctatgtggctgcgcatagaaattggaaatcggaaattgcagccgctgcgcacaaaaagaaagtaagccttgctaactgcctgactaaagtgcaattaatagccaactatctggataaccagctgccaatgcaccgctatgtggccatgtggccatgtgcctatgtgggcatctggctgcatcacaggatgacctcgatatggcggagacttaacagtgaaaacaggatttgtgccagagccatctgcccgaactggtcgcttgcattagtaacccaaataggcaatgtcttggccagaccagaactgtaatttatgtgggattcgatgggtactagccagatactcacattcctcgagggcgcgctgcatgtcctggatggagtctttgggcaccttgaactgcagcgtgtgggtgccgaagaagcgggcaacgcgctccaccagcagggagtccacctcggcctcccgggcctcaacctcctcgggcagttgcatctcgttgagggatcgacccaccgggatctcatcggtcttgaccagggcaatgccctcggtgagccgcacatccccgttctcggcatcgaagtagtgcagggctcgctcctttgggtggatcatgaattaggataggtttctctcgggctactggcaactaaatgctttaccttcatgcacaagaccatggaccgttcgccacagtccttgaccatcttcaaagcgctggtcagcaagctgtccgcttccgaggtagccgccgccgtggaggcaatcagcgcaaaaaggcacacgaacttgaacatggctcgtgatgggtatttccttttttgtattattttttttttgaatgcttcgcacaaacactcgacactgctgcgctgatttgatatcctgccacttcctggcgattcggggatgcgtgtgtgtgtgttcacttgattgagtgcactgcgctcgattggcgtgttcgatctgtcggtcagaaggcaaccggtaaactgtggctagaagacgcacgcggatcgagttttattcccggccagcagagcggcggcagcgttggccagcagcgacgacaacgacaacgttgacgctttagcgctccgcaagtggtctgagccccccgactgccccgcttggcccatcgcacacagtagccgagcttagaatttaaataaacaacccgaccacgaacctggccaggttgcagccgaagtcgcactcggagtcgcacagtcttggtggccggccatacaaggcgctgcagcgacaactggacaggtgcgccgaagtggacgcggtggcgcggtcgccgtttacgctggcagagttcgtcggattggcagttgttgtttgtcaacacacttcggcggcagttagctgtttgcctgccacaaggagaaggccaattgttcagggggccaatagacagatcggccagcccttaaatattgatttttcttgcattacgtgtcgctttaagggaaagctttgtgaattaaatttataagaataaaatttggaattataagaatcttaatcctatgtggtaatgcttagaacaatacttttcgtaaacaagggtgcaactgtaccttacctggattaagtcagccagcttttcaaaatacattttaaaaggagcgatttttctttgcaggtcactgcagagttagaatacggcatatgctattataactggcagcttaaattcaatttaattaacccttccaactgggatcagcttagctaaaaggctcaaaataaacagaattttccattacatatttacttttatgttgt

SEQ ID NO: 39191 - DNA, 702 bp, DROSOPHILA
atgttcaagttcgtgtgcctttttgcgctgattgcctccacggcggcggctacctcggaagcggacagcttgctgaccagcgctttgaagatggtcaaggactgtggcgaacggtccatggtcttgtgcatgaaggagcgagccctgcactacttcgatgccgagaacggggatgtgcggctcaccgagggcattgccctggtcaagaccgatgagatcccggtgggtcgatccctcaacgagatgcaactgcccgaggaggttgaggcccgggaggccgaggtggactccctgctggtggagcgcgttgcccgcttcttcggcacccacacgctgcagttcaaggtgcccaaagactccatccaggacatgcagcgcgccctcgaggaatctcgcggcaagaagaaggagaagaagaagtacctgatgcccctgctaatgctcttcaagctgaagatggccgccctgctgcccctggccattggcttcctggccctgatctccttcaaggccctggtcatcggcaagatcgccctgctgctctccggcatcattgggctgaagaaactgctcgagtcgaagaaggagaactacgaggtcgttgcgcacccgcactacgagcacgagcacagctacggccgctcgctgccatctgatgactcccaggcccagcagctggcctatgcggcgtataagcaataa

SEQ ID NO: 39192 - protein, 233 aa, DROSOPHILA
MFKFVCLFALIASTAAATSEADSLLTSALKMVKDCGERSMVLCMKERALHYFDAENGDVRLTEGIALVKTDEIPVGRSLNEMQLPEEVEAREAEVDSLLVERVARFFGTHTLQFKVPKDSIQDMQRALEESRGKKKEKKKYLMPLLMLFKLKMAALLPLAIGFLALISFKALVIGKIALLLSGIIGLKKLLESKKENYEVVAHPHYEHEHSYGRSLPSDDSQAQQLAYAAYKQ

SEQ ID NO: 39193 - DNA, 5420 bp, DROSOPHILA
cctgctcgagagccagctcagcaatcgcgatctcgagcacttgtcggggaagagtctggacgccctgctgctggagcggttcctcaactttgtccatagtcaccagctgcaggtcaacctaccacggttgctgcggtttggtgagcggaatgtccaggattggctgctgcacgtggtcggctactttatgccagccagcgaaagcgagggtcgcaaaaagaaggatgacaaaaagtatctgggacccttcattgccgccgttctgttaaagaccgctattctaaagatggcataccactccattgccattgtagcgggaaaggcgcttattgtgggcaagattgcgctgatcatcagtgctataatcggtctgaaaaaacttgtgggtcacgacggcggcgagaagaccacctacgagatcgtcaagcatccgcaggtgcagcagagccacacatactcgtccagccaccagggtgagtacgatacgggtggccatgacggaggatcctaccaccgcagcatcgacgacgagatgatgatgcaggacaaggcttaccaggcctggatgccccacgtggccgcatccccttcgcccgtcgccaagggatcccgataaagggagccgcggagttccttccggggtcagcagctctactaccaaagatcgaatgattccaaaaagctccacttagcccaatctatatgaatttgtatttacactcgacagccctccagtttaagtttagttatcgtagttattatgttaccacagatcgagcattaaaaagaaacgaattttaatttcattggtttttattttcggccaagggtgaagccgcacaaaactgccacgcccaaaattttgaaaaaattgaaatatttttatattaagtttttccctcttttttttgtatatccttattgttttattggctagtgatttctatgtatgataattgtgttcgattatatggacacgcaaggagtttgattttaatatctaaataaagccccgagtcgattttgtggcctctggacgtggctgatctgggtaagccgccgcctgatgcaggcggcgctttagtggctccatctggtaggcctggtagtactccatatggctgcccaacggtggttcctctacctgatccaactgcgagtatgtgtcgtgggtgggcatgctgcggtgccagccgctctcgtggctggagtgaaccaccacgtgctccgtgccactacctcctccactaccactgtgaccagtcgaacccttttttagactgccctgcgaagagaagcgtagcgccaacaatttggacggaactgttcaagggacagattctactcaccagcaatgatatgaccaaggcaatcttggccataataaaggccgagccggcgatgaggatgaccttgccgaggaacatttgggccagagtggccatcatgatcatgccgcccatcatcgccatgttcttgtctttgtccttctttttgcgacctgtttttttggagcattttttatttttctttttatacttgtctttcttcttttttttctttgattttttctgttttttaggcttcttcttcttagacttcttctttttctttttcttagactttttctttttcttttgcttatctttatctttatcgtaggatgttgcatgcacttcgaaactaccaaatcctcctattaacttatcgactttatcatctacgctcgcataagtaccttgatcgaggcccagctcgctgccaaagtcatcgatggcatttgaaatggtcaactggcgcggcagctgaagacgcagtgctcttccctggaccagctccaacagtttcccgggtaaacccatatccatacgcctcgtctccggcttgctgatcccaaccttgggttcgatgcttaggtaatcggtgatctgccaggtactgttatccctggttgcaccatccagcaattgctcgctctcagagcctagacactgccaagcatccgcgccacccatgcagtgggctataattctgcctagacttctaggactccatggggatgtagacgcgttagcagaagtttcgtttcctttgtgactcaaagacagaactgaactaccaaacacaaagcactgtagtaaaacgacgcgccacatatttatttactataaggaaacctctttcagcgcttcttgaaccacaaataaaccagacaattgctctgctctgttacttatagtgcctaaatcatttttgggggtaacaattaacgggcttgtcaaagcacgaaaatgctcttttgatacgaatcaaatagaaatgttttcagaagtttgcttgctgaaccctgacccaacgaaaactgaaaccgaaatttttgttaagttacctttcgtttttggaaagccctcgttacatatcgctaattacagtttggatgcactagaaaaaatatgtatttatgaataatcaataaaatattgtgaatcatgtctgttggttccttagtacaaataaatgtacatagttacgtgattatgctcgtcaagaaaatcataatatttagtgggtaactaaacctaaaaaatggagtggtgaataattcgtgatacatatacaaaaactatattactttttataccttttagtgatagagtaaaaaggcttgctagattcgttaaaaagtatgtaacggtaaaaggaacctttttctatcccattccgtgtccgtttgtctgactgtccgtccttctgaagcgcatgtcattttcctgacttttttttttaatttctatcgattaatattgaaatatttgctgtttgatagtcggggatctcaacgttttttaaatatattattaattaagaatcgtctgtgggggaagttagttaaggataattatattttatctaatagatagatacattttaaataccctacacaacgcactatgattttatatacacaaatttttgtaaagtgtaaactatgtgctcatagcgatctcacgtccaccgcctgccagccctccattcggtgggggtcctggaagtttctcaacagaagttcgccctcctgctccacactggatgccaatagtttgttacttggcctgcgttggttttcaaagtcgtagaaacggtcttgggtgggcggtttggggttgactggaggtgcttggcccggcgtttccgccattcgaggctgctcgaatcgaacttttcgttcacttcgacgataaggcgacgtctcgtgcacatcgtactggtggtggaactcatcctggcctttgccaaataccgtagtctttccgggaaattggccgattggacggtggccactaaagccacccaaaccaaagtttgcagcgccaaagctggcacctccaaaaccaccacccaatcctccaagtccaccaacgattccacccagtcccaagaagctgctcacatatatggccagcttgaccaaaaataatgactttttgagcagcagacatatgccagcaaatatcaggggtactagggccaccagattgaactttaagcccagaagaaagggcagtaaatactgcttggtcaagacgcgacctgaaaatgtattaataaatatttgtaaaaaatatatatgtatattaataatgtctttggctcgcatacgtttttcttcaccaagcacaacaaaaaatgttggactaacacttgaaagaaatgttctgaacattttgcaaacttcaccttgaaatacactcaaatttcgtcaaatatttaaatttgataaattgatatcaatttcaatatcaatttatatgcagccaaaagctatggctgatacccatacttcagcttagttttataagttaagcatacagtgttcaaataaataaatatttcaatatatatttcgcttaagtttggtttctattaataatattatctgcaccgattttgaaagcataccggttgagggatcctcgaatccaaattgtcgctctccctgcgccgctccatcgaggacgaactcggccacactattcgcatccgctgtgggacctattttgaacataagtccaggataaaggccgtccatatgccactccatactccgttgacccatcactgcgccagcattctcgaggataccgcggaagtccactggatccgtgtcgagcacatttgatagagatctgactgcagctgtttcacttttcactgtcacaaaatcctccacgaactttacgttatcgctctcatctaatttctggatgaagttcagagcggatcttcctaaacattcaccgatcttcggtttctgtgatccacgaacacactgcttgaactccaaactcatggcggaaaagtcactgccaatcacttgatggaaactgaccaggagcaaaacgatatccagtggcgacataatggtcgagtgttttgatctcaactgagcccgctggccaactgacccttctgttttatatccgccaaatcttgttatacaataaccgactggtcttttggctaaatctgctctcattcagttaacgcgctgttttttgcacatggcccaataacggaaattgttgtacatcaacgccaaccaggggctcttcgtcttgggccgcttcttatttaagccggcatggtcatggtcagtgcacacgacccaaagctgcagcgactggtggccaatttttcgcacatctcccccattatgcaagcagttattgtatttccacaggaattatgaaatacttggaggcgccaccgctcggaccacgcggaatatttacaattaccattgctaatgccggtccattaaatgaacggagtcgcttagggaattaccagtaatgttcaatcgtttacagagaaaaacttgaaaattgccacaagtcaattaagaaaacaaacaagcggaaaggagggaaaccgatttacgtttgggaaatcaacttggtttgggtgttaaggaaaacccgaacccaaaaaggtttataatgatacattttttagttccataactattctcgttttaatattatttacatgtattttttaaacatcgaaaaagtttcagaacgttacattattacttgtagaacaaagatgtacgtttcctttaccataataaccagtttcacaatgaagctaaacggcatacaaatcagtggaataatcccctgagttcgagagttaagtcctagcaaacttttaggcgaagccagtaagagttaagactttggtttggtgatgccagcacgtcaagagagacttgactgcaataccagcaaaaacaggtgagtattttcctagtcaatgctgtgggagaaatttgaatatccccctatgaaagtctctgataacttagcaccccaagacctttggcgaactcaagaacaccccaattcccctgacaa

SEQ ID NO: 39194 - DNA, 1731 bp, DROSOPHILA
atgtcgccactggatatcgttttgctcctggtcagtttccatcaagtgattggcagtgacttttccgccatgagtttggagttcaagcagtgtgttcgtggatcacagaaaccgaagatcggtgaatgtttaggaagatccgctctgaacttcatccagaaattagatgagagcgataacgtaaagttcgtggaggattttgtgacagtgaaaagtgaaacagctgcagtcagatctctatcaaatgtgctcgacacggatccagtggacttccgcggtatcctcgagaatgctggcgcagtgatgggtcaacggagtatggagtggcatatggacggcctttatcctggacttatgttcaaaataggtcccacagcggatgcgaatagtgtggccgagttcgtcctcgatggagcggcgcagggagagcgacaatttggattcgaggatccctcaaccggtcgcgtcttgaccaagcagtatttactgccctttcttctgggcttaaagttcaatctggtggccctagtacccctgatatttgctggcatatgtctgctgctcaaaaagtcattatttttggtcaagctggccatatatgtgagcagcttcttgggactgggtggaatcgttggtggacttggaggattgggtggtggttttggaggtgccagctttggcgctgcaaactttggtttgggtggctttagtggccaccgtccaatcggccaatttcccggaaagactacggtatttggcaaaggccaggatgagttccaccaccagtacgatgtgcacgagacgtcgccttatcgtcgaagtgaacgaaaagttcgattcgagcagcctcgaatggcggaaacgccgggccaagcacctccagtcaaccccaaaccgcccacccaagaccgtttctacgactttgaaaaccaacgcaggccaagtaacaaactattggcatccagtgtggagcaggagggcgaacttctgttgagaaacttccaggacccccaccgaatggagggctggcaggcggtggactgtctaggctctgagagcgagcaattgctggatggtgcaaccagggataacagtacctggcagatcaccgattacctaagcatcgaacccaaggttgggatcagcaagccggagacgaggcgtatggatatgggtttacccgggaaactgttggagctggtccagggaagagcactgcgtcttcagctgccgcgccagttgaccatttcaaatgccatcgatgactttggcagcgagctgggcctcgatcaaggtcgcaaaaagaaggacaaagacaagaacatggcgatgatgggcggcatgatcatgatggccactctggcccaaatgttcctcggcaaggtcatcctcatcgccggctcggcctttattatggccaagattgccttggtcatatcattgctgggcagtctaaaaaagggttcgactggtcacagtggtagtggaggaggtagtggcacggagcacgtggtggttcactccagccacgagagcggctggcaccgcagcatgcccacccacgacacatactcgcagttggatcaggtagaggaaccaccgttgggcagccatatggagtactaccaggcctaccagatggagccactaaagcgccgcctgcatcaggcggcggcttacccagatcagccacgtccagaggccacaaaatcgactcggggctttatttag

SEQ ID NO: 39195 - protein, 576 aa, DROSOPHILA
MSPLDIVLLLVSFHQVIGSDFSAMSLEFKQCVRGSQKPKIGECLGRSALNFIQKLDESDNVKFVEDFVTVKSETAAVRSLSNVLDTDPVDFRGILENAGAVMGQRSMEWHMDGLYPGLMFKIGPTADANSVAEFVLDGAAQGERQFGFEDPSTGRVLTKQYLLPFLLGLKFNLVALVPLIFAGICLLLKKSLFLVKLAIYVSSFLGLGGIVGGLGGLGGGFGGASFGAANFGLGGFSGHRPIGQFPGKTTVFGKGQDEFHHQYDVHETSPYRRSERKVRFEQPRMAETPGQAPPVNPKPPTQDRFYDFENQRRPSNKLLASSVEQEGELLLRNFQDPHRMEGWQAVDCLGSESEQLLDGATRDNSTWQITDYLSIEPKVGISKPETRRMDMGLPGKLLELVQGRALRLQLPRQLTISNAIDDFGSELGLDQGRKKKDKDKNMAMMGGMIMMATLAQMFLGKVILIAGSAFIMAKIALVISLLGSLKKGSTGHSGSGGGSGTEHVVVHSSHESGWHRSMPTHDTYSQLDQVEEPPLGSHMEYYQAYQMEPLKRRLHQAAAYPDQPRPEATKSTRGFI

SEQ ID NO: 39196 - DNA, 3610 bp, DROSOPHILA
ctctatatattcagagggcgtccaaagacattcaaatgcaagcgcgtgtctcggaactaagcgcagtcagcagtcgacattcgttaacgcgtttgctgtcgtcacttttcatgcccaaaaccctgacttaccaactgcaaagtgtctgcggaatgtatcgcagctcgagtgtcagcggtacttttatttggcatccggttgctgcttaaagttacactaggctgcacggatattattgggaatttggaaaccccgtttaatgcgtctttctttaagggttctagatggaatgaacctgatgtttaatagcatgggtacacatacaattaatttgaaatttatttttagactttgcactgaacttaaatgataataatttaacggtaagcacgtcctgaatattataaaaaataacttagaaatatataatcttataacaattttttcatattaatttataaataggcgagtgaatcgaaatagtaaaaatttaggaagaatatagttctcattgcttagtaaaaaataattaaagacgttttttttcaagatcattttttcaagataaatatatacttataattaagagcccatctatgcaaaatatttaataatttgactttatgaagagaaaaaccttaaaccaaaccgtgttatgtttaacgtaagaaaaatgtatccaaaaattagaaggctaaaaaagaaattttagttttcgtaaagctcgaatttctcatggagctgctaatagttaatatatatattaaagattgcgtctaaggtaccagtatttaagacagagtatttaaaattcgctttaggatgacaatgctgttatttacatacttcatttcatttgcgggcgcgtcgttgttatcgctgaaagtcggcgacgtcacttgtttatagccaccgaccgaccggataaatcaatgctggccgagcagtgggccaactctaggcaaataggtattctgattgggttttaaggcgccactcatcagagcttcttcaagacgagggacttgctggagtggccaccacctccggagctcttcaggctcattacagccgtaaagagagcgaagaaaaagccggccaggcccgtggtgcccacgagcagcgtgagtccgccgattaggaccgggatgagggtgaggaacttgagcttgtaggcaatcagtagggggaaaaacagcttctggatcttcttcttcagtttcttgagcttgcggccctcggattccgcagatgccaggcgttgaaagcgaccttgaacccggagctcctttgaagttgcacctggtgggtctgcggctgctgctgctgctccttctcttgcgatggcatccaatttatttgtgcccgtctcatctgcgattgggtgagcggaaacaatagttagccacgtaattagatggtcagtcacagccgccccgaggttatggtcgcttgtcacttgcatgaccgcatgggttggattggaaaataaacaagaatcattgaatttaaaactcctatacttagtcaattaataagtatagcaagtataatgagtaatgcacttaaaacccgttaagttgtataatattgaaatattttagtgcatactttctaaaatattgtatatggttattgaagctaaacgcagttgcttgtccagttttttctaaccatacaactattgttctggaatatttatgaagctgaaaaccttcagatagggctatattataccccccttttttcaaaatagtgaaatttttaaaatagtttttaaaattggaaactcatctgaaaagccaggaataaatttggaagtgcaagattcctttaaggtttcggtagctgtttatttactatttgaagtcgttaggaaaacaattttagtttggtttagttaatattcatgttgttgcgcactacacttttggaatgaaaattcgctttaattcatgtactgttcctgggtttagaccacatttaataaagttttcattaaatttacccacctgcctcgtcgctaatcacgcttctcagggcgtcgcagaagttgcgcactttcaccagggctcgttcaaagggcgccaagtaggattcaacaccccgaagtgacccctgttcgctatcctctggtcccccgggaaggattctgttttcatcatcttgattattatcgtcatcaccattaaccgggtgggttaaagtcgcagccaccttgtgaacttccggctcggcatcctccgcttttgccagctggcgaaggagttggccccgccgcatctgctggctgatggccagaacatagctggatggatcgatgggaggattcggtttgtaatttccgaccggcgttggggagctctcgttatagcgatggttgtaggcgtagaaattgacaggaagtcgttccggttcctttcgcctttctcggatctccacccgctccggctgctgcatggaactgggtgctgtcgcctggaggatgagccaattgttgtgctgggtgaatggctgccaagcattcatctccagctttagctgcgggttctggttgccggcggaagtggcgccattaaagcggctggcgctgcacctcgccacctccattgttatgagcccgcaaatgacgagcaccaacacctgtcgctgccacattgttaattcaattttcctgcggatccttcggctgggcttgccacttcacacacgcactccgcacgccgtcaagaattgaactgtgaggaggtgagtgttccaaaatctttgtagaccaaattctacgggccattcgacaatttatggggctctctggtctagcgattttacggcctttcgccgaaaaatgctgtggcttttgcttacttgcggtcaagcgcccagttgatcccccagatagattttcacaatcaagacttttacctggcccacacaaagagaaaacgggcagttaaaatgggtttgaaaattaaatttaatagaaaaactcaaaaacctatggtgtgattgttcctgtatttaacctatattgttactattaagtaatgtaagtattaaagtaagatttgcacaccttattaattattcacaaatagctactaagttgattgattagtatttgaagctgtgttgatgaacgctttttggagtgtacacatgcagaatggtaatccgtcagacgtaaccggattgggtggagggaatcgaccaccgaccacttcccaatttccacttatgtaaattttccctgttgaaaagcgggcgtctcattggcagatcaaagattaacgctccagggagcacaacacgtgcttctgagtcaattcaggcatgtcggttttaattagaaaaaaatgctttaaaggcgagttttggatgttttcacttttcaccaccttgccaccttaatgccctgttgcacgttcgtatccacaagtccaactggtggccttgcacttgttgcactattctatataggtttccggccctgggaaagtgtacccaatgggtaaattcgagtaattgcaggtccgtgcgtgctaattgcaccttcaaacttgccaccagatgccagcgaggtatgcacctcgccgccgtgcgtttaatcatc

SEQ ID NO: 39197 - DNA, 972 bp, DROSOPHILA
atggaggtggcgaggtgcagcgccagccgctttaatggcgccacttccgccggcaaccagaacccgcagctaaagctggagatgaatgcttggcagccattcacccagcacaacaattggctcatcctccaggcgacagcacccagttccatgcagcagccggagcgggtggagatccgagaaaggcgaaaggaaccggaacgacttcctgtcaatttctacgcctacaaccatcgctataacgagagctccccaacgccggtcggaaattacaaaccgaatcctcccatcgatccatccagctatgttctggccatcagccagcagatgcggcggggccaactccttcgccagctggcaaaagcggaggatgccgagccggaagttcacaaggtggctgcgactttaacccacccggttaatggtgatgacgataataatcaagatgatgaaaacagaatccttcccgggggaccagaggatagcgaacaggggtcacttcggggtgttgaatcctacttggcgccctttgaacgagccctggtgaaagtgcgcaacttctgcgacgccctgagaagcgtgattagcgacgaggcagatgagacgggcacaaataaattggatgccatcgcaagagaaggagcagcagcagcagccgcagacccaccaggtgcaacttcaaaggagctccgggttcaaggtcgctttcaacgcctggcatctgcggaatccgagggccgcaagctcaagaaactgaagaagaagatccagaagctgtttttccccctactgattgcctacaagctcaagttcctcaccctcatcccggtcctaatcggcggactcacgctgctcgtgggcaccacgggcctggccggctttttcttcgctctctttacggctgtaatgagcctgaagagctccggaggtggtggccactccagcaagtccctcgtcttgaagaagctctga

SEQ ID NO: 39198 - protein, 323 aa, DROSOPHILA
MEVARCSASRFNGATSAGNQNPQLKLEMNAWQPFTQHNNWLILQATAPSSMQQPERVEIRERRKEPERLPVNFYAYNHRYNESSPTPVGNYKPNPPIDPSSYVLAISQQMRRGQLLRQLAKAEDAEPEVHKVAATLTHPVNGDDDNNQDDENRILPGGPEDSEQGSLRGVESYLAPFERALVKVRNFCDALRSVISDEADETGTNKLDAIAREGAAAAAADPPGATSKELRVQGRFQRLASAESEGRKLKKLKKKIQKLFFPLLIAYKLKFLTLIPVLIGGLTLLVGTTGLAGFFFALFTAVMSLKSSGGGGHSSKSLVLKKL

SEQ ID NO: 39199 - DNA, 2868 bp, DROSOPHILA
aataactggaaaatgagtaagtcttgctggtgcaaacttttaattttgttataaggtttaagatataaatattctttcccatctgtttgtctgtatgaacgaagagttctcggaaactttaagatttagaaagttgggagtaagggatatataacaatttaagaattcgacaatagcgttctctcacgttttttaatttcgtttaattttatgaaaatatatgtaattttattgcttttatatagtattttcgtttaatatgattgtgatattttaatttgttggttgtatttttttagggataagggtgcctatattttatctttcactcctgcagttaaggaatttgggacacccaagtcgtgaatcgttgctctttgttgcaccggctgcagcctgatgattgagttgtgtcaacctgtttgttgactttggttttcggtcgtgctctttacataagtcgattgtcggcgtttattgcaacaggcacttgcggaagtaacgcagccaaagcaacgacattgctggcttggctctggtcactggtcactggtcgatggtttgggttttgatgggatttgagggctggccaacggtgcgcatgcgcaataaaccgttttgtgcataacggaaccgcagtgctgttaatttttgcgctgcgtgcacgccgctgaattcgtcaacgggtcggctacgtaacgtcatcaaagtcaggcgagtcatgtgctaattaatcgttgatgaagctaggagttatgtggccctatttgtcaattggccaacactataccggaaaactgatgtttgtagtaatggtcaataccatatgattttaaattaacgctacattaacatttgctatttacattaattcttctgcaccaagtgctgcggtatattttagagtggccttcacttgtgaaacgtgtagcaggtattgagttttggtattttaaatacgattcttttttccccacgctcactttcgtttcaaactaacctataaaaatggcttatacaagttagggtctttggagaccaatggtataaagggctgtcgaatgggcatccaactgcttccgctggaggataaatcactggcgtgtaatcctttaacgagtggtgcatgagagtgaattatctccaggcgatcgtgtgcatgtcctccagacaaaatccatttcagagccaaaataccggatgtgaccaaagcgattttgcccatgacaaacgacgaggtcgaaagcgccgtaagccatttcaggatcaagggtagcaaaacaactttggcaacggctacggcagccagaagcggatacaccattttcatgagctttttttgctttttgtgcttaccgcgacctgcgaaataaaaacaaataaattgttcatttatgaatataatatagaatataaatgtattgttatagtggaaatgtaagcctaagccagttatgatagaccctttacatgaaggtccttgtgtttcagttatatgaagatcaatgataagtgtacgtcagggaaaacgcaaataaaattttaaggtggactaagaaagaactttctatatatgaggaagatgactttaacccaccttcggtagaccaggtctccagcatattgtttacctcctctgtgctcaaatcgtctgtgatcaggctgtgcaactgcgtttcggccatcgatagccaatgacgctcgactcgctgccgctcctcggcggcagcttcctgctcggcgtcctgctccacggctgccacgattgcaccacccatctgcaccaccggcggaagggtgtaagctcctccgaaggacaccagcaggagcaggtgcagaacgacgattgaaatcgatgacttgaacatgtttacaccgttgcaccgttctcagacgactgatcaaaagtgggcgcccactgcagactactgctaatggggcactctcttcgttgcacttcgctgcatttcgattcaattgggtatctgtatattcttggccaattgatggccactctgtaccgctatcgcttctccattgcactgaaagaaattcataagttcacaaaaatttctataatgagacattttattcagcagatgtaaattctattacatcagatatgccgatcatgagcagatttcataaagggtactactcttaaaaaaagctttaagcctctgtaagtattctgtaattctattttttaagaatgccaacgattcattcgtttttcatctattatcttaccttctaaggaaaatactcgaactcttgatttatggttctaatttttgccaagtgttctaacttggtttcgctgattctgttttgcaccgccgattcagttttacttgagcgtgaacggacacattaaattttccctgccttaatgaacggctcaccgccgacgtttcactgtaactgtgtttactgtgcttgttactgggttgtgtgcaccgctcttgtcgggggtcaattgttccgaccatcaacaagtaaaaactcttcattatcgttggaaggcattttctcggtgcgcttcggttcacttgctctttttgttcggcaaccaggtttttccatttctatgctgttggtgcatggaaaggcattttgggggaaatgctctgcaattgcgtttctttgtcaaaaacaagttcgaaacgcaggagttcattttaatttagtggcctacctacatgtttatagctacctataaaatcccactcttgcattaaattggtttaggataagatgtgaaattaaaagttatttttggaattctatatttatctaaacttaaaaacacatcgtttaccttattaattaatgttaatatttcgatttaaaattaacctaccgatg

SEQ ID NO: 39200 - DNA, 633 bp, DROSOPHILA
atgttcaagtcatcgatttcaatcgtcgttctgcacctgctcctgctggtgtccttcggaggagcttacacccttccgccggtggtgcagatgggtggtgcaatcgtggcagccgtggagcaggacgccgagcaggaagctgccgccgaggagcggcagcgagtcgagcgtcattggctatcgatggccgaaacgcagttgcacagcctgatcacagacgatttgagcacagaggaggtaaacaatatgctggagacctggtctaccgaaggtcgcggtaagcacaaaaagcaaaaaaagctcatgaaaatggtgtatccgcttctggctgccgtagccgttgccaaagttgttttgctacccttgatcctgaaatggcttacggcgctttcgacctcgtcgtttgtcatgggcaaaatcgctttggtcacatccggtattttggctctgaaatggattttgtctggaggacatgcacacgatcgcctggagataattcactctcatgcaccactcgttaaaggattacacgccagtgatttatcctccagcggaagcagttggatgcccattcgacagccctttataccattggtctccaaagaccctaacttgtataagccatttttatag

SEQ ID NO: 39201 - protein, 210 aa, DROSOPHILA
MFKSSISIVVLHLLLLVSFGGAYTLPPVVQMGGAIVAAVEQDAEQEAAAEERQRVERHWLSMAETQLHSLITDDLSTEEVNNMLETWSTEGRGKHKKQKKLMKMVYPLLAAVAVAKVVLLPLILKWLTALSTSSFVMGKIALVTSGILALKWILSGGHAHDRLEIIHSHAPLVKGLHASDLSSSGSSWMPIRQPFIPLVSKDPNLYKPFL

SEQ ID NO: 39202 - DNA, 2909 bp, DROSOPHILA
ccagcgattttgttcattacaactgcagtcagaataattccgagccggcactttcattaacttttctgctgatggcgacacatctgtgtgtaattctataattttccacccaatcagcattcatttcggtttcgatgcgctcgcctactaaatatgtatgtacaatatgtccaaatcttcgcgtgcgcaatcgaaagcacaagactggagaagatctcggctctcgcctcggtttcacagcttgtgccgatgaaagtgggcgtcggatctggtgtaaaatattattaagccgggccgccgatataaagactggaataattgcccagatctgctaattacggcaatgagcaatgaaattggccccctgcatccagcctgacggttgcactaaatctgcagcgaagctttgctttagtgctgcagcttgctggtagttttcaactgccgcatgcactcatcatgcatactacgctctgaatagccaacagctttgttgtactgggagaaaaacaccacgaaattatgtaaaaattctaaaaatagagcagaaataggtggcatggcccagctatcagattgagattgctcaccaacggcacctagcatgcgtttgcatatactagtaggacttcgaaattattggtttacaaaatatttggcgtttaccttgatgttgatagaataatataatctagaaattattattttttacctttattgcctaagctaatttttcaatacgatcattttatgaaatcacttcatgaaattaattgaatatttttatagagttaagatacttttcagtgtactggtgttggcagcaaaagaaacaccgactgcaacgctgcctggctaattgtggcaaggtaaagtgtataaatttggtggacgatctggcgcacaagatcagttggccaagagatttcctagcagctgcagcaaacggcatagagataactacgagagtgagatcacaaggattggagatacgcacagaatggaatcgcgtctgggtctgctcatcgccctgctgctggcggcctttcaggcctgggccatggaagcaccgtcgaactataatcagaactctactgagagtggactgctgcggacagtgcgtcatatctatgggcagtgtgcatatagcgaggacgttttctggtgctgcaagatacagggagttcgcctgctgggacgggctctgaaggtccctcaactggggattgtggatggcgttagcttggtgcggcgggaatcctttacccaggacacgcggagtggacgctctagcctgctcgagagccagctcagcaatcgcgatctcgagcacttgtcggggaagagtctggacgccctgctgctggagcggttcctcaactttgtccatagtcaccagctgcaggtcaacctaccacggttgctgcggtttggtgagcggaatgtccaggattggctgctgcacgtggtcggctactttatgccagccagcgaaagcgagggtcgcaaaaagaaggatgacaaaaagtatctgggacccttcattgccgccgttctgttaaagaccgctattctaaagatggcataccactccattgccattgtagcgggaaaggcgcttattgtgggcaagattgcgctgatcatcagtgctataatcggtctgaaaaaacttgtgggtcacgacggcggcgagaagaccacctacgagatcgtcaagcatccgcaggtgcagcagagccacacatactcgtccagccaccagggtgagtacgatacgggtggccatgacggaggatcctaccaccgcagcatcgacgacgagatgatgatgcaggacaaggcttaccaggcctggatgccccacgtggccgcatccccttcgcccgtcgccaagggatcccgataaagggagccgcggagttccttccggggtcagcagctctactaccaaagatcgaatgattccaaaaagctccacttagcccaatctatatgaatttgtatttacactcgacagccctccagtttaagtttagttatcgtagttattatgttaccacagatcgagcattaaaaagaaacgaattttaatttcattggtttttattttcggccaagggtgaagccgcacaaaactgccacgcccaaaattttgaaaaaattgaaatatttttatattaagtttttccctcttttttttgtatatccttattgttttattggctagtgatttctatgtatgataattgtgttcgattatatggacacgcaaggagtttgattttaatatctaaataaagccccgagtcgattttgtggcctctggacgtggctgatctgggtaagccgccgcctgatgcaggcggcgctttagtggctccatctggtaggcctggtagtactccatatggctgcccaacggtggttcctctacctgatccaactgcgagtatgtgtcgtgggtgggcatgctgcggtgccagccgctctcgtggctggagtgaaccaccacgtgctccgtgccactacctcctccactaccactgtgaccagtcgaacccttttttagactgccctgcgaagagaagcgtagcgccaacaatttggacggaactgttcaagggacagattctactcaccagcaatgatatgaccaaggcaatcttggccataataaaggccgagccggcgatgaggatgaccttgccgaggaacatttgggccagagtggccatcatgatcatgccgcccatcatcgccatgttcttgtctttgtccttctttttgcgacctgtttttttggagcattttttatttttctttttatacttgtctttcttcttttttttctttgattttttctgttttttaggcttcttcttcttagacttcttctttttcttttt

SEQ ID NO: 39203 - DNA, 909 bp, DROSOPHILA
atggaatcgcgtctgggtctgctcatcgccctgctgctggcggcctttcaggcctgggccatggaagcaccgtcgaactataatcagaactctactgagagtggactgctgcggacagtgcgtcatatctatgggcagtgtgcatatagcgaggacgttttctggtgctgcaagatacagggagttcgcctgctgggacgggctctgaaggtccctcaactggggattgtggatggcgttagcttggtgcggcgggaatcctttacccaggacacgcggagtggacgctctagcctgctcgagagccagctcagcaatcgcgatctcgagcacttgtcggggaagagtctggacgccctgctgctggagcggttcctcaactttgtccatagtcaccagctgcaggtcaacctaccacggttgctgcggtttggtgagcggaatgtccaggattggctgctgcacgtggtcggctactttatgccagccagcgaaagcgagggtcgcaaaaagaaggatgacaaaaagtatctgggacccttcattgccgccgttctgttaaagaccgctattctaaagatggcataccactccattgccattgtagcgggaaaggcgcttattgtgggcaagattgcgctgatcatcagtgctataatcggtctgaaaaaacttgtgggtcacgacggcggcgagaagaccacctacgagatcgtcaagcatccgcaggtgcagcagagccacacatactcgtccagccaccagggtgagtacgatacgggtggccatgacggaggatcctaccaccgcagcatcgacgacgagatgatgatgcaggacaaggcttaccaggcctggatgccccacgtggccgcatccccttcgcccgtcgccaagggatcccgataa

SEQ ID NO: 39204 - protein, 302 aa, DROSOPHILA
MESRLGLLIALLLAAFQAWAMEAPSNYNQNSTESGLLRTVRHIYGQCAYSEDVFWCCKIQGVRLLGRALKVPQLGIVDGVSLVRRESFTQDTRSGRSSLLESQLSNRDLEHLSGKSLDALLLERFLNFVHSHQLQVNLPRLLRFGERNVQDWLLHVVGYFMPASESEGRKKKDDKKYLGPFIAAVLLKTAILKMAYHSIAIVAGKALIVGKIALIISAIIGLKKLVGHDGGEKTTYEIVKHPQVQQSHTYSSSHQGEYDTGGHDGGSYHRSIDDEMMMQDKAYQAWMPHVAASPSPVAKGSR

SEQ ID NO: 39205 - DNA, 2604 bp, DROSOPHILA
tgatgtatgggatagaattatggtactgaatatgtgaacgagcctatgtgataatgggggcttatgggccatttgcaggcgcaaattgtggcttagtctgaatggcaattgaaatgtctttcagagcttggccattaacggctagccatgattgacagtggccaaaggaccgcattcggatggcttacgaatataatagagagtgactgtagcttatttctttcattgtctgcacgcgtccgaaactcgtatttcattcaacattgtttggttttctcatgtatgctatgagaatgctggcaacagatgatcaagcgtggatcaaactaaagtcatttaaagcatttattttttattttgcctaatttgcatgtgactgctttttcgactattgattatgattagctaacaactggaaaaacagtcttgcatctttggacgatttgtacactgagatcatgttccatctttctttttcattctcaactcaatatctgcttataaatttctttattccaattaactatatggttttgtaccttatttctaaaaatcttctaaatctaatttagttacatgtaagtgtatgtaaaacaattacagttttaaattcgttatatataaaatcgcatttcaattatgctctgcattttttgctttcaactatttaacatttttatttcatatatatttgtttttttttttagttttcactttgaatttgattttgtatcacagcttgcattttatttgcggttctattggcggcaacctggtcaactcagcattaaaactagttcaacgcatatctcttcctacgcccagctttaatggaaatcataaatttgatttcgggaatcttcccggccacaccggcttttatcagagcgctgcacaagtttttgcttaattgcggagtcactataatgagtcaaaagaccttgtttttggagggaagtgaagcgtgtgcgacacatagccactcactaagccacctttgatggggtttggtcagtcaggcagctttaaatcgaaagcaaacttggcttttggcattagttctacttgtgcctctcgagcgttcgcagtccgcaatgaaagtaagtgttgcccgacaaaatcattcttgaaaggatttaacacaaactgatatcatccaggtattcgtatgtcttctggctctgacagccatcctggcaaccgccaacgccggtctcctcagtctgctcaagggaggcggtggtggtggtggcggtggctatggcggcggatacggtggtggctacggcggcggctacggaggtggtgggtatggaggcgagagcaccgtgaaggtcattaaagtgataaccgattccggagctggcggtggctaccgcggaggatacgcaggtggctatggaggtggctacggaggtggctacggaggtgcctacggtggtggctacggaggtggcagcactgttaaaattattaaagtgatcaccgattccggatccggctacggaggtggatacggtggaggtggctggacctcgggcagctacgggggcagttacgctggtggctacggtggtcagtccggatggtggaagacgaagtgagcagatgaaccactctccttttagatgtagtccggatataaactcgtttatgtacctgaaaaaaaaacattccatagccaagtaacccgaatctctttaatgccagttatttccaagttagcgaaactagtttgagatgatccgcagactgcttggcgaactcaaaaaaaaataaatcttaatttaaataaataaagagcgttttttcaaccttgtaagccttacaataattattcccattctcgatgcttctatattagtaaggaacacattctttaattaccataatgtatgtaaggcacaatgcctttgttatcgctattttccaatatgaacttgtaaattaacttttattcggacttttaaaactagatgtgtttattgtgagtggaaggcttctaaccttcagaagaagccattataatgcatacgctgagatttaatcgcagctattaaatgggttttatggccatccggtttttttgttttttatgtatatttcataatatgcattaacaactgcttatttattttaatattttgtgaatttcttagcaatcgttatcattgagcgttaagcagctcatatttaaaaaagatatataaattgttataaaaaaattttccacaacagatacaagttcctacccattggcatattggaatgggatgaccaatttttctattggagggttttaaagtttgggtctttatctcagagtttaaaaacgctacgaaatgaagaattccacgtaaaatttggctcatttaatttaatttaattaatttctggccattgagaaggtgtttcaattctggtgagaaattttcttggaagtatctcggatttctagggtgctatgtgacctaaattaggaaatcaagggtcagcagaagctgacgcttatcaaaaaacctatttgttatatgtgtttgttatgtactgtattattattgtaaactagaaaaagctaactatagttagccggcgcgcccaact

SEQ ID NO: 39206 - DNA, 426 bp, DROSOPHILA
atggggtttgccatcctggcaaccgccaacgccggtctcctcagtctgctcaagggaggcggtggtggtggtggcggtggctatggcggcggatacggtggtggctacggcggcggctacggaggtggtgggtatggaggcgagagcaccgtgaaggtcattaaagtgataaccgattccggagctggcggtggctaccgcggaggatacgcaggtggctatggaggtggctacggaggtggctacggaggtgcctacggtggtggctacggaggtggcagcactgttaaaattattaaagtgatcaccgattccggatccggctacggaggtggatacggtggaggtggctggacctcgggcagctacgggggcagttacgctggtggctacggtggtcagtccggatggtggaagacgaagtga

SEQ ID NO: 39207 - protein, 141 aa, DROSOPHILA
MGFAILATANAGLLSLLKGGGGGGGGGYGGGYGGGYGGGYGGGGYGGESTVKVIKVITDSGAGGGYRGGYAGGYGGGYGGGYGGAYGGGYGGGSTVKIIKVITDSGSGYGGGYGGGGWTSGSYGGSYAGGYGGQSGWWKTK

SEQ ID NO: 39208 - DNA, 10290 bp, DROSOPHILA
cgtctcgataaggcaattaagcacactttgggcaactcaattaatgacttgtcattgggcgcgccgactcataaatcacacgaacataagggactacgtctggatgattcctcctgggacaccgggctgtcattcgcatttttgtcaaggctgttatctcgggcctaacaattttgcacccattgttgtcggcgcggaaaaaaagtctatgggcatggcccgaaagataatgagccatgagaaatatgatgaatacgaaatgggagtttatctagtctgcgatatgctcgagtgcccgctgagtgaccgacgtgggtggaagccacccaaactccacgccactccactccgcttcacttcatccaatgatgacgatggtgacgctggcacgcggctgtggcaggcagttccacgtggctgcccatgtgcagtgtgcagttcaattaggagatgcgatgcgacagccacgaacttgcgacgacaagctgcactccgacagccccaagttccactttcttttcacgctcttgcctattaattgaaaggcaacgatggtgggccattaagcccttacccgcagcgaaaacgcatggcaattcaacttggccagcttcgcggcaaaatgaatctcagttttgactgcctgacatcacaatttgcaatgcctgcggagcaattagagcacagaatgacacgttttgtgggaaatgacaagttcacggctcacataaagccataaggcctgacacgggcgtttatggccaaaagagagatcgttcgattagcagactgaatagatactttttaccactactatactatgctctcagttcgtgttaactaccatattcagtatctgatgataactacagtttacaaagccttaaataccattcttgttaatcctttacactgacctattactatgttatatatttaatgatcgttccattattatccggtatctggtttaatatccggtataatagccatgaaggacttaccgactgagctccgcggaaatgaaattgctgtgcggactgtaggtggccggatccttgtacatgctgcacacaattcgctccttgcagaggtcgttttttactccgagctgctcgatgattttgtcgattttcagcagaatgggactgtagaacggatcgtagttgagcggatacagcggctggaaagtcacaaaaagcgcacaagttattcatcatggtagcagctgagagcggcgaatgtgggaaattgcaaacctgtccatcctgcacgaatggctggtgctccagtatcttctgctgctgctggatgagccgctgctcggtctgaatgcggatagcctccttcagctgggctgctatttcaggctggaaaaaaatggaggacaagaggagaaacatttcttagctatgcactccaaaaaatatagtaataataataaaagcggctgcaggatataacattttagaaagttcttcatcgaccaaataattaaggggtttccctttgtcaaaaacaatattaaaaagaattggatgaatattacaatgaaataatggtgattacagaaaccggaaatatatataatttaaatttaagattgtagactatagtgttggttaatgttccttcttccaggtaggagtttgaagagtgttttaaactgattttattttaattttatccaagtaattcgaaaacagtaggattagcttcttcgtgaaatctaattatatcaaaagttcaaaactacatatataaataagctttaataacatgatttgcgaccaagtcgaaaacgtagcttacacattacgtgggaagttgcaccaaatgccagcttgtgtgaaaagggctgagtttgcgtgagctgctaaccttctgtggcggacagctcatcggaccaaactaaacccgctggcacactttcccgacaacttcgtaattcccatcatattcggaacttggttatggcgaggtgtgctcatttaattgagctgaacagcggggtgttttgcaagtcaaagcattgtgcactctgccgggcattgcaatggcaaagtgcattttaattattgcttcgttgacaagccgagtgcccgaaagccaggcccaaatggccggcattttgctcacttgaaagtgaaaaccgtcaacgtgtctcagtcagtctgttagtcagtcagtaagccggcttttaggtttgttggactggccaaactgtttgccgagccattcagcttgcaagccctgcagtttacagcttgcagtctgcgaagtggtgtcgctgggcaaagaaagagagaaggagtcaccatacacatacacacacgtccgccatgcggacaaggcaatttgcatcataggaaaacaatttgcacttttgaggaaagtgtcaataaacacagccatgtgccagaccattgtttgccagtgaaaatgcagcagcctgcttgagtgcgttgttgtctagctgtgcaaaggtacaaccggcaaatggaagcctctaatgatgggaccagaccaggagtagttggtggtggagtccggcttctcggaaaagcgctggctgggaaagttacagtactcgggcgaccagtcagcaataaatatatataacatttcccaggtgttttccttaggaatgtttgctacattgtttccctcgctatatatatatttatcccaaaaaatatgcaggtgtctcagtaatctaaatgtggaaattgcataccaattttagtacataaagtccaacttgtgtttaacaaaatgactttgtcttgggaatgagatggctttaactcagaaagtaggttcaatgactgccagaatgtcgtaaataacgaacaaaatgcggagatataaaaaaatttttaaaatatccttttgtttttggtatcgtttccagtatttaactgagaatcggttttcacccatttactttctgcaaatttctggagtatatctgaacccattttattagactttgttttgtgtgctttaaatggaaatgacgcaactcctgctaccaccaataaccatatgtgggatatctgatttcacagagtcctattttttatgtatgtacaataaatgcacatatacaaattccgtttggttgctgggaatgtagtagtaaacatacttaatggtctgtaatgtgatacgcaccgaaagttgtggctcctgaacagcgtgatttggctgctgcggcggctgctgcggatgctgattgttgcgggatggatcgtactgcgcggcaatttgtgcggctgccgtgagtccgggaacattttgcggcggatggtgtccctgtcccgggacgtacaccggatggtgctgcgtgtgtgccggccttgagctggaaaagcgatgaaaattaggtgccgctggcaggtgtggctaggtgggtgagtgagtggctaagtgggtgggtgggtcagcctcggtggggcaatagtgccattggagctctgaatgaaatttccttttcgctgctctttttatttagcaacaattgccaaccagcggagggcgttgtttggctttcattaaagaattttaattacatttggataagcgggaacaggaaggacatatggagtggtaaaaaaacaaacagataccggaaatgggtctttaaacataagtaacaggctaccagaaaatcgatagaagttcatatagggtcaggcaaattgattgttaagtattaataaatattaaagataatattttcatggaggctaaagcaagaaatggcataaaaagcatttaagtcttacataaaagcaaatatcaaacaaaataagcatgggattttggtttgcagtgcaggctgttgtaaagcaagacatcagaaaatacgaggacttcccttagggttagtagactatattaaggcgttatttatgggtgtgtggtgcgttgagtgtttttctgtggcggtgctagtgagtttccatgtgcgtgggtgtacttgtttgttggttttcggttgcccctgagtggcatgtacctttgtttgtcctgactttgaaatgggtttaaactgtgactagaggcttgtactttctgagcacttaattgcatctgaagcttgagctgttgctgctgctgcgtctgctgctgtttgagttgggtgggtggtctcgcctgctgggtgacagaccatctttgatgaggctggtgcgtctgatgttgtgcctgttgtgtggtgccaaggccccaagcatgcaggaccccggcgtcattcgctgggtggggcttaaagaaatgggcattctcttctatttgtgcaacgcgatttatatcgcctatgtatctatggttcggtgatgcatgtcgcatgcgtgtgtggttcgagagtggtttagaaacaagacagagacacagacagttacagtaacagttacggatgcggatgcggaaagcgtgagtgctgtctagagaaacggaacttactcggatcccaagccaggaccgctgttctcccaggcgccctcgaagtgctcgaatccgggtccatagctctcgtgcaccggagcgccatggagataggcggacggatggcccttcggcgggtgggtataaatgatttccggaaccgagtggtgctcaccactgtgccatggcggaacaacctgagaatcagagaaaaataaaaaatattaatcaaacgctaatagctaaaattgtagactttactatcttttgctggaaaatatacccttggtaatttatattttttaccctcttcggaaaccagtatcaattattattttaccttttccatttacaaattttccttaatatatctagtttgatcataaattaatcaggaataacaatcgaaagcttttagctgtgttgttctacggagtataaaaaggatatatattatagattcgagatttggattataatttgtattgcaagtgctgctaagagagtctcaacgttcataatgtgtaataaaacagtcggtgctactatacaaggcttcgacatgacatttaataaactcggcagcgaaacttttctcattgctctggagggcttccctttcgagtgcttcacccaatctcgaaatcttgttggctatttatagtcatgtttgaaccgaccaaataatacgcattattttggcgactttgtcttgggaatgagatggctttaactcagaaagtaggttcaatgactgccagaatgtcgtaaataacgaacaaaatgcggagatatgtatgcgactgtgtcattgcctggcaattggactcaaggttcaagttctggctattattttagatttttattgtgcgccaagttcgaatcgtatttcatgctgtgcggcctgaaaacttctcccagcaaagagttgacaaacgctcacaaacagacgacatgttaagtgggtgtttctgggtcctcatggctggaaagtctttcactttgtgatttaatttaatttacacagagtgcgaaagcagacagggcaaacagcgagcagttttaaagactgcatgttgtctggaaaatatgcgcatttcattggccacccgggtgtaaactcacacttggaattcatatgagctactcccctatcgatattaaatttttttttattgccgccaatgctttcttctttcagcacctgaaatgttaagaaattcatatattccattggggaacaagatgagctgttccccgtggaattgcactttctccaactgtcgtagtaaacgccaataaacgacgtgtgtaaaggattataattgtctaagcggtcgttttatgaagtaaactcaaggggatatccgactcgagagaggattgccgtatgcaaacatggagacccggattatcccgacagctcaggccctggtcccagttaaatttcaactcctagcggcattttcgattgcgtatgcgagcataagtatctcataaatacgagtatctacgcgtgtgcactctttcgtgagaaaaccgggtggcgactgccttagccatttctgttccccactaacggcccaattgaaatacggatttgatttgacgacatgtcaagctgcgagctgtctgcgtcatcgtgagctcatttcgagatttccagggcacgtgctatgccaacttggagtcggaaaccttcaatggaaatacttttcaactggcggcggaggacgcgcttttagacttttctaattgaatttccgggggcgcgaacaaaagagacttccgaccggcaagcctatagacaacactgaatctcatcgagattattaatgaaatttctccaaaaatacgcctgaaatataagcggcccggcccaaaccagttagcagaatcaaagaaattttgtttaaccgaatgtcatatcttagtgccatcacaatgtattcgcttttcgcgttgtaaaatgtacacacaacaaccaataaatgttgactaaaacgactaccaataactattaaaattcattttaaaaactttgccaattaaaatgaaaagattttttacgggcttttaagctgcaatcaaactaacttgggaactaaaggaatgttttaagaaatacttaagttattaaaaaatcctatggttttatccgagacttacctacatttttggcaagcaagtgttactattttaaacttagttaagtaattatcatttggttctctcttgtccctaattttgccagtcaactttccagttgcaatttgtgcaatatcatcttccacttacgcttaccgtgtgatgatgatcgataaggtgatggtggtggtggtacttggcgggtgcgtgataggattgctggtagtgcgagcagagcttgaagagatgcgacagcgctgggaacaggaagagcaggaactttagcagcagcttcttggccgcaccaactccgatgacgattggcaggagccagaacaacttgatcttgatgattttaatgatcagcagcaatgcgaggaatgacagcaccagtttgctgcgtagaaatttttctggacaaacgaaagtagcaatcgaataatcagactattggatgccgtttggccagagagtgaaaacggcctctactgcagaaccgcatctgcatctgcttcagcatatgcatctgcaactgcgtgatggggaaacaatttgcgagtattacttacgtatcttcttctggattatcgccccggccagtcgggctttgactacctgtttgggaatcagctccagcttggcgatgattccattgccttcaatggctcgcggcgagatgcgaaaggtggcgccattgaacataacctcaggcaggtccacctctagatcgtgggtcatggcaaacttgatgctcttgccatatagagcgctggtcacttcctcgatcggggtttccgcactggctgcttgggaatcggggtattagagaattataagagtgaaacatttatgagtgacgcttttgggttaatgaaagttttcctgaaagcgatttccaccactcggcggcatgctggatgaggatgttctagcgcaacttgaagtcaatatgcacatcctaaagtttccgttgtacttaaaatataattttctatttacatatatgcgaaagtggaagttgcgcgcttccgctttgaaaactttttcatgggggctaacatttaaacagactttaagcagctaaaattagacttaaatgtgaattgccgaaacatcttcataagctaatttggtagatttatccagtatccaaaaaaactgcagaaatcaatgagtactgcccatatttttttatcctaagccttgtattttattattagtcaatactcgacactaaaaataagctaaatatttttaaatctatcttaattctaccgctttaattctttgatacttgagatactgctagctaatttagcaagttcctaatggtttctagccgcttacataattcttggccgacccgatggctctttatggccgctttttataatgctggccatgctataagccaaagaaaacatctgatgtgatgcctagtaaatagccgcataattgagagcagtcaaagcgccgtgactcacataaacgggagatcgttgccgcagcagatactttgctgctctctggcgcagctaaaatcgtaaaaaatcaaatcaaaacgcggcaagtgaaagttactggaagtggcagagccatttttttggacgtgctcgggtatacatagctatacaaaacgagaaaaagaatcgatgtgaaaaccgatcgcacacattaacgcgagcataggcaagggctcttacataagttgctgttatctaaagcttaaaaaattcctaatttaaaagccaggaattcgttgtcagctaactgtcttgaattaaatatatgcaatgcatagaggaacattatatgcggttttactttgagactagtaatttctaactatccaacaacttaaatggcaaaactttaaagcaaacatttcaattcgtagcatctctgtagaaactactgtatccattccatatccaataaaactttggtatttatattttgatcagttaaatttgatcttgtgaccctaggcaaaaaatcgaacccgtaaaagcacttagatttcctttacacttaccggcacgtgcctccgagtgctcctccttctccttgtccacttggtagtccacttgattcttgaagaacttgagcctttgggtcacattcacgtcctgcacatccagaacgttatccaggtagctgaagacgttcttttggaagcaagatacatctggctttagatagcaatcgcggacaaggccgtcccacagctcgtttccactggcgaatcgccgggccagtctaaggagcagggaatcactgggagccattttgtccatcggcttcctcgtgggaaacttggtggcatttatcagaggctgccagtcttcttccggcggtagttccgtcgtcgtcgcaagctcgacatcctctggggattccgttggtgactcggtaaacatttcttgctcctcggttggctgcgattccacggtcggatggcttaaaggagtggtagagagatgacggccaagacgaccattccgagccgttccatccgctttggcggccgagtttattaggcagatcaagaggaggaaaatcaagtggccactcgttgatctggccatgctcactggatggcaggtgcgatttctactggaggatgtccactgttgctggctctcacctgagctccgattatggggcaaagcactgtatgtgttgggcatttcagtttcgttttatttgggtttcacctagccagttagcactgctgacggcttcttcacaccttcaacctgcaattgcaaatgcaattgcaagtgaaattgcaatgtcttttcctattcgaagtgcaccttggccctgcaatttaagtgcaacctaacagtttatttagctgatttcaccggggtacgtgtttgggaacctttcgttttagcgtacacaataggcggctttattggcgaaaccattagccaatcgacaaatcaatttatgaggcactcggtttaacacgctaactcaattccattgattgtcggacggattttttcagcagctcaattctttttgtattgattttaatgtactttcttcgatgtgtttgttttcgactggtttgtttggaatttcgctgtcacatttagcgcgttttctatttgctctagtcggctatctagctacctgcaattacttcactgcgacacacctacggcctaacggtttcgtatctggaagttacttgtatctcgtggatatgcaaatcacctgttcgcgcgactcgtgtgcgcatgcgtgcgcgtctggttaacaactgagcgcgtcgtggcccaaacagttggccaagatcacggccagacttaaggcagaccggtcgctctctagttttttgctcttctcaacggttcggtcggttgtcgatgactttttgcagtgcgctatcggttgtatcttgtagctggtttatggtatcttctcctgcattcacacgtcgctcttcctagattctttcgccgcgcaaaaccttaactgtatttcttgccgctgctgaaagttgcttcgtctacactcgctcctctatgtttgtttatccattttccatttagcttcggattgcttcgagtgcagtttgtctgctggtttgatgttaattttccttgtactttttgcgacgctcttccctagtcggcgcttttcacggccatttggtgtccaatgaacgggttt

SEQ ID NO: 39209 - DNA, 2181 bp, DROSOPHILA
atgcccaacacatacagtgctttgccccataatcggagctcaggtgagagccagcaacagtggacatcctccagtagaaatcgcacctgccatccagtgagcatggccagatcaacgagtggccacttgattttcctcctcttgatctgcctaataaactcggccgccaaagcggatggaacggctcggaatggtcgtcttggccgtcatctctctaccactcctttaagccatccgaccgtggaatcgcagccaaccgaggagcaagaaatgtttaccgagtcaccaacggaatccccagaggatgtcgagcttgcgacgacgacggaactaccgccggaagaagactggcagcctctgataaatgccaccaagtttcccacgaggaagccgatggacaaaatggctcccagtgattccctgctccttagactggcccggcgattcgccagtggaaacgagctgtgggacggccttgtccgcgattgctatctaaagccagatgtatcttgcttccaaaagaacgtcttcagctacctggataacgttctggatgtgcaggacgtgaatgtgacccaaaggctcaagttcttcaagaatcaagtggactaccaagtggacaaggagaaggaggagcactcggaggcacgtgccgccagtgcggaaaccccgatcgaggaagtgaccagcgctctatatggcaagagcatcaagtttgccatgacccacgatctagaggtggacctgcctgaggttatgttcaatggcgccacctttcgcatctcgccgcgagccattgaaggcaatggaatcatcgccaagctggagctgattcccaaacaggtagtcaaagcccgactggccggggcgataatccagaagaagatacaaaaatttctacgcagcaaactggtgctgtcattcctcgcattgctgctgatcattaaaatcatcaagatcaagttgttctggctcctgccaatcgtcatcggagttggtgcggccaagaagctgctgctaaagttcctgctcttcctgttcccagcgctgtcgcatctcttcaagctctgctcgcactaccagcaatcctatcacgcacccgccaagtaccaccaccaccatcaccttatcgatcatcatcacacggttgttccgccatggcacagtggtgagcaccactcggttccggaaatcatttatacccacccgccgaagggccatccgtccgcctatctccatggcgctccggtgcacgagagctatggacccggattcgagcacttcgagggcgcctgggagaacagcggtcctggcttgggatccgaatacataggcgatataaatcgcgttgcacaaatagaagagaatgcccatttctttaagccccacccagcgaatgacgccggggtcctgcatgcttggggccttggcaccacacaacaggcacaacatcagacgcaccagcctcatcaaagatggtctgtcacccagcaggcgagaccacccacccaactcaaacagcagcagacgcagcagcagcaacagctcaagcttcagatgcaattaagtgctcagaaagtacaagcctctagtcacagtttaaacccatttcaaagtcaggacaaacaaagctcaaggccggcacacacgcagcaccatccggtgtacgtcccgggacagggacaccatccgccgcaaaatgttcccggactcacggcagccgcacaaattgccgcgcagtacgatccatcccgcaacaatcagcatccgcagcagccgccgcagcagccaaatcacgctgttcaggagccacaactttcggtgcgtatcacattacagaccattaagtatgtttactactacattcccagcaaccaaacggaatttcctgaaatagcagcccagctgaaggaggctatccgcattcagaccgagcagcggctcatccagcagcagcagaagatactggagcaccagccattcgtgcaggatggacagccgctgtatccgctcaactacgatccgttctacagtcccattctgctgaaaatcgacaaaatcatcgagcagctcggagtaaaaaacgacctctgcaaggagcgaattgtgtgcagcatgtacaaggatccggccacctacagtccgcacagcaatttcatttccgcggagctcagtcggtaa

SEQ ID NO: 39210 - protein, 726 aa, DROSOPHILA
MPNTYSALPHNRSSGESQQQWTSSSRNRTCHPVSMARSTSGHLIFLLLICLINSAAKADGTARNGRLGRHLSTTPLSHPTVESQPTEEQEMFTESPTESPEDVELATTTELPPEEDWQPLINATKFPTRKPMDKMAPSDSLLLRLARRFASGNELWDGLVRDCYLKPDVSCFQKNVFSYLDNVLDVQDVNVTQRLKFFKNQVDYQVDKEKEEHSEARAASAETPIEEVTSALYGKSIKFAMTHDLEVDLPEVMFNGATFRISPRAIEGNGIIAKLELIPKQVVKARLAGAIIQKKIQKFLRSKLVLSFLALLLIIKIIKIKLFWLLPIVIGVGAAKKLLLKFLLFLFPALSHLFKLCSHYQQSYHAPAKYHHHHHLIDHHHTVVPPWHSGEHHSVPEIIYTHPPKGHPSAYLHGAPVHESYGPGFEHFEGAWENSGPGLGSEYIGDINRVAQIEENAHFFKPHPANDAGVLHAWGLGTTQQAQHQTHQPHQRWSVTQQARPPTQLKQQQTQQQQQLKLQMQLSAQKVQASSHSLNPFQSQDKQSSRPAHTQHHPVYVPGQGHHPPQNVPGLTAAAQIAAQYDPSRNNQHPQQPPQQPNHAVQEPQLSVRITLQTIKYVYYYIPSNQTEFPEIAAQLKEAIRIQTEQRLIQQQQKILEHQPFVQDGQPLYPLNYDPFYSPILLKIDKIIEQLGVKNDLCKERIVCSMYKDPATYSPHSNFISAELSR

SEQ ID NO: 39211 - DNA, 2156 bp, DROSOPHILA
ggattccgatgaaaatcggtcaaggttcaaggattttcaattattcggatttattttgcaatgtaatgaaatccgttgattgggcacttcaaaccgaatacgaaacggccaataattttgcactagaaataggcttaatagcttgcaatggaaacttgactcctgttctgtatttcagttaaatcacaccttttaataataaatcactactcgtgaagtattttctcaaaatccctatatagatattcagttgcataactgaactaccattctccaccaagtggcgatagcagtgacccgaaagaaccaaaaaacattgcatacgatgagattacaagccaccaggatgcctaatccttttaaatgacatttcgttattcaatccgtgttccagtgcggatctgaaacaagaatgtcctggcagcatttagtcggcttgttttgttgttcctgattcctgattcctgaatcctgtaacctgcaactcgaatgctgaatccagatgactggaccattacggcccggaatggaaagataaccgatttgctttcgttgctctggtcgcagcaaaaacaattacggcaaatcagatgacgatgacaatggccggggtctaaaaatacaaccacggcaacgagatacggaacggagcagctcgatttcgttgtatcccgtatctgtgagatagatgtgttttaaagtaagtaactaggcgagcttccttgccggtcggccatccagctatcagcccatcagtccacaatcaaaatcacccaaacactcaaaacaccccaccctaaacaacaacaacaacaacaacaaacaacagcaactggaattcctgggcaaaaaaaaaagtgggcgagccagtaccaacgctatcaaagtcgttgaaatgaaaatgaagatgaaataaaatggaaagcacaaacagtgaaaaaactaaaattttctatgctgtaaacgaaattgaaaatgaacaagcggagcgaacacggacatggacatgggaagcggacaccgacacagagacaacagcaccaataccaacacggacaaggacacggacacggacacggacacggacacggatacggacacgaccggcacccggacggagaccccggacccgaacccagacctccacctgcactgagcaaaatgtaaacagtcttaaatggatcagggtggcagagcgatcaaaagtaaacaaaaggaaccacaccaattaatacacaaacgaatttcctctaattgccggatttccaacaagaagcatccgctttttgatggctatacggccggaaaatacacatccatgcacttatatcttgtgaaagatatattggctgtactttaagcgtcgtttgcttttcgaatatattgagaaatcattaaagtcacaaatgacttaagggatattactctaagtaaggatatccgaattaaatccggttttcgatgacaaagatacaagtcaaaatttttaatatttaaatttataattactgacacgattgaaacattcttattctactttactacgccaaacgcagtggaatgtttttccagtgtggatatggtttgcgaacctaacatggaatgtatgggattgtgtgcacttcgaagcgttggaggcgttggcaaacagcgctgagtgcctggatgtaagagtcaatgtgttggggtgtgtgtgtgtttgtctgtgtgtgtgcagattggaaaagtctgtgtgtgtgcgtgtgtgtgctgctgtacttgtgcgtggggaaggtgactcaatggtttgagttttttccgctcttactttcttgtcttgaaaactatgctcctcgtgtagtaatgagccggcgaatggaaaatggagaacgctgatgagctgcgtcttaactaaccaaaattgggtggtgagtcggtcatgaacaggtgggcgttgaactgggggcggggcagaaaggggaaaaaccgacagtcctcactaggaatcgcttaaaagcaaattgcgctgaaaagcaatcagcgcataagtgcaatacaaatacaaacaagtttattgcttttcccgttgtcctcgcggtctttccggtcaggatgccttctaaatggatgcgggggcgggcttagagccggggcgtggcatgccagagggattgcat

SEQ ID NO: 39212 - DNA, 156 bp, DROSOPHILA
atggacatgggaagcggacaccgacacagagacaacagcaccaataccaacacggacaaggacacggacacggacacggacacggacacggatacggacacgaccggcacccggacggagaccccggacccgaacccagacctccacctgcactga

SEQ ID NO: 39213 - protein, 51 aa, DROSOPHILA
MDMGSGHRHRDNSTNTNTDKDTDTDTDTDTDTDTTGTRTETPDPNPDLHLH

SEQ ID NO: 39214 - DNA, 2228 bp, DROSOPHILA
tggcacatatacagctacagatagaatgcaagtgcgagcgagatgacaatggaaccgcaaggcgtggaagacgccgcgactttctacgtgattagacaaagaaaagggttagaaaatgtaaattacgatacatatgtatgtatatatgtatgcgtgtgtgtatgtatgtagattccggcatgggcctcggaatttctggttcccgtggttcggggacgactgaatcctagcccagccccgttacatcacatcacatgtcatccccggggaagtttgtcaaccgtttgacagcgtcggtcgtgatcaggttcagaaaaatgaatgtcctgggctgcaattaaatgtgaataaaatgtagaagttatcgggcgctgaatgttggatggacggtggggggaaggaggggggccttgcgcgcttttcttaaaggttgcgtaattgattagcccgcggcgcacgggacaggattttccattttccttcgtactcgtaggtgcccaccaccaagcgttcgcatgatgatgacccatgtccaggcgtcgctaattgtgacccagacccaattatgggaaattaccattcaaccgaccccgctctgtcgaggacctaaacggcgggtatcctccatatggcgtgcaaaggtggatcgacctataaatatgtatgtttgtttaactaaaaagtcatcagtttatcggttctacgcccaaaaatggatatttttgaatatctcgaagtttgggtggagtaatatacacttaatacctagcttaatattaatatggtaatatttaatatagttacttaatatacttagtatgtatatccgtattgcagaactggttaagtttcaactatctctacaaagtccaccattcagaatgagagtagagcggattccagacgtctggtataactattcaggtatgtacatatgctaatacacatagatcagtaccatgataaccatgataacctaactgcatactttcgcatagtaatggcttgcatcaacgatgatccgccgctactaatggcagatgtcgacgaggaatccgaagagaatgatgtggaacctgaggacgaagtttactattacgaagagtttccgaatatcgatctaatggcggatatgcccgactatgaatccccgattagtgattccgatgatatcgacttatacttctggcgcttcgaatatccagctccagctccatgggatgcttgaaccacacattcggtttgaaatcggttttgtatctgctgaataaaataatctagctagctggcatttgggaaaacgaattttccaatttaagaaaatggcgcacatcacctcgcattcaccggactcgaaagtgctaatgtgtgatgttcttttttggtataatgaaaggggcacttttgcacaccgccaggcaaaactggagcaccacaatccaccgagtgccgagttctcattatttttcgcacgttttaaatgctgattgcgatagggattgggtatcgcaacccttaaccccgcttaacccgcttaaccctttccaaccgaatcgatatggctgtaaccccggcggcggttgtctgccgatgctgatcctgatgctaaacgtattaacccatgaccgcttcagccattgtttattgcctaatttgcggttaaattttgatttcggcacaatgcatacgatttcgtttttgatttcacatttttttttttttttagacagattgagatttatgtgtgtgcccttgtttgccaaatagcaattcggtgccgagtgtgcgaaattttattttatttcgtatattttttgcacgccgtgcgcagcgataaggaaacacaaaggacctcacaaggatgacgtgagaaagtgcccaaatcatgagagagagggggggagggggagatacaaagtttagtcgaattatcgattggtattgcagacctcttctagtacccactaatatctaaaaaaaacaagcagctctttatgattgaagatggatctttactaacatcagcaactttcagtgtagctctggtatcattatcatatattgaacgctgtagaattgcatcttactactattctaatattaggaactctccgttcgctttaggatcattatcattgatcttatatattgagaagcgcagtcttggtcctttgaacagctactctcataacccttcaccatcgcggaaacgtaataaacgtaagtaa

SEQ ID NO: 39215 - DNA, 228 bp, DROSOPHILA
atggcttgcatcaacgatgatccgccgctactaatggcagatgtcgacgaggaatccgaagagaatgatgtggaacctgaggacgaagtttactattacgaagagtttccgaatatcgatctaatggcggatatgcccgactatgaatccccgattagtgattccgatgatatcgacttatacttctggcgcttcgaatatccagctccagctccatgggatgcttga

SEQ ID NO: 39216 - protein, 75 aa, DROSOPHILA
MACINDDPPLLMADVDEESEENDVEPEDEVYYYEEFPNIDLMADMPDYESPISDSDDIDLYFWRFEYPAPAPWDA

SEQ ID NO: 39217 - DNA, 4741 bp, DROSOPHILA
ctgcttcgagacgaaatgggtgcatctttcaattgtcaattcaactggcgacgagaccagctggttgaatggacaaaaagagggaagaaacgagtagacaatacacaatgcgacccatccatttggcttagagtgtcttagggatcgtcgtcttgggccacagatgcaaatgtcacccacacccgaccattcacattcaactggagcagctgcatcagagatttcgaagggacattgtgcaacgggcgaaaggatttcgtatggattgcagaattcgcctgcaatacgaaagcaactgctaagccaaatgggatgggtatttggatttggattcggaactaagaactaagaacttaaaatttagaatggaatgggattatcaattctacatacgctgtccatgaatggaactctgtgaatggaatggcacacgactcagtcgcattagatgccacctcctacggtgtcgccgtcgtctcatgctaatgaggatacctgtacaggtagcacccagttgtgcaggtagttagttggccagttcgactcgtaaatcacaacacacgacgggtaggcgttggtaatcctttcgacacttaattagttcaaactgcggctaagctcctagcctaagaagcattgcaatcggcattcgttttggatggaaccggacgagatctgaaagagattaggccaaacgagatgagttcatcgagcagttgtcagttgagtgcattatctcaccaaatcctagtcgtggaaactcacaccttcgccaatgctaaacttggactaccaccaccaggggggtttttaagtagattagcagaacgagtttagatatagttttatagaaacttttattttatcaaaatgtgtgtaaatttacaaaacacagtgtgtaaatggtggtcaaaggtgacggtgactagtgatgacttcgaattcgatcacaaatattgtttgatattcgaaatgcttttataataccatgacgaggtatttatgatttgacagtcttcttttggtttcgggtggattcttttgatggattctctcctggtttactggtcgggatcttcagcatgcttgctgagtggcaagctaataacttcgccaggactggaattaaaattccatacattattttgaagggttgctggtgctgttcctgatgaagatgaagatggagatggtgatagagatagagatagagatagagatggagatagagatagagatggagatagagatggagatagagataaagatggagatagagataaagatagagatggagatggagatgaagatgaagatgaagatggagatgaagatgaagatgaagatgaagatgaagatgaagatggagatggagatagagatggggatggggatggggatggagatggagatgaagatgctgatgccagcttatcagcattttgcttggccatatcgatttgcaatgatggtgattcggatgagctcaccacatctcgatttagtttgaaattatccttggccatcgatgccgctggtcgcacattatatggcaaccatagggacggttttggcagcggattggatatcggcgttgccatcttgagtacagcatctaatgcgttggaacgcgaaggaacttctgcagcgggcttggatatcggcattgactctgctgcgttgaaacgaaaaggagctcctgcagcggaatctgtacttgtttgggttggtgtttctttgttaattccatatgatctgcgctcgaacagattgctttttgcggaaacatggggatttcttttcaatgcggcatgattcacagccgataagaatgtgctcaacttcatgggctgcttcttcctgcgcgctttgatgttcacttccgaacgggaaacacttggcgacggaggagctcctggttgagatggcgaaggagttcccagcacatcggtcagttgataaaagaatttggtttcttgagccaagttcccaagtatgccacccgaaacggtttggttagccggttgttcggttgaattggattgaatagccaacgcgtttttcccattcgagttcttggccttttcctttgctttttcggcacgcttcgcctccttttgggccaacttcgtgagtttgatctgcttttcaagggccgtcttttgtttcttgaagcgcctcttctccttctgcgatttggaacgctttgatggagtactaacatcgtcgatggacggatcatcttgctcattagtgttctcgccgttgtcatcctccttatccggctctaccagaaggtcaaacatgttcgtccctagagttttcaaatcaacaaatggcttttttggctgcacattattgtgccctaagggttttttaaacactggtggtttcaaaacattttcattgagcacattcttttctctctgcgatggcccagaaatattacgttttttgaccaccacaggcgtgaattgggaactcgctggcgaccgaggcgaattgtgcaggaccaaggtccttggtggatttggttgtataactttatcgtatgaccgtttgtttttgtttatcgatggtagagcagaattgcgtttttctgtggccattgatcgacgctttgaatcgttatctggtgtctttttgtcatcagatttttgagtcatcttatgatcagcatttgagttcaatgaactaactaatcctgattgctgttggcgatttttagcgattttcaaaacagatgctactgattgctcctccgctgtatggcttttcggtggcgtatcgttcgagttaaatgaattactgacatgatcctttttggcagccaatgggggccaatgattcatatagacctttggattcttcggcgtctgaaaaacaattatgtacgtagcattacatgtatgtagagaagctagtgattagacatattttgtgttaaagcttacattgcttttgggcgactccgaaattcgtaatgctttcatgtttgcacagataatatccagcgtagtttgttttacagatgaacggcttgcattggtgttcgttggctgtggtacctgctccggcaaggtgttgatggcatgtgcctggtcaattggcttcggatggtcagtgatagtgggttgctcagtttccgcttctggtgttgtatcagcgattggaatctttgactgctgaatattctttagcttgggtttcggagatttgagctgttccgtttgcataaccataacctcctgctgttttacaactgaactattagcaatctccttctgaggctttttagcctcattaacattagcacaatgcaccaagacagagtttgcaatcgaatttgaatcattttccttggcaagagccacaatggtagctccagttggtggtggatcaaccggcatttgtgtaccattagcatcattgactacaacattgtctggttgggctacaattacgggtggcactaaatggctttgcggcatatgctataaaaccatgtcatatatttaagattacacacatatatactcatatcttatacgattttatttatttatttgtactcacattttggaccgccttgatcactggctcctccattgatacatcggactcgtaagtatgtttctgacgctcgacaactgtaacagcttgggctggacgatcagaatcaatggttccacttggaccgttcaatctggatactgccacctcgggctccaccgtggccataatgcagtgtggtacctggacttgaggagacatctgcactggagcaggatcggattgccccttacaagggttaagtggagttggacgatttgttgagagattctgggatggaaggttgtggcctccagcgcctggtaaatgcatccgtgatggagcatgtcctatagtttgtggtgctggattttgccgtaacggctgtctaaatgatggtcgccgacagtgtgggggtacctgaacccctcggtgcatcatccttggagcaacatcaatttgagtcggtcgatattgtgacggggcttggtgtggtagtgtctggacttctggaatcgatggcacagtagctcttggcattgcgtacattggctgtgcctgtggatactgtgcatacacagggcggctgccctgtggcggctgcgcggtcataacataattcaccggcccacggggacggtttaccacaaactggggtggtggtggtggtggtgttggtggcgccgttggttgtggctgcggttgtggttgtggtggtgatgacccttgaatcggaggcacctgccgtatgatttgaacaggctggatattggtgtctgatggcacatataccagtagatacaattgctgattattagccgatattggctcccgattgaattcgctattgtaccaacagccgttgcggtaaaagccctgcgtgtccccaaaacgcgcaggggtggtagtcggcgtacttggcacggagtacaatggcaaataaattgctgaaacattcacatgtgatggttggtggaatcttgggcggggcgcctgccgctgattgcgcacgcgtccatgctcatggcgattttcatcaacgtgcggttgcggacttggtggatttcgccgatttgcctggaatttaatggccacattctcttaacgtgcacttaaacaattaaattggtaattacgtttggattaaacgctggacttctcatcttgttattcagaaaactcgccggag

SEQ ID NO: 39218 - DNA, 2055 bp, DROSOPHILA
atggccacggtggagcccgaggtggcagtatccagattgaacggtccaagtggaaccattgattctgatcgtccagcccaagctgttacagttgtcgagcgtcagaaacatacttacgagtccgatgtatcaatggaggagccagtgatcaaggcggtccaaaatcctcagaaggagattgctaatagttcagttgtaaaacagcaggaggttatggttatgcaaacggaacagctcaaatctccgaaacccaagctaaagaatattcagcagtcaaagattccaatcgctgatacaacaccagaagcggaaactgagcaacccactatcactgaccatccgaagccaattgaccaggcacatgccatcaacaccttgccggagcaggtaccacagccaacgaacaccaatgcaagccgttcatctgtaaaacaaactacgctggatattatctgtgcaaacatgaaagcattacgaatttcggagtcgcccaaaagcaatacgccgaagaatccaaaggtctatatgaatcattggcccccattggctgccaaaaaggatcatgtcagtaattcatttaactcgaacgatacgccaccgaaaagccatacagcggaggagcaatcagtagcatctgttttgaaaatcgctaaaaatcgccaacagcaatcaggattagttagttcattgaactcaaatgctgatcataagatgactcaaaaatctgatgacaaaaagacaccagataacgattcaaagcgtcgatcaatggccacagaaaaacgcaattctgctctaccatcgataaacaaaaacaaacggtcatacgataaagttatacaaccaaatccaccaaggaccttggtcctgcacaattcgcctcggtcgccagcgagttcccaattcacgcctgtggtggtcaaaaaacgtaatatttctgggccatcgcagagagaaaagaatgtgctcaatgaaaatgttttgaaaccaccagtgtttaaaaaacccttagggcacaataatgtgcagccaaaaaagccatttgttgatttgaaaactctagggacgaacatgtttgaccttctggtagagccggataaggaggatgacaacggcgagaacactaatgagcaagatgatccgtccatcgacgatgttagtactccatcaaagcgttccaaatcgcagaaggagaagaggcgcttcaagaaacaaaagacggcccttgaaaagcagatcaaactcacgaagttggcccaaaaggaggcgaagcgtgccgaaaaagcaaaggaaaaggccaagaactcgaatgggaaaaacgcgttggctattcaatccaattcaaccgaacaaccggctaaccaaaccgtttcgggtggcatacttgggaacttggctcaagaaaccaaattcttttatcaactgaccgatgtgctgggaactccttcgccatctcaaccaggagctcctccgtcgccaagtgtttcccgttcggaagtgaacatcaaagcgcgcaggaagaagcagcccatgaagttgagcacattcttatcggctgtgaatcatgccgcattgaaaagaaatccccatgtttccgcaaaaagcaatctgttcgagcgcagatcatatggaattaacaaagaaacaccaacccaaacaagtacagattccgctgcaggagctccttttcgtttcaacgcagcagagtcaatgccgatatccaagcccgctgcagaagttccttcgcgttccaacgcattagatgctgtactcaagatggcaacgccgatatccaatccgctgccaaaaccgtccctatggttgccatataatgtgcgaccagcggcatcgatggccaaggataatttcaaactaaatcgagatgtggaacagcaccagcaacccttcaaaataatgtatggaattttaattccagtcctggcgaagttattagcttgccactcagcaagcatgctgaagatcccgaccagtaaaccaggagagaatccatcaaaagaatccacccgaaaccaaaagaagactgtcaaatcataa

SEQ ID NO: 39219 - protein, 684 aa, DROSOPHILA
MATVEPEVAVSRLNGPSGTIDSDRPAQAVTVVERQKHTYESDVSMEEPVIKAVQNPQKEIANSSVVKQQEVMVMQTEQLKSPKPKLKNIQQSKIPIADTTPEAETEQPTITDHPKPIDQAHAINTLPEQVPQPTNTNASRSSVKQTTLDIICANMKALRISESPKSNTPKNPKVYMNHWPPLAAKKDHVSNSFNSNDTPPKSHTAEEQSVASVLKIAKNRQQQSGLVSSLNSNADHKMTQKSDDKKTPDNDSKRRSMATEKRNSALPSINKNKRSYDKVIQPNPPRTLVLHNSPRSPASSQFTPVVVKKRNISGPSQREKNVLNENVLKPPVFKKPLGHNNVQPKKPFVDLKTLGTNMFDLLVEPDKEDDNGENTNEQDDPSIDDVSTPSKRSKSQKEKRRFKKQKTALEKQIKLTKLAQKEAKRAEKAKEKAKNSNGKNALAIQSNSTEQPANQTVSGGILGNLAQETKFFYQLTDVLGTPSPSQPGAPPSPSVSRSEVNIKARRKKQPMKLSTFLSAVNHAALKRNPHVSAKSNLFERRSYGINKETPTQTSTDSAAGAPFRFNAAESMPISKPAAEVPSRSNALDAVLKMATPISNPLPKPSLWLPYNVRPAASMAKDNFKLNRDVEQHQQPFKIMYGILIPVLAKLLACHSASMLKIPTSKPGENPSKESTRNQKKTVKS

SEQ ID NO: 39220 - DNA, 1846 bp, DROSOPHILA
gtacttttttatgtactccctcttcgcatatttttttttttttgggaatttcccccccaaaaaacaaaaagaaattgaaaattgctaagccggcaatcaaaatacaaacatcaggcgaaactcaacgagtaccattgttgtccaactgaagcacctgaatttatggcacaaggacataccaccacacacacacacacacacctcccccccccacacacacacaactaccacccccctggtgagtcacggtttaaatgtgcatttcgcaacacatttacgatcctttctactcgtaatcccttcaatcgcgctctaaactgctaactggttcctgattccccaggattcctggtcgctggcgctttgttgctctaaatagccctttccaaatcactggactcgcacaaaggactcgccctcaattgcgcaactatttcgatttcaaaaaaaaaaaatcaaattaaataaaataaaataagtgaagaggagagaaatgggccaaactgggcgcgcagccaaagaggatatttagttatatatgaaaataaagtttcaaaggatctcaactatagaatttgaaggcacctattggcctattaaaacgatttatacagatatgtttcttttcgtattcaagtaaagtaaaaaggcgaaaaaattaaaaatggaacagtagctccaagatgaccaacgatgacggtcaagagacggatgcgggctccacagtccaagaaggtgatatcgttcttcaagaatcatcgccgcatgctccgcaggcagggcatcgaggatctgctgcatctggccgaacgtggccacgtcgaaccgattagagatagagactaggagatcggcatcgaatgctacatatacggtatttattccacatttccattcaaatttgaaaagcttagtttaagttctaggattattgaattcctcttgcatttaaatattttgtagtctacttttagccgtctttaagaacgacttcaaccctctgctaatcagaatgttaattctaaagctggtcgcatttcttattagaatagcgttagatgttttgcgtactcatcaaaaatttcccaattgaattaatcattacttatgctactacttatgcagcattgtccttcctggcattgactgtgactattactatattattgtaggaaggactgcacgcataccaagagcgcgataaatagcgatgacagcagcgaattttcccgcaacgaagccgacgaccagcgaacttaagctcttttggccatctaaaggatggaaacattcgatatattagccaagccgctagccagtaacttatataacccatattagctatttcaagatttaataaattgttccggaggccatatatttaaaaaatgttggtttgctcatatttgatttttaaccattacatataaggctgaacagctttttctagccaggctggcagcactgccggatcagctgactgacttttctgtgtgcgcgccatccctagaaattaacgtgctagtggaagtggaagcgaattgaaatcgcgcgctgctctattcgcttgtttatgccaaagtccatggctacattggatcggatctgtaattagtcgtctggaggaactggacggattggctcagtgacaccattagccattgacttttctagtgagttcgagttccacacaatgttctattctagcgcagatatggaataaaaaaaaatatatttggcttggtttgttatgtaaaacgcgtatcaattctctggcgcgttgataacagcagcaattcagttgataaacaaacacaaaacccatgcggaaacaattgaaacgacc

SEQ ID NO: 39221 - DNA, 153 bp, DROSOPHILA
atgacggtcaagagacggatgcgggctccacagtccaagaaggtgatatcgttcttcaagaatcatcgccgcatgctccgcaggcagggcatcgaggatctgctgcatctggccgaacgtggccacgtcgaaccgattagagatagagactag

SEQ ID NO: 39222 - protein, 50 aa, DROSOPHILA
MTVKRRMRAPQSKKVISFFKNHRRMLRRQGIEDLLHLAERGHVEPIRDRD

SEQ ID NO: 39223 - DNA, 2886 bp, DROSOPHILA
cacctccatcgcacccacacacacctggccgatgttacagcacgcacacacggacacaaacacaggcaaagacacacagtcaggcagtcgcagaaatggtaaaattgcatgtgtgttgcgctgcgcacattattgaattttccacggcgagatgacgacgacgacggtgtgcaattactcaccttggcgtcgattggacttgactgacaatcaaggatgatgggcgagagcagtgcaaaggagtgtcctttgaagttcgcgaaggataacggtacggcgacgtctacggtaacggaacgtaacggaacagatcggttcggttcggatctcgcacacacacacgcacgcacggagcagctgctgaaaagtgcctgctgcctgttaccgttttcggtagaaaaagagagagacgactgaacggaacagaacgggagaaaggctccacgtggtggcgatggcgtttggcacggaacccgcgaagcgggagaggattcggtcgccaatgcgttaaggtcacactggcacacgggcgaggggcacactggcagggccagcggatcagctagtatcgctacgattcaagtcttaaataatttgtaaaatgaaagaaacatataatatttaatagcataaataagtttaatttcataaaagcaatagttttgattcgctcaaagctgaatgcattatatatttctatgtaatataatattgatatgctgtattcagtacaaagaaattgagacactgagacaatttcataaaaatttgaaatacttgtcaaacttattcttttaagtgtttccaaaatatctataaatattaaatagcttgaagtgaacgttagaatatttgttttggacactaaacgatatatcagcagataacgccttcgaaattcggtcacgtccaagtcccgcatcgtctggcctcactaaccaagtgtaaacaaaagttgtgttgtgaagttgttttcctttggtccaaaaaggaattggtcatgtcgaagttgagcgacactaagatcccgatcacggagttcctggaggcataccgtcgccagccgtgcctctacaacacactgctggactcgtacaagaatcgtgtgtcccgggaggaggcctacggagcgatcatccggtccctgaagataccccaactgacagtgtcggacataaagctaaagatcaagagcgtgcgtaccgtgtactctaaggagctgcgcatctggatgcgtgagaaggagctgggcaggacctacgaaccaaagttgttttggtttaggttggccgactcctttctacgctccgtttccctctcccactgcaaaagggtaggatttcacgatgttcttatgtcaatgttaacctctgacccaccaccagcagggaaaaaataacagttccagtgctcaattaacgacgatcaaatcggatgagacgagcaagcttctttgcactgccgccgcagatatcactatgagcgaggatgcgctagaggaagaggatgcagaggtaaatggcgagccggaggagtgtcctttggaggaaagcaggccaacagcaagcatctgcaaagatgattccacgctctgcctggcggatcaaccacagcaggagcactattctcaggggtgcagcagctcccagcagcttcctcacacgatggcacaacgaaaatcaaagtacattacaagtctggactcggccggagaggatgatcttattatattcggccagagcatcgcctctcagctgcgaaccattccggattcatattctcggtccgtggctaagctgcgtatccagcaggtgctgttcgaggctgaaaccgggcagtttcagagcaccgaggtcaatagcacgcaactccagaataccttttaaaccataagtctaaatttaaacactgtgctcagttctggcaaaatccccaaaaatatgccaccctggcctaatttccaggggatatttatcaacccgtttgccattcagtatatgtagtcaagctagttctaaggattgacggttaagtataaaatgtaaataaaaatgctatcaagtaattacaaattgctagctaaaacaagtactttgtaagtagtaatacatatgtgggtttaatttttgtatggcggaggttaattcgcctgaactccaagtaataataagcacattttaaaaatcaacgcataaaataaaatgactaatttagtcatacataaaaaacatataacaatcagagttgtacaattattaaacttcctcaattttcaaatcaaaacccgaatttcaaaaaaaagcaaattatagtgaattataactatcgatactttttgaacatttattcaaaagtcaccatgctgcgacttacaacttaaattcgattaaagtgttgtttcatgctcacacaacaaaatttgttgttattttgctaacatatttattaacacttaaccatatcgataggcaaagccgattgtaattcacagttgtcgtggattggagcgtttgcagtgtttggtcacactatttatgcttgcatttcgtctgtgtaaatttcatttcacaaaaaccgacattgttaaattaagcaaataagagtgtttaagatcgaagtgagaagagcagcaatatgctgcatttaaatataattgtgagtatggctagtggtatttccgagaacgcataaacacgcacacatacattggtgcgagaaaagactcgcggaaacaggcacacgcacgcacacagccaaattctcacccactgcattgtttctgttctgacagtggcaatttcttttcgctactctcttttcgtctattttttttcttgtgctgtattacagtcaccaatgtagttttctttaacttttaaatacgct

SEQ ID NO: 39224 - DNA, 834 bp, DROSOPHILA
atgtcgaagttgagcgacactaagatcccgatcacggagttcctggaggcataccgtcgccagccgtgcctctacaacacactgctggactcgtacaagaatcgtgtgtcccgggaggaggcctacggagcgatcatccggtccctgaagataccccaactgacagtgtcggacataaagctaaagatcaagagcgtgcgtaccgtgtactctaaggagctgcgcatctggatgcgtgagaaggagctgggcaggacctacgaaccaaagttgttttggtttaggttggccgactcctttctacgctccgtttccctctcccactgcaaaaggcagggaaaaaataacagttccagtgctcaattaacgacgatcaaatcggatgagacgagcaagcttctttgcactgccgccgcagatatcactatgagcgaggatgcgctagaggaagaggatgcagaggtaaatggcgagccggaggagtgtcctttggaggaaagcaggccaacagcaagcatctgcaaagatgattccacgctctgcctggcggatcaaccacagcaggagcactattctcaggggtgcagcagctcccagcagcttcctcacacgatggcacaacgaaaatcaaagtacattacaagtctggactcggccggagaggatgatcttattatattcggccagagcatcgcctctcagctgcgaaccattccggattcatattctcggtccgtggctaagctgcgtatccagcaggtgctgttcgaggctgaaaccgggcagtttcagagcaccgaggtcaatagcacgcaactccagaataccttttaa

SEQ ID NO: 39225 - protein, 277 aa, DROSOPHILA
MSKLSDTKIPITEFLEAYRRQPCLYNTLLDSYKNRVSREEAYGAIIRSLKIPQLTVSDIKLKIKSVRTVYSKELRIWMREKELGRTYEPKLFWFRLADSFLRSVSLSHCKRQGKNNSSSAQLTTIKSDETSKLLCTAAADITMSEDALEEEDAEVNGEPEECPLEESRPTASICKDDSTLCLADQPQQEHYSQGCSSSQQLPHTMAQRKSKYITSLDSAGEDDLIIFGQSIASQLRTIPDSYSRSVAKLRIQQVLFEAETGQFQSTEVNSTQLQNTF

SEQ ID NO: 39226 - DNA, 3050 bp, DROSOPHILA
agttccagggattgcgtttaaacgcattataacttaattaaactatatataacttcctggggcacagcaaatagtataacttctcgaaattacatacattgtaagtgtattgtttgcaaaacctgacttgtttgccctcattttattgtttgttttcgctcacagtttgcttctacttgccgtgctaagtattgttaaaccgaatcagagaatgttgctaaattgattgtgtggacaagtgtgttatgttacggtaaaattgggaatttatcaattgacgtcttagcacctcaaaacaactgcactgacgatacctgaccgaggccgatagacctttaccctatcggtaaatagctgcctgtataacagcccgtctccaccggaccaaagtccacgctcgcgttcgataactatcgagttaggtgaaaaatctcggatctcaatgaatcatttgaaaagtgatcagtgatcagtcctcgattgatttgtaaacaaaataaactactaaatacatttacaagactaaatactattcattaacagctgttgtgtgccatggacaatcgataccaggactcactcgactatctctagttcctaacgatctggtcacaacaaagctcaagaatttaataatattgatattagactaaaccaaaacaaggaacagctgatttttagaacgctaatgcgtttaagtcgtaatcgatagctcacccactgtacactgtacaccatccctaattagaactggcttctttcaaaacaaagcaaacgaaatttgaaactttttcaatttatatgttccattggtgactctggttgcaatgagctgctttggctgcggtcgcaaatatggcctattctgcaaggaggcaagtgccatcaaaccaaagcaaaccaacatatatcacctacttacattgtgttaaatccgaaattttagtatggatgccccaactgcggctactcattctgctccaagtgcttgaagagaccaatgcccgtgccccgtcatgcaggaaaggtgcacaatgtgtgcctcatatgctacgacaaactatccaaactccaggcgagcgccgatgccgagaaagttatagactgtgatgctttgccggggatcttagtcaccaaaatgaacctggctcctccatccaaaagttcagatggcgccgatgccctattcaagtaagtaaaataccacattaaaacaccgattctgaaactataattcgattaattgcagcgacagcctgcctgtggaggagctgccacaggcattggttcccagttccagttcgtcaccacattccaaagatcacaaggatcatattgatgagaacctggacagtgagttgaccaaacgaatgcaggactataaacgagttgatgccaccgatgatgagatccgcacccgtctggccaatctcactgggatgccgcatacgaaaagctacgataagaaagatctgctactgtccaccgaccaaagaaacgatcaggagaaaatgagggacttgctcgcacaattcgttgacgaagcccaactggatcaaaatatcagcaggcagagggatgactcaatttccgacattgagagacgtctgcgagctctgcgcgatacacccgtcgattccgatgcatgcccatcgagatcccagatggaaagtatcgcggacaacgaagaggatgacgagacacttctacagaacatattgaaaaaggttcgcatttatatagtagcattattttttttaagccaaatcatcactttcgtattcccattcagtatgtagcagaatcgcgcttaccagaaccttccgagagtgaaattagtccaattaacactgagtcgcccggcaacaccgaagaattgccctggtgcaatatttgtaacgaagacgccgacttccgatgccacggatgtggtggggaactcttttgcactctatgctataaggagtgccacgatgatgacgaggagtaccgtgctcacgttaaggaaaagtattcggctccgccaaagcttaaagaaaatcacttctaattgttaattgtttacttgactgtacgcaaatttttgtttaattatagattgttttcagcaaatgcattactattgtctgtatttatgtggtgctagctcgctcatatttgtgcagtataattgttgcttctctttcagttgtgaattaaaacaggtaggcgatgttggttccgaaacatcttgtggtttttccacctttcagcgctgcaaaaactataccaaaatataaagtaacttaacgaaactgccagtagctggaaaatttataaacaggtgatttaatgttcaacattataaacgtaactcgggtgcatttaagtctaagtatgtgaaatggtgctcttcttttgtccctcattgttcctcctcctcgatattgtaaaagtggggccatgtctgtatctcctcgtacaatcgccgaccaggactctccgtcgaattgcactggcagtgacaaattaatctatagtcggtggatatgtgaccatcctcaacgccgcgggccaacagattgcggcacatattcaaggcgtctgccgtcgggagttctttcatgaagcatccaatgaaactgatccccagcgagatcctgttgtaacccagagtgtgggcgcccaccgttttccatccgcgtccctcgtagatgttgccatcgcagccgaccaggaagttgtacgcaatgtcattccatccccgcgactcaatgtggaagcactgaaatatatatacataattattatatagttcggagcatatatgatttaatttcgctaacgaaatacttacctgcatgtcacggataagtcttacgttgatcgcccgcttttctgaactctctgtagctgtgtgtactgcgtggtaaaacaatatttgttaatcaaggttttaaatatattcgaaaagagttataatacgatataatcttaggttagtgagtgctaagcatgatggtcagatcaaatagtataaattgttttaattattgcgtcatacttttaca

SEQ ID NO: 39227 - DNA, 927 bp, DROSOPHILA
atgcccgtgccccgtcatgcaggaaaggtgcacaatgtgtgcctcatatgctacgacaaactatccaaactccaggcgagcgccgatgccgagaaagttatagactgtgatgctttgccggggatcttagtcaccaaaatgaacctggctcctccatccaaaagttcagatggcgccgatgccctattcaacgacagcctgcctgtggaggagctgccacaggcattggttcccagttccagttcgtcaccacattccaaagatcacaaggatcatattgatgagaacctggacagtgagttgaccaaacgaatgcaggactataaacgagttgatgccaccgatgatgagatccgcacccgtctggccaatctcactgggatgccgcatacgaaaagctacgataagaaagatctgctactgtccaccgaccaaagaaacgatcaggagaaaatgagggacttgctcgcacaattcgttgacgaagcccaactggatcaaaatatcagcaggcagagggatgactcaatttccgacattgagagacgtctgcgagctctgcgcgatacacccgtcgattccgatgcatgcccatcgagatcccagatggaaagtatcgcggacaacgaagaggatgacgagacacttctacagaacatattgaaaaagtatgtagcagaatcgcgcttaccagaaccttccgagagtgaaattagtccaattaacactgagtcgcccggcaacaccgaagaattgccctggtgcaatatttgtaacgaagacgccgacttccgatgccacggatgtggtggggaactcttttgcactctatgctataaggagtgccacgatgatgacgaggagtaccgtgctcacgttaaggaaaagtattcggctccgccaaagcttaaagaaaatcacttctaa

SEQ ID NO: 39228 - protein, 308 aa, DROSOPHILA
MPVPRHAGKVHNVCLICYDKLSKLQASADAEKVIDCDALPGILVTKMNLAPPSKSSDGADALFNDSLPVEELPQALVPSSSSSPHSKDHKDHIDENLDSELTKRMQDYKRVDATDDEIRTRLANLTGMPHTKSYDKKDLLLSTDQRNDQEKMRDLLAQFVDEAQLDQNISRQRDDSISDIERRLRALRDTPVDSDACPSRSQMESIADNEEDDETLLQNILKKYVAESRLPEPSESEISPINTESPGNTEELPWCNICNEDADFRCHGCGGELFCTLCYKECHDDDEEYRAHVKEKYSAPPKLKENHF

SEQ ID NO: 39229 - DNA, 2968 bp, DROSOPHILA
taaaataaggtaaaaacagcaaggattatgaatgcgtacactcgacagtacggatattacatcaatgctattggtctgctatggtaaacttattgaatttttctcaattttatatcaatgcctttgtacacaccccatacgcatatgcatatatgcatatgtacgtatgtatgtgcttgtgtagttggtattggataaaaaaaaagcactttcgcgtttgatttttttttcccgtgcgctaagttttcagcttcgattgttggcataatcagcagtcagaaaagattttatctacaatatacctatgattcactttggtttgcttttcaacatttatcttggtccgagatgacacaatttttaattttcctataacgacacgatggtaaatacttatacatactcaatttttgcatttacaaaatcggtgtgaccagcgtgcgagtgacgtgaacagccaattcgaggcgttctccactggtcggtatattttcgcattgcacaggttgtgcattcaaacagctgataaaaacaacacccttcattgtttattttaaaccaattggggtaatttaattagcctaattatgttaaataaatgttttataaattgtgtagtgatcaattcaaaaataaacaacatttaaaataattaatatatttggtaattgtcactcactctggtcacacaccaagaccgtctatcatgtcgtgcgcaaagccgcatattttgattattgaaccgttttacgggggcagtcacaaacagctgatcggcgcactgatcgagggtacacatatatacatacttagaatattacaactagacatacaaacttcactccaacttatcatccaatttgtaggtctcaaccatggcgacagcgagatattcagccttcccgccaagaaatggcactggcgagcacgcacctctgccctccacttcgcccagctgattccgcgcgatcacgcattccgggtgcttttcgccagctccgtgctcagcctggccgagctgattggtctgcgtccggatctggccgcttgccggaagatcgtctacttccacgagaaccagctgatctatccggtgcgcgaggtgaagcagcgcgattgtcaatacggtttcaatgagatactctcctggtaggtgaccatcctgtatacccaacttgcatccataacccatccattttcagtcttgccgcagacatggtgctcttcaattcccaattcaactgcaactcgtttttggataatgttcagccctttctgaatatgcagccagactttaaaatcaagcatattcgcgagcaaatcgagaagaaatgccaagtgctgtactttcccgtcaatttcgaacggtttcccattcggaaggagtgcgtaaagggggagactgctgaggatctggatgagaagtgcatccatcttatttggccacatcgctgggagcacgataagaatcccaaactactggtggatacgctctgtcagctccatgagcgacaagtggacttcaaggtgactatttgtggcgagagttaccaggagataccggaggaattcgagcatatacaggagaaactgggcagcaagctggtgaactttggccatctggagcgtgaagagtacttgaagaccctgctgactggggacattgtgatatcaactgccgaccatgagttttttggagtagcaatgctggaggccgctttctgcggctgttatcccattgcgcccaacaaattggtctacccggaaatctacccaaaggaaaacctctacaacacctccaatgcgctgacgaagaagctctacaacttttgtagaatgccgagggtctttcgcaagcagcgcgatcaattctttgagaactttaatttcgatcgtttttcggcgaaagaactagtgccaaaatatctggacatattcaataaacatattgcagacgaacaaagttagaaatcgaaggtttggcaaatgtctatcaaaatattctctgtaatataatagatatatttttgaataaatatatctctcttctgtaacctacaaagccaaaaaaaaacgatatatatatgtaagtcctttgtgttaaaacacgcttcattcactttaagcatttatttatttatgaaatatccgaaaaaaatgggatacaatttaaggtggatgtaaccaataatgccataaatgtagcacaataaattctatttcgaaaacacaatttggatgaaaatttggggattcatatctacaatattataaagatgatgcgtatagaattttgtttgtaatacctgaatatagccacatagaatttagagcgaaccaaagcggtcgaacgaattcaccaaacacttttgtttctcgaagttcagggagcgcgaaatacaggacagatttttgaggcacgcataagcctgctcctccataaacatttgatctctggacttgccacaagcgacgcgtgcccacttgggatcaatgacatgatcgtaggtcaagccaccgcggtacttgttaattctgcgattatggaatggtcgattctcctttctgccctcgtcgaacggcaggtcctgttcgctgcacagcgtgtccttcaaaatatcgcccggcgatgtgagaaacttgctgggcgtctcggtttcgaagggttgaatcctcttggcggagccagcgttgtatggatgattggagctccaagttgagagcaatgacttcctggcacgtttcatatgcggcggcgactgagcattgtattcggtgcttagcgttgagttctgatcggcggcgcccatcattttggaattgtttgcggtcagcgagttgctcagatgctcttcatggatgatttcggccagatcctccaccagactggatgggctggagggctcgtatcgacgaccgtccctcttcttgccgatggcagcaagtgcctttttgaagggcgttggtg

SEQ ID NO: 39230 - DNA, 1134 bp, DROSOPHILA
atgtcgtgcgcaaagccgcatattttgattattgaaccgttttacgggggcagtcacaaacagctgatcggcgcactgatcgagggtctcaaccatggcgacagcgagatattcagccttcccgccaagaaatggcactggcgagcacgcacctctgccctccacttcgcccagctgattccgcgcgatcacgcattccgggtgcttttcgccagctccgtgctcagcctggccgagctgattggtctgcgtccggatctggccgcttgccggaagatcgtctacttccacgagaaccagctgatctatccggtgcgcgaggtgaagcagcgcgattgtcaatacggtttcaatgagatactctcctgtcttgccgcagacatggtgctcttcaattcccaattcaactgcaactcgtttttggataatgttcagccctttctgaatatgcagccagactttaaaatcaagcatattcgcgagcaaatcgagaagaaatgccaagtgctgtactttcccgtcaatttcgaacggtttcccattcggaaggagtgcgtaaagggggagactgctgaggatctggatgagaagtgcatccatcttatttggccacatcgctgggagcacgataagaatcccaaactactggtggatacgctctgtcagctccatgagcgacaagtggacttcaaggtgactatttgtggcgagagttaccaggagataccggaggaattcgagcatatacaggagaaactgggcagcaagctggtgaactttggccatctggagcgtgaagagtacttgaagaccctgctgactggggacattgtgatatcaactgccgaccatgagttttttggagtagcaatgctggaggccgctttctgcggctgttatcccattgcgcccaacaaattggtctacccggaaatctacccaaaggaaaacctctacaacacctccaatgcgctgacgaagaagctctacaacttttgtagaatgccgagggtctttcgcaagcagcgcgatcaattctttgagaactttaatttcgatcgtttttcggcgaaagaactagtgccaaaatatctggacatattcaataaacatattgcagacgaacaaagttag

SEQ ID NO: 39231 - protein, 377 aa, DROSOPHILA
MSCAKPHILIIEPFYGGSHKQLIGALIEGLNHGDSEIFSLPAKKWHWRARTSALHFAQLIPRDHAFRVLFASSVLSLAELIGLRPDLAACRKIVYFHENQLIYPVREVKQRDCQYGFNEILSCLAADMVLFNSQFNCNSFLDNVQPFLNMQPDFKIKHIREQIEKKCQVLYFPVNFERFPIRKECVKGETAEDLDEKCIHLIWPHRWEHDKNPKLLVDTLCQLHERQVDFKVTICGESYQEIPEEFEHIQEKLGSKLVNFGHLEREEYLKTLLTGDIVISTADHEFFGVAMLEAAFCGCYPIAPNKLVYPEIYPKENLYNTSNALTKKLYNFCRMPRVFRKQRDQFFENFNFDRFSAKELVPKYLDIFNKHIADEQS

SEQ ID NO: 39232 - DNA, 2531 bp, DROSOPHILA
aatttttgctgcgcaacaatgatttcataaattaatacctttattgctcagcagcaccgaccttttgcgacttactgtatttacaattttacgaactacctatgaaaattgtgacaatgattttagtaggttaaaggtctttcattactgaaaagtaatcgaaagaagcgatatcagcgtgttgttaaacaccaaacagatataacgcggtctttccactgaagttttctcatggaacggtgggaaaaaatatatatatcaacgtcggttctcagtgaacggaaattccaaatttatatatcgtaacgttatattttcgattttttccgatgttattccaaattaatagaatatatgttaatatttttataatctgaaacacggaaaagacaacaactaaaatgcaatttaaattattaaataaaaatgagcaaacttggttatttaaacacttgcctgttatatggcatgttactctgcaagcaactgtcgaaaatcaacttttattctgtgaattcttagatatgaagttaaatgaagtgcaaataagctatcccccaaattaaagtggtccagagtgctcgaaattatcgtccatctctaacgcattttaaaaacgcaagtggctggtctcactcatgttattccacattatattttgtattgcattctattttatctaagctagcaaatatatttaaggcaactagactaaatgttaagcattcgtgttttaaggctacaaaatggacactccgttcttaacaacgcctgccaattggcactttcgcgaaacaagagctccaaaaggtcgagcaaagacaacgtaacgcgacagggaaaaatatttggctcgttgtttggaaatcggcttaaaggcagcaaaagccattggtatccatcgcccgatgcaggaacatcaggcaatcaaaagtcgctgcacgccttaaagtttggaaccccacactcgaagacaacttgcagccacaacaatcgacgcatgtctgttctgaacaagttgttcatgacgaacatcactgatattctggccaccggcgcagttgccgattccatcgtgggacacggagtgcagatttcctatgtcaagatcaccagcgacttctcccgcatcaatgtctattggatgggcaaggatggcggggagaaccaagagctcgagaacacattgaatcgcatgagcggcaaactgcagcacgagctatcgcagctccatctgatgggcgaagtgccaaagatcaagtttgtccgggacaaaacgagcactggtctccatcaggtccacgaggttctgtccaaaatcgatcttcagcacagttactctagttcaaatgcggaagttgaagaaagcgacgcacagagttgtcagacggctgcggatgaggaatggccggagatgcgacaggatttcctcagttttaaccatagcttagttatggacaagattctcggcaagatgcgcaagtccaaagatgcctgggttaatcatagacaaaatattgcgaaaacctaacgtttgttaaatccctcgacttatgtacataatgttaattattaaagtgttattcaatccaatgtaaattgggttctaaagttgaaaataggggtagggtctgtaaacgtttaatcattttccaataagtttgaaatgttggctacttttatcccaactagttcatcatgttgagtggttttaaaatagagtatcgattgcgtttctaaaaaaaagctttaacggcttaaaattgaatgtcaaaggtcaaatcattaccatactcgattatgttattatgcttttaaagcttgcgcactgcatctgtatctgttatcgatataaagcaaaaacgcagaaaagccggacatgcgcataaaatgaatagttttataagcttttagtattggttatatattcccttcaggatatgcatattgtagatgtgcatttaatttaataaatagatagataattacttgtaagttaatgtaatcaaatcagctgtttttgatagttgcgatagtaggcgaccttgcgcttaaattgatatcgatgtcggataaagcactggacttgttatcgaaaccaacacttagcttcggcatacggaaactattcgatatatcgatgtatcgcgagtgattcacccagccctatcaattataccaaaaaaaatcagaccagaccagcttatcgggtacagattgattactttcttgcatctctagttttagtcgaaaaaatccattgaaacgatttggaagcggagtgtggtgatagttgtcagttttgcacaataagaagaatatttgtttaaaagaccaagccaaagcccaaatcgcagtgcgctctttgtggcgataaacatgacatctacactaacacaacacagttacgcctgagaaataagtgacaaattggaaaagtcgatgataaattcgtttgggagtatatatacaaattattttcgtgtaaatgtcgataaacacttttgctcgcaaaacccaacaatcatacc

SEQ ID NO: 39233 - DNA, 531 bp, DROSOPHILA
atgtctgttctgaacaagttgttcatgacgaacatcactgatattctggccaccggcgcagttgccgattccatcgtgggacacggagtgcagatttcctatgtcaagatcaccagcgacttctcccgcatcaatgtctattggatgggcaaggatggcggggagaaccaagagctcgagaacacattgaatcgcatgagcggcaaactgcagcacgagctatcgcagctccatctgatgggcgaagtgccaaagatcaagtttgtccgggacaaaacgagcactggtctccatcaggtccacgaggttctgtccaaaatcgatcttcagcacagttactctagttcaaatgcggaagttgaagaaagcgacgcacagagttgtcagacggctgcggatgaggaatggccggagatgcgacaggatttcctcagttttaaccatagcttagttatggacaagattctcggcaagatgcgcaagtccaaagatgcctgggttaatcatagacaaaatattgcgaaaacctaa

SEQ ID NO: 39234 - protein, 176 aa, DROSOPHILA
MSVLNKLFMTNITDILATGAVADSIVGHGVQISYVKITSDFSRINVYWMGKDGGENQELENTLNRMSGKLQHELSQLHLMGEVPKIKFVRDKTSTGLHQVHEVLSKIDLQHSYSSSNAEVEESDAQSCQTAADEEWPEMRQDFLSFNHSLVMDKILGKMRKSKDAWVNHRQNIAKT

SEQ ID NO: 39235 - DNA, 3466 bp, DROSOPHILA
ttcctgccgcttatccgtgaccatcgaaatgttcaagttctctacacgtccagcaaaggatcgtataatttactaactagcataaatattaattttcatatttacagctgcgttttgtgtttatttttatttttgtctttttggttttgttatttattcttttttgtggttttctgtttacggtcattgttttttgttttttggtttgttttgtattttattttattttttttgaaagattttcctactcgaacattggcattccattgcttggtccgaggtatgcaaaaaatatgtaaatatttcccaatttttaattatttatttcgttaatgcggttgctgttgttttcggttttggttttggttagcttttgctttcatttttcggtttttgttgtctctcatcattatacgtatcattatacgattatgaatataaattgggatgcactcacttaataattgttattaatctatgaataaagtatggctatttatttaccactcacacataagaatacacatttttgttgcttgttaagtttgtttttccatattcatttccattttcccattttccattttccattttcccattttccagtttcccatttccatctcgcttcaatttgtgtgctaacttttactccgctccattttacgttaactagtttgttttgttttggtttttgtctgctgtcttcacatttacatttatttacttaactacttagggctaaattcatttatttatgtgcttatacacgagcaacgtattggtaactatgctaaagtaatcataaaggtcgatacaaatttcatttatttagagagaaagctagctgcgcgctggctccgggcacatgtgagtggagtgggcgtggctgattgttgatctatgcgcgatttctgatgcagtatggaccgcatggatcgcatggatcgcatggatcatatggaccatgaggatgatcttctctatcatatagataacaatatcaatgcttatattccgggtagcagccattctcgatgatttgttcggactgactgttgttgctgctgctggtatcgcctgattgctgcggatgatgatgctgatgcggatgctgctgataaattggcagctgaaggagctgcaattgctgctgatgctgacttagtgccgccgtgtctgccgccgctgctgctgctgccgccgattgcaaaccgcgacgaatgggcggctggataacacttccactgctttccgtttccgttgagggcggggatggatagtagtccctctgacttacacttataccatttgggacgattggcaaagccattatagaactgttggccaccgatgtcgccgctgccactcccgatcccgatcccgctgccgctgcggaggattgatgatgatcgccgtggtgctgatgcggatgctgctgctgctgctgctgctgctgctgctgatgcggatgctgctgctgagctatagcccccgaaatgggtccgacgtcgatgtatggttgggaatccgacattgtaccggatggcggctggtccaataccacgacggataccacatcctcactcgcccaccgggctaactgttgttgagcttgaataaagtcatcactagaaaataataatcgtagcaggaacaacggcacatggtaagaaatcaaacgggggccatcgaggaagcggattcggattgggattggaatcggaatcggaattggaattggtctagatggataaatggtatggtcacatgctacgtctagttctcaatcgagctattcaatttgaattacacatctaaacaatcaatcaatgggaaactatccataaactagaagttacaggccaattgggttggggaaactgtgggtgtggaggatcatcatatgtgggcataaatcaaatgctacaaactgctgagctggtaataaacgatgcatcagcagcagatcgtcttggttcaaatggaagagctcctgaactgaagggttctctgaacattatatattatatcttatcatatcatatcatatcaaatatgtgatcgctcagctggctgcatcgtttacgtggtcaggatagtggattatggcctggcaatggaaccaagagacagtaatagtgactcaaacctacctctcgctatctggtgtctcgtggcagtcgagtcgagcgtcgaccacctggcgttcgtggtggtcagcggtctcgtagatgccctcgtcctcctgctgcaaatgggtgtgcgatgagtgatgggacgagtgtggaccgtgcgtggcatgtccatgggcatgggagtggtgcgtatgatgtccgaatgcgtggggtgagtgcgactggtgcggcgcatggcgtccagatgatgccggctgtcggtagcgtccaccgaatgtgaatcgggactcctcatcggaacggggacgacagcttctgctgtaagacgcatgaattgtagcggttttctgagattgtggtatttgctgattggagctataggcgataaggataagaaaaaaaaggcaagcaaataatcaaattattcagtggcatgggagtttatggatttgctgcttttcggacttgggacttgggattttttttttttttttttttttttttttttttttttttttggaaatttattgaattattatggttctgctatgtagaaacgataggcaaacgagatttggactgagcctgaaaccgagaccaaaacagagaccgatagccatgaggagaacttaagagcaatgtcaaacgcatctattacaatgcaaattgttgttgttgttgttgttgttttagttgttgtcgttgttgttgttgttgtttaaaaagagatgtgcaagtgattacgtaatagtaaataggaaaacgatgtgaagtcaagacccttaagaaataagatcacaagatcaagatggtagtaagttacataagttagctagttagaggggcaaccaacctttatcacacaaggtattccagcctgaagcctgcaagaaatgcgaatataaattggcattggcttgaattacattttaatatactgcagttacaaacaagcagtggctttcatgccttaatggtagtaggttaggtcagtagttttcgattttaaaataacatcatgagtggtttatatatgctttttgatgagtatatgaggctttagtcttcggttagttgtttgtatgaacatgtggagatactctcaagccatcgaatatattatattgggttattaatcacttgctctacgatttagtttagtagtgggtaaattggaaattttggtatcacatagattgactattggaaacttaaaacgcgttgactattaagaatacggttggttaatgggaagcaactgttcactgcctacgttcattaccatgttacaaagcgcaatacagatagtaggtgttaaaaacatctaagaa

SEQ ID NO: 39236 - DNA, 1020 bp, DROSOPHILA
atgcgtcttacagcagaagctgtcgtccccgttccgatgaggagtcccgattcacattcggtggacgctaccgacagccggcatcatctggacgccatgcgccgcaccagtcgcactcaccccacgcattcggacatcatacgcaccactcccatgcccatggacatgccacgcacggtccacactcgtcccatcactcatcgcacacccatttgcagcaggaggacgagggcatctacgagaccgctgaccaccacgaacgccaggtggtcgacgctcgactcgactgccacgagacaccagatagcgagagagaacccttcagttcaggagctcttccatttgaaccaagacgatctgctgctgatgcatcgtttattaccagctcagcatgatgactttattcaagctcaacaacagttagcccggtgggcgagtgaggatgtggtatccgtcgtggtattggaccagccgccatccggtacaatgtcggattcccaaccatacatcgacgtcggacccatttcgggggctatagctcagcagcagcatccgcatcagcagcagcagcagcagcagcagcagcagcatccgcatcagcaccacggcgatcatcatcaatcctccgcagcggcagcgggatcgggatcgggagtggcagcggcgacatcggtggccaacagttctataatggctttgccaatcgtcccaaatggtataagtgtaagtcagagggactactatccatccccgccctcaacggaaacggaaagcagtggaagtgttatccagccgcccattcgtcgcggtttgcaatcggcggcagcagcagcagcggcggcagacacggcggcactaagtcagcatcagcagcaattgcagctccttcagctgccaatttatcagcagcatccgcatcagcatcatcatccgcagcaatcaggcgataccagcagcagcaacaacagtcagtccgaacaaatcatcgagaatggctgctacccggaatataagcattga

SEQ ID NO: 39237 - protein, 339 aa, DROSOPHILA
MRLTAEAVVPVPMRSPDSHSVDATDSRHHLDAMRRTSRTHPTHSDIIRTTPMPMDMPRTVHTRPITHRTPICSRRTRASTRPLTTTNARWSTLDSTATRHQIARENPSVQELFHLNQDDLLLMHRLLPAQHDDFIQAQQQLARWASEDVVSVVVLDQPPSGTMSDSQPYIDVGPISGAIAQQQHPHQQQQQQQQQQHPHQHHGDHHQSSAAAAGSGSGVAAATSVANSSIMALPIVPNGISVSQRDYYPSPPSTETESSGSVIQPPIRRGLQSAAAAAAAADTAALSQHQQQLQLLQLPIYQQHPHQHHHPQQSGDTSSSNNSQSEQIIENGCYPEYKH

SEQ ID NO: 39238 - DNA, 5370 bp, DROSOPHILA
aaaacagagaccgatagccatgaggagaacttaagagcaatgtcaaacgcatctattacaatgcaaattgttgttgttgttgttgttgttttagttgttgtcgttgttgttgttgttgtttaaaaagagatgtgcaagtgattacgtaatagtaaataggaaaacgatgtgaagtcaagacccttaagaaataagatcacaagatcaagatggtagtaagttacataagttagctagttagaggggcaaccaacctttatcacacaaggtattccagcctgaagcctgcaagaaatgcgaatataaattggcattggcttgaattacattttaatatactgcagttacaaacaagcagtggctttcatgccttaatggtagtaggttaggtcagtagttttcgattttaaaataacatcatgagtggtttatatatgctttttgatgagtatatgaggctttagtcttcggttagttgtttgtatgaacatgtggagatactctcaagccatcgaatatattatattgggttattaatcacttgctctacgatttagtttagtagtgggtaaattggaaattttggtatcacatagattgactattggaaacttaaaacgcgttgactattaagaatacggttggttaatgggaagcaactgttcactgcctacgttcattaccatgttacaaagcgcaatacagatagtaggtgttaaaaacatctaagaaattatgaattatatattcatagtcacagcagttagtcattttatatgttgaagtgtgtttaaagcgaatgtgcgatttctcgatattttaatatctcgattgctcgattagttcgattggttcgatcgattgtttgatgtggacgagacaaggacaagacaaggacaagacaatacaagacaggacgagacaagacagaacagaacagaagagaagagaagagaacaggacaggcttttcgggtgtctgactgactcggtgccaatacttaaagaggtttacggtgattaagttctgaagcagaaaataacactaacccttgagatgactcactacaagccgcggaactttctaatctatagtgtcgatcggcctctgtttccgacattcgtatatcctcggatccgctgggactcatgtgacgggacgagtggtgctctagctgcctgatcaggtcctccagattgcgtatacgcagtggtcccgtcgacggtgcatcatcgtcatccagctgctgcggctgcagcgccaccgtcgacggctgatgcaattgatgctgggatcgatgatggtgcagcatggtgccgccatggcccggcatgccacccgacatggatgtcgatccgccgccggctcccacgctcgagcccagtcccatgccgccgagtccgccgccgctgccatcgaggatgatcgcatggacggcggcattgtcgcagatgttctcacgcgaactggacttggaaccaatgttacgcttgtactgctccgccgaatagcccagctgggaattgttgcagtcctgcagcgtcttgcgcagcatctcctcgctcaggctgccgctgccgacgggcgtgtttccggttccggttccccgatgcgtggccgcattccgtagcgcctccaaaatgtcctcatgatacccattaagggatttaagcgtccgctccacctcggaggcagccgcaccgccgctcgtcgacgccagggtgccgtcttgggtaataagctcgaggttatcggactgattgtcatcgccccatttgtcttttagctgctcaccgtgcaccagaccgtagccgtgcttctttaatatacccttctctgtggcagccaataataatgcattaggtttgtcgttagtatttagttccaatgtgcatgtaaagggaatatagtacaaatttttcaggtagagaataggcgcgtgactgcaaaacagcgattatagtgggtttgtcttatgtgtatatacgtacgtatacttaatttgcacaagaaatgtgtacctacacatgtacatattgtatgtattgtagttattcacttgaactctgttcgtttggctaatttcttatgcaatttccatagagcaattagtttatacttgtgaatagtctttgtcgctttgcaaaaagattcccgattcttggtcaattgtgtgtgtgtgtgtgtgtgtgttgtgtgcgtgttcgttgtagtaaaccctattaagtttatatattactgatcaccattatcatgcgagtcgatgcaaagttacataaaaataggtcaaatatgctttgggtaactatttttcagaattgaaaagggggtaaacaataatactgatcaaaagctactagttttctttaaaactataattttataatatctttaaaaaacaaacagtgatattaacatttgaaatcctaacactttcatactttgttgcctagctttcggcgtttatacggacgaacaggctggtttttatacggacagatgctgatcaagaatatatatatgtacataaagaagggtcggaaaagttattatgtactttgtacatattcttcaaagtaatatttaaaaagtaattattgaacataagctttcgatgggttgtgttccgttgacatcaaaagaacataaagtaaataaataaaatgccctttgaataatgttaaagttactataattatatctttattaacgtaaatatcaaaacagggtattaaaatgccaacacaaaagatatgtagacaatgcttttcagccctttttagataatttcaataagatacttaacaagatcgacttggatgttgattctgatcccatatataaatacaatagggtcggaagggtttttaaaaacctctttgacaaagattatacatatagaatgaattgaattaagcttaagattcttgaggaagcccacaaatagttgactaatttttctcactaaagctccgacaaaaacaaagatgaaaactcgggtcgcttaaaaagggcataagaagcttgctgggaatgtgtacgtatgtatagataaacaacatatatgtttgctgaaaataaacttatgattgctattcaatagagtattaatgtcaaacagtaactgcaataatagaagctctgaagagtacaagcattaaacgattaatcaagagttagtctattcaaatttagctcgttaacatggaaggcatctaaactgttaagcgggaaacacaaaggaacacaaatttattgcaaaccgttctttcattaatatacgattacttagtttttaggggggaaattcccgttcactgtatcatgtgcaagaactgatgttatccctaatttccatgaatatgtgtaagaaatgttgctttaatacctaatgtgtcccctacaagatttagaatattgttttttggaaaatgaaaacttttcgaggccatagaacgagaacctcccctaaaatacgattacaaaaaagtcaaaatcagggatttcactgaaatctcaagagaaatagaaaacctcttaaaaatcctttggtgtttcagagatctgtacagttgtatttttaaatggaatatatattgcatttgtatatattattgtatattatattatattttcgatttctgtgacaccgttttgggacttttagtcgaaattcgaatctgagaggtttcggtgacaccccttagccactttgtttgtgaatctaatctaagcacaagttatgtaataattgtaaacataatgtattaacctgcatgtgactgatcgtcctcgccacatgtcgtgtagcgtcgtccatggattcccttgtccctgtgaaggataataataatgaaattggggcatatcataagatcggttggtaaagaggaaccgagctacttgcggcgatgctaaacgatgaatcagccagcagctttcaaatagttttatcaaatggtacaatctttaataagaagatcttagcccaatgatatatattggcagtaaagatcaaagatcaaagatcttgtaagcgatgcattcagcttgcaagtttgctgatgcatcgtttatcatagaaatttcaagatatgatggctgttaacgagttatcacatgatcaagtgactgctgcatcgtttacaacccaattgtgattgttgtccttttgaggatacacacctgaagccagtctgattggcatagactaacttgctggatccgtccaaggagacctcctccacggaatgatgattgggcgccgttgccgctccgccgtagctcttggcaattggcttcttcgaatagggcgggtcgtacttgagcgttgtggtctttcgcctatatggccatcgggttacccacattcacggtatagttgttgtcgttgtttattcatttatatgcgttatatatattatagattttgcatacactccaatgtatatagtatgtgtaataatttaaggcgtaaggttatgcgtgttttacagatatatgaagtcagttatcgtatttattttattgaattatgcagcaaaatcaattttacgtcagagtgtttcgtaattatggggacaggatgggtaattcgttggtttgtatatgttttttttttggtttttggttttggttttggtttttggttttcggttttggtttttggttttggtttggtttcgggttggttcagtttggttcggttagtaaataaataaacaatgtttatggtttatttgaagagtacgaggtaacgacgtgcacacatacacacgcatgcacccgatttagttttttttttttggatttttatttaattatatttgcataaataattgcgtgtgcatgcgtgtgttttgaatggcccgttgaaatatgtttcgattgcaaaaagatatttttttttttatgaattcgattttgatttgataaataccgatttgaataggtttaatttggtttttgttgatttttgttttgttggatcattatattgatgttgttgttgattgttgtttggaaacgaaatgttgcaatgagagtcttaattaatcaaatgcttacagattttgaataaacattttgggttgaatataaagattcttgttatgaattgtatatatgttttgtaaaaatgaacacacagatatacgcctggtctttcaaaatatatatatttacacccaaacatgcatattttttagagggtcttaaaatggttataaaacaaaaactacatggcttcagtaaaccgaagagcaaatgcctttgcactaattaaaatttactaaaatcatcaatcttttgggtttcttttgacatttgcagcacggacttatattgacttttactctaaattcaatttgc

SEQ ID NO: 39239 - DNA, 1083 bp, DROSOPHILA
atgtgggtaacccgatggccatataggcgaaagaccacaacgctcaagtacgacccgccctattcgaagaagccaattgccaagagctacggcggagcggcaacggcgcccaatcatcattccgtggaggaggtctccttggacggatccagcaagttagtctatgccaatcagactggcttcagggacaagggaatccatggacgacgctacacgacatgtggcgaggacgatcagtcacatgcagagaagggtatattaaagaagcacggctacggtctggtgcacggtgagcagctaaaagacaaatggggcgatgacaatcagtccgataacctcgagcttattacccaagacggcaccctggcgtcgacgagcggcggtgcggctgcctccgaggtggagcggacgcttaaatcccttaatgggtatcatgaggacattttggaggcgctacggaatgcggccacgcatcggggaaccggaaccggaaacacgcccgtcggcagcggcagcctgagcgaggagatgctgcgcaagacgctgcaggactgcaacaattcccagctgggctattcggcggagcagtacaagcgtaacattggttccaagtccagttcgcgtgagaacatctgcgacaatgccgccgtccatgcgatcatcctcgatggcagcggcggcggactcggcggcatgggactgggctcgagcgtgggagccggcggcggatcgacatccatgtcgggtggcatgccgggccatggcggcaccatgctgcaccatcatcgatcccagcatcaattgcatcagccgtcgacggtggcgctgcagccgcagcagctggatgacgatgatgcaccgtcgacgggaccactgcgtatacgcaatctggaggacctgatcaggcagctagagcaccactcgtcccgtcacatgagtcccagcggatccgaggatatacgaatgtcggaaacagaggccgatcgacactatagattagaaagttccgcggcttgtagtgagtcatctcaagggttagtgttattttctgcttcagaacttaatcaccgtaaacctctttaa

SEQ ID NO: 39240 - protein, 360 aa, DROSOPHILA
MWVTRWPYRRKTTTLKYDPPYSKKPIAKSYGGAATAPNHHSVEEVSLDGSSKLVYANQTGFRDKGIHGRRYTTCGEDDQSHAEKGILKKHGYGLVHGEQLKDKWGDDNQSDNLELITQDGTLASTSGGAAASEVERTLKSLNGYHEDILEALRNAATHRGTGTGNTPVGSGSLSEEMLRKTLQDCNNSQLGYSAEQYKRNIGSKSSSRENICDNAAVHAIILDGSGGGLGGMGLGSSVGAGGGSTSMSGGMPGHGGTMLHHHRSQHQLHQPSTVALQPQQLDDDDAPSTGPLRIRNLEDLIRQLEHHSSRHMSPSGSEDIRMSETEADRHYRLESSAACSESSQGLVLFSASELNHRKPL

SEQ ID NO: 39241 - DNA, 3239 bp, DROSOPHILA
tcgaccagccattcttcagtcagccaaatacgacgcagtcgcagagcaccggaatctcaactgggagattcccaatcccggccatcccatcccataccaatatatctcaaaccaagcccagccgagtggccacatctctcgctctccgcttctattgtcacgtcacaattcagcatcttggctctctcgggctgtgtgggccacatccttttggtcctcggatggatgttggttggtgttcggcactcagccgctggctctctcgccgaaagtcggtaaaaaaaaaatccactccttggccccaacgagtcttacaatccgggtacgtctgtttatgtccgttatgtggagcaaaagggtatattgtattcgtgcaaaggtgcgtaattgtaaaaggaagtgtagtatacacctacgcctctacatacgtttccatctagccgtgtctgtctgtctctctgtatctctgtctggctgcctgtctatctggccgtcgagatcttggccagaacaatggacagagaactgggtccacactgttccacgccacagattggccacgcccccgtcgtctaattgaatgaagctatatccttcttacgcccagctagcagtgacctgatttaaattaactggtttcgaaatgaagtttgggcgaatgaaagcctaaaaataaatacagaccgcattgttagccaacatacataaatggaaaatcatggaaaattacaatgaaataatatgtataagaaattgaaaaaaaaatatatatatatctaaaagtgttacggatttcaggcgcaggttgcatgtttatacttttagttttgctttttaatttgaatatattaaattgaaaacaaaattgaaatatgtgcacctgtttacctgtttatttttcgagagcaaaacgcactttgttcttcaaaataaagcaaaattaaaatacacacaagtagtatagtttaatggatttcacaggcacacacctccttggaaaatgcgtttgatcaaaatttcatattcggcacttaatgaggtggtaagtatatgccttgtgtgcaaacgctttctaaaatatttactgtgcaattagggtaaatgattaaaaaagtggtaattttagggcgcagttggtaagctataaatgaaagaaatgccttaagatgtacctagtgctgtggcatttatcagatagtcatgttctattcgtatccctacaaagcacttagctttcccattcagtgcgtttggctgaaactgaatggttcttggccattaaccgaatcatcgaggccatggaggagccaatccttattggccaccgcctacatcgtgtgggcgtggtacgtcattgcatctgtgggcataacaatcagctatcagacggcctttttgctgaacaacctttcggacattattatcaccacggaaaattgttgcaccacctttatgggtgtcctgaactttgtccgactcatccatcttcgcctcaatcagaggaaattccgccagcttattgagaacttttcctacgaaatttggatacctaagtgagtcgattcattagggttattataagcgatgttaaatgatcatcgcattaaactgcagagcattgaaaactatagaggtttgcaatcttacttgagtaaatgcgcagaaaagtgtgctacattgttgtgtgcaaaagagcaaactttgctttctaagcatgcttttggacacttaaagtggttttgagataatatagacttttgagtaactatacccatcttcaaactgtatttgtaagaaaatctttatttacatatataaatatatgatgggttccagttcttccaaaaacaatgttgccgccgagtgtcgcagacgcatggttaccttcagcataatgacatccttgctagcgtgcctgatcataatgtattgtgtcctgccgctggtggagatcttctttggacccgccttcgatgcacagaacaagccgtttccctacaagatgatctttccgtacgatgcccagagcagttggatccgatatgtgatgacctacatcttcacctcctacgcgggaatctgtgtggtcaccaccttgtttgcagaggacaccattcttggcttcttcataacctacacttgtggccaatttcatttgctacaccaacgaatcgcaggtttatttgcgggttccaatgcggaattggccgagagcattcagctggagcgactcaaacgtattgtggaaaaacacaacaatattatcaggttggtatcgtgccaatattcaattacaatgattctattacaatgatcctattacaatgattctattacaatgattctattacaacgattatattacaaatattctatcacaacgatactattacaatgattctattacaatgattctattacaacgatactgttacaatgattcttttacaacgattctattacaatgattctattacaataattctattacaacgattttattacaataattctattacaacgattttattacaatgattcatttcaatgattcttttacaacgattttattacaatgattctattacaatgattcattacaatgattctattacaacgattctattacaatgattctattacaacgattttattacaatgattcatttcaatgattctattacaacgattttattacaatgattttattacaatgattttattacaacgattctattacaacgattctattacaatgattctattacaacgactctattacaatgattccattacatgttactttgattttgccaatagttttgctaagcgcctcgaggactttttcaacccaattctactggccaatctaatgatttcctccgtacttatttgcatggttggctttcaaatagttactgtaagcattggcagtaaatattttaatataatgactagcttttctttctaaacttcataagggaaaaaatatgttcattggagactatgtgaagttcataatttacatatcctcggccctttcacaattatacgttctttgcgagaatggcgacgcattgataaaacaggcaagaatgtagattgtttttttttttaatatattaataaactatttccgataaacagtctaccttaacagcgcaaattctgtatgaatgccagtgggaaggatccgatcgcattgagatacaatcgttcacgccaacaaccaagcgaat

SEQ ID NO: 39242 - DNA, 798 bp, DROSOPHILA
atgcgtttgatcaaaatttcatattcggcacttaatgaggtgtgcgtttggctgaaactgaatggttcttggccattaaccgaatcatcgaggccatggaggagccaatccttattggccaccgcctacatcgtgtgggcgtggtacgtcattgcatctgtgggcataacaatcagctatcagacggcctttttgctgaacaacctttcggacattattatcaccacggaaaattgttgcaccacctttatgggtgtcctgaactttgtccgactcatccatcttcgcctcaatcagaggaaattccgccagcttattgagaacttttcctacgaaatttggatacctaattcttccaaaaacaatgttgccgccgagtgtcgcagacgcatggttaccttcagcataatgacatccttgctagcgtgcctgatcataatgtattgtgtcctgccgctggtggagatcttctttggacccgccttcgatgcacagaacaagccgtttccctacaagatgatctttccgtacgatgcccagagcagttggatccgatatgtgatgacctacatcttcacctcctacgcgggaatctgtgtggtcaccaccttgtttgcagaggacaccattcttggcttcttcataacctacacttgtggccaatttcatttgctacaccaacgaatcgcaggtttatttgcgggttccaatgcggaattggccgagagcattcagctggagcgactcaaacgtattgtggaaaaacacaacaatattatcagcgcaaattctgtatga

SEQ ID NO: 39243 - protein, 265 aa, DROSOPHILA
MRLIKISYSALNEVCVWLKLNGSWPLTESSRPWRSQSLLATAYIVWAWYVIASVGITISYQTAFLLNNLSDIIITTENCCTTFMGVLNFVRLIHLRLNQRKFRQLIENFSYEIWIPNSSKNNVAAECRRRMVTFSIMTSLLACLIIMYCVLPLVEIFFGPAFDAQNKPFPYKMIFPYDAQSSWIRYVMTYIFTSYAGICVVTTLFAEDTILGFFITYTCGQFHLLHQRIAGLFAGSNAELAESIQLERLKRIVEKHNNIISANSV

SEQ ID NO: 39244 - DNA, 4319 bp, DROSOPHILA
acgacccgaagagtcatcatatcatcatcatcatcaacaccatctcatcatcatcaacatcgtcatcaccgtcgccgtctttatcatactcctctcaagcggggtaattactgcccatttgattcacaatttctgggctgtgttcggtttgtgattcctttgtaaatgaatcattagcacaaccatttaattctctctcatatgggtaacaaaaaatacaaaaaaaaaaaaaataaaaccatttacacagaacattaatcggttaatgcgcatgtgtaaatattttcctctatatactttacattgcactgcagcaccgagctaaaaaaacaaatcgcgctgctgggaattgccgtcttttatttgctcaacttgtgttattcataacaattgcatatttaaaacgaactaaaatttcttccgtaccgatagccacagaattcaattgtgcgcagtgtgaacgtagtgaatcatcgaaatataccacacacccaacttatcggacgaatgtatgtgcgtcaagatagcgccagagagtacagctcgaataagaaatcgattataaacgataagccaatttaagatataatattttaaagaaaaaacaaacgcaaataatatttattcagcatttgaatgtacatttcttaaatgaaaagctaatatgtgttgaaattacaaaagatgatttaaacactttgaaaataacacatgttttttgtgcgcacgaaaaccgttagccgtcaaaatctgaaatggggtaaaattaagtttatatattttcatattttcaagcttatttagacagcaggcggcagcccgaatctttgtcattcgaatactattatatggacacaatactctgaactgaacagttcgacatcagtgggatttagaaggcataatcatgtccaagcgccaacgcgatgttcacgatggcgctggaaagaaaatagccaagattcggtttaagaagctcatccgatccgtgatactgaatatgcagtggctaagtgagctgcccgaggagggtggaatatcgctgaatgtgaagaagaacgttgccatgctgcgacagaagcgcaaagtgggcatgatgaccatggccgtaagtccaacgaacctcttctttcatatcaaggctagctcaagagtttattcctttttgtgtttgcttaattgcaggagaaatcgctgctgcgcactccacatgctaagcgttccgtcgatgagaggaaaaagctctgcaccattgtggcaaatctggcttgcttttcaaaatttccgccagtgagtagcgcgctgatcatttgtacatatgtataatattacttatccgacctgttaccccttttagaaagtccgcgcccgtcttgttccgattgtcaaattcatggcaatatctcccgggcgtattgttatgaaggaggaggattttcccgtaaccatttattttataatcgccggtgaggtggaaatgtctaagaacatatataaaaaggtaaactattcaaattatatataatactttctaatatgctttgcatagttatagctacaatttttcaattatgccttattaaatatatatgcttttttatttgaaaaatggtatatttcttagggctccagtcgtcctaccgtacaaacggaggccatttttggacccggggattgcattggtgatattgacgtgatggaagatacacccagaaccaacacttatatcgccacaagtaaatcgattcgtttgtttcttgacacctaatcgcatttgattctttcagcttattgcgaactcctggctatattcaatacgaactataaaattgttcttctaccgtttatgcaaaagatgtggcaggaaaagaaggatgctctgcgggcccttgactattttgactttctcaacgaagaacaggtaagtataatagtagataaaaagaaattataatataacttgtttgtaagattgtaaatgccagtaagtatggaacaattcagcaattcgagcccttggagacgatctacaccgaagacttgggtaccatgagctatgtctattttgtccttagcggggaatgcgtggtgctacaatgccttcacatgaaggtgtgctatctgctagaaatctcgaatttgacagaaatatgcatatagtatcgttttatccatcacaggtcaatatggtgaaccgggaaaaggtgttccagctgccaaacatttataatctcaaaactggacctctcctggatgatgacacaggtccaaacgataacgagccgctctttgatattaacgagtacgtgcaatccacctcatcgctggatgaaaacgaacagagcaagaaaaggaaggtgagctctaaattaagtatcagtatcataaaatgaaaaaaattcgcgacacgttcaccatatacaatcatttttgtatataactttgtatacaagttatatatccctttttcgcatccagatacggaatctgtgcatcgttatcaaccaaatcgtttggatcttaacaattcaatttcaattttaaatatgacttttttgtaacacagcgtgcttcttttcttatttggcagctgcgcaaaatgggacttcaggagatacagcgactctgcgacgaaataaagaaaccagtatctaggagatccaccaaggaatcagcacgccaacggctgcgattgcgacagcgtgggcgggacgcggaacgtcagataacgcgaaagcattatgagttctacctaatgggcatgggtggtgaatcaggcaacatatctgaggatcttagcgaggaattatatagtgatacttctgatatgccgacaatttcaacagtcgccagcgccgaattcgagagcgaatcggagggttccgaaatattcactgcttccagtacttcggaacagggaaatgtcgaagaaacggtcagtcaggaaggttttgaaacgcatttcattgacgtcggctcgctgacattcgggggaatttttggattgggcgagaaaatggaacatcgtgtgattatggcaaggaccacggtgcaatgcatcgtgataccacgcttttggctttttgagcccgcccaaaatcctggtaacttctggcagcgtcagcgtttctacatcgagtgcaatattccaaccagggaggatttgttcaaggactttatcaagacacgaaaatgggaaagattcagacgtgactatatcagtagcatacttaataacgaatcattggccaactttacaaagcatgaagatataccgataataagtcacattgtggagacaaaatctgacgacaattaagttcgtcttcaatttacttgccacttgaatatatttatacatttccaactttaaagcattattaaatcattagtattgttttcaaaattccttgagggtagagaattgttcgatttgaatacacaaatatttgtgtttgaaatttaataaaaaggcacttgggtattatagcttggatttgttaaaaactaaagtgaaattgatcgatttttcggttgggaacatgttttttttataagattgtattgaactacgtatatgtttggccgcgttaaaactagtgaaatcgtctcacttcttaaattacgaaccatgtattttattgttagtagttgagagttgtaacaaattgcattcaagcgtctgtacggaaataatggggcatacaaattcaatttaaaataattatttatcaatgaagaccttgcccattttacctctcgcaaaagtgaaaacagttttggccgatttaaaaaagtagacttaaaaatgcagttattaatcggtttttggataactctcgcatttgttatttatattttcgcaggtgagtaaaccaaaatttccgattgtaaaaatcacgctactctttttttttttattaacaggacacatctataatccaaaacgaatacttcgcgtaaaggatccagatttaaatctgaactttggcttcttcttatatttattaaagccattggcttcgcacgatggatgttttgctgattatgataatacgaggttaaccaaccgatatagaaaaatgaccgaagtgtcatttaataataaatacaatcaaacatgccgtctacactacattccctatcataaattcattaagtcaaagattacttcagaaaccaaaaataaaagtaactatcggacgctcttcttaaatacgattcttagctggcggaatggagtcttcaaccttttcccagcttggaactataacttattttgggtaagttgtgagtttgaaataagaatgcaacttttt

SEQ ID NO: 39245 - DNA, 1497 bp, DROSOPHILA
atgcagtggctaagtgagctgcccgaggagggtggaatatcgctgaatgtgaagaagaacgttgccatgctgcgacagaagcgcaaagtgggcatgatgaccatggccgagaaatcgctgctgcgcactccacatgctaagcgttccgtcgatgagaggaaaaagctctgcaccattgtggcaaatctggcttgcttttcaaaatttccgccaggctccagtcgtcctaccgtacaaacggaggccatttttggacccggggattgcattggtgatattgacgtgatggaagatacacccagaaccaacacttatatcgccacaacttattgcgaactcctggctatattcaatacgaactataaaattgttcttctaccgtttatgcaaaagatgtggcaggaaaagaaggatgctctgcgggcccttgactattttgactttctcaacgaagaacagcaattcgagcccttggagacgatctacaccgaagacttgggtaccatgagctatgtctattttgtccttagcggggaatgcgtggtgctacaatgccttcacatgaaggtcaatatggtgaaccgggaaaaggtgttccagctgccaaacatttataatctcaaaactggacctctcctggatgatgacacaggtccaaacgataacgagccgctctttgatattaacgagtacgtgcaatccacctcatcgctggatgaaaacgaacagagcaagaaaaggaagcgtgcttcttttcttatttggcagctgcgcaaaatgggacttcaggagatacagcgactctgcgacgaaataaagaaaccagtatctaggagatccaccaaggaatcagcacgccaacggctgcgattgcgacagcgtgggcgggacgcggaacgtcagataacgcgaaagcattatgagttctacctaatgggcatgggtggtgaatcaggcaacatatctgaggatcttagcgaggaattatatagtgatacttctgatatgccgacaatttcaacagtcgccagcgccgaattcgagagcgaatcggagggttccgaaatattcactgcttccagtacttcggaacagggaaatgtcgaagaaacggtcagtcaggaaggttttgaaacgcatttcattgacgtcggctcgctgacattcgggggaatttttggattgggcgagaaaatggaacatcgtgtgattatggcaaggaccacggtgcaatgcatcgtgataccacgcttttggctttttgagcccgcccaaaatcctggtaacttctggcagcgtcagcgtttctacatcgagtgcaatattccaaccagggaggatttgttcaaggactttatcaagacacgaaaatgggaaagattcagacgtgactatatcagtagcatacttaataacgaatcattggccaactttacaaagcatgaagatataccgataataagtcacattgtggagacaaaatctgacgacaattaa

SEQ ID NO: 39246 - protein, 498 aa, DROSOPHILA
MQWLSELPEEGGISLNVKKNVAMLRQKRKVGMMTMAEKSLLRTPHAKRSVDERKKLCTIVANLACFSKFPPGSSRPTVQTEAIFGPGDCIGDIDVMEDTPRTNTYIATTYCELLAIFNTNYKIVLLPFMQKMWQEKKDALRALDYFDFLNEEQQFEPLETIYTEDLGTMSYVYFVLSGECVVLQCLHMKVNMVNREKVFQLPNIYNLKTGPLLDDDTGPNDNEPLFDINEYVQSTSSLDENEQSKKRKRASFLIWQLRKMGLQEIQRLCDEIKKPVSRRSTKESARQRLRLRQRGRDAERQITRKHYEFYLMGMGGESGNISEDLSEELYSDTSDMPTISTVASAEFESESEGSEIFTASSTSEQGNVEETVSQEGFETHFIDVGSLTFGGIFGLGEKMEHRVIMARTTVQCIVIPRFWLFEPAQNPGNFWQRQRFYIECNIPTREDLFKDFIKTRKWERFRRDYISSILNNESLANFTKHEDIPIISHIVETKSDDN

SEQ ID NO: 39247 - DNA, 2745 bp, DROSOPHILA
ctgtagatcacttaaaagaatggtaaaaactatttgaggaatatttgtgtttactactcttcagatattaaggctatatttaactggaatatttttaaagtattttttgcttttttatttgtcttttttttttagaagcgcaataaagtaacaaattgattacctcataagactaaattttgaggaagtacaagtatgttgtatgttaagcaaagatattttaatagagtttattgtgtgtcttaagttaaaactggcaacgaaattgaaatgtttgtgaatgaaattaacaccacccggtacgcacacacacacacacacatatgtgcagaccgactcagacaagcacacacgtacgtatacgccgaaatgcaaatgcaaattgcatttgtttgcgttgtgtcatttgtcgcttggatggaaccgaaatgatagggtcgtggagggggagctggtgggttaagggagaaccggggctgactacaactctcagctggcaaatgtgacaacttgttacaaaattcatcaacttatgaaatataaatcacacaccacactggaggagtcagcagagataaaacgatggagagtgccagttcatctagaatattctacagacgtcattagttttgcaggcccaaatggctttgcaggcttaaaaccatttgaatccaattttcagagctaactttagcaggcctttcgaaagtactatgggctattttgaataagtgcggtcaaatgtacgcttaaataagcgcagaattgatctcctaaaaaaccagcaagctcaaaatcaatttgctattagtaggcaacagaatttcgtgtattttaaaagtttatatattatttactttttacttaatatttactccctccatcccattgtacttcctacttgaacggttttaaattcaacctcagcaggccgatttttcgaaatgccaagacctggaacacctagccggtataacaattcattccaacgccatcaccccaaccgttaacaactattactataagataaattcatttcgacctagccgttttttcacctccaacaggcaagtaaaaacgaaaaaaatttcatattctttttttttttttttagaaatgtacacggtagaaatttaacttctctttttcttgcagtccaaaatgtcagaagaagaagccccaggatctccgggtgaggctgttgaagaagaagataccactacatccgatgctgatacaaccacagctggtgcccgcatgatgatgatccacccatggctgacggccgccgcagtggccatgtatgccaccaaggtcatgtgggtcaagttccgtgagatcggcctggctaaacaggaaaaacggctcaaaaatcaactggcgaagcagtctaagcccttgcagactattgatgaagatgtttccgaatctgatgcagaatatgatgcagaatctgatgcagaatctgatgcagaatcagatgcagaggacgaagacgtcgtcgggccccaagtcgaagatgcagcagagggaccgggattcgagccaaaccgtgtggatatatgccatcgcccgatcgaagtctctactgactgctgatgttcgaatcggggatgaaggaccgcggaaggatgaacatgcacacacacactggacaactacactaattgttgtaatgcttgcgttttccgtaggggaggatccacggacaatgtttgacatgtaccaccacattgggggacacaaattgttagttttaaaacattaaccaaatttcttgtaccacattgcgatatttgaattagtttttatgagtttatattaaatgctgcgatgaaagtatggtaccctattaacaaagagcaattcgttttgggagggggaaataagaaatcgtctactacgacacatgggcaggttcgatttcagttttcccatatggcaacagattctttcgtatcggtgtggtcatccaagggctttacttttgtgttaagattttcaagaacaaatttggattcacgtcatctcgataccatacacctaactgtcaaaaaactgcttttatataagattattgtgattaattccctttaccaggcaggaaatacaacatgagtgagtccgcatctgaggacacagattctgaaggggttgctgccgtgccagttcccgataccacgcctcgcgatgcggacgccacaacttccggagcccggatgatgatgcaacacccatggttgacggcagccggagttgccgtctatgccaccagagtcatttgggtcaagttgcgtgtgctccggttggccaaacagttgcgcctccagaagcaaagattttggaagtctaatccctggcaggacaatgaatctggctctgaggcagagagtgataccgatggcgaggaaggcgattctgacgagtctacagatacagatgtgaatcgtaatagaattgaagctactgataatgatcggttagtccgagtgccgcaatagtttttcaagatgtttttcgaatttaaattcaatgctgcaagttattaacattgttagctggattagagggtaccatatgctttaaaatacaaatcgtttctcatattcaattttaaaataccattaacgattgatatcactgctttaaacaatgcccatataagcagtttgaaaccagtttatctactgtcatttttcagattacagattaaatgcccaactgaatcgtcaaaaggcctttaat

SEQ ID NO: 39248 - DNA, 657 bp, DROSOPHILA
caaccgttaacaactattactataagataaattcatttcgacctagccgttttttcacctccaacagtccaaaatgtcagaagaagaagccccaggatctccgggtgaggctgttgaagaagaagataccactacatccgatgctgatacaaccacagctggtgcccgcatgatgatgatccacccatggctgacggccgccgcagtggccatgtatgccaccaaggtcatgtgggtcaagttccgtgagatcggcctggctaaacaggaaaaacggctcaaaaatcaactggcgaagcagtctaagcccttgcagactattgatgaagatgtttccgaatctgatgcagaatatgatgcagaatctgatgcagaatctgatgcagaatcagatgcagaggacgaagacgtcgtcgggccccaagtcgaagatgcagcagagggaccgggattcgagccaaaccgtgtggatatatgccatcgcccgatcgaagtctctactgactgctgatgttcgaatcggggatgaaggaccgcggaaggatgaacatgcacacacacactggacaactacactaattgttgtaatgcttgcgttttccgtaggggaggatccacggacaatgtttgacatgtaccaccacattgggggacaca

SEQ ID NO: 39249 - protein, 145 aa, DROSOPHILA
MSEEEAPGSPGEAVEEEDTTTSDADTTTAGARMMMIHPWLTAAAVAMYATKVMWVKFREIGLAKQEKRLKNQLAKQSKPLQTIDEDVSESDAEYDAESDAESDAESDAEDEDVVGPQVEDAAEGPGFEPNRVDICHRPIEVSTDC

SEQ ID NO: 39250 - DNA, 4597 bp, DROSOPHILA
tgacaacaccaacactccgtttccccccaagctcatgtgcatgctattcgtattttatttttacactccgaggaaaacaaattcaacggaaattaaatcacttcggcgtcgggaagtctccgcggatttttggcaccaaccggaaaattgttcattagcaatttgtgtaattaaaaagagagagtgcacgggcacaaaagtggtgtccttcacagcgctggtcggtattcttccctttctccacttaaagtggccccagaacttccctttcgactggctaatttgttttccgcttggcagtgacacatggggacagtctggatggcgtcatgttcaacttttgacccgttcgaagcagccatcgcttgctaattttggagattccttgcccatctgctcgggcttcaatataagcgcactgagcgaaaaagagtcatcatcaaataatataagtatgatcttaaagcaagatattatatagatttatgtctccttaaaagtaatcttaagtagaatagtttggttttattttagtagcatgttctagattataacagacttaccgattttagaacccagcctttttttcccgatgtaattaagcaatgggcttttgtttttagccaccttatcaaagctaatcaagcagattaatgaccgcctgaacttgccaatcgtctggcgtctgttgaccaaacagtctgtcgtctggtaggcctctattgccaaaagcttgagagttcgtttccagttttagagcggctttagttttggcagttcaatttgatacactaaggcacaaatgttttatgcaaatgatatttaaatgaagacaatgacaatacaagcaagtacgagtggagaagaccatgttgaacttgacggactgtcgttttgctctacactgtaacacttatttgaaagcttttaacccaaatgaacagcttgtctgcatatatttgcactgtaaggccacattatacaaatagtaactattcaaatgatgcatatgaaagtgagattcggtcgaaacaactcctcctggtcggcgtagggtatcacagttgaccattggcgtggctcgtaaaattctggtttctggcatattaagagactctgatatccgcatttcttcgctcgtattaatgtttatttttcgcttctgcaccgcgcccaggttttgatataaataccacctagcagatgacaccgaaccatactagaaacgtccacgttccaagtaacatacatccacaatggttagtacgaaattaaaactgaatactctgggtcctgattaatttggtaaattattgtgcagaaattcctggttgtcgccgtcgccctcttggccgttgcccacgccgatgtgtcccacctgtcgggctacaactatgctcccgtcagcatcccacagccggctccattgcccgtggccgcgcccgctcccatcaaggttgcgcccgctcccgtgaacacctacattccccccgcacccgcaccagctcccgtccagattgaagttcccgctccagcacccgctccagtggccattcccgctcctgctcccatcaaggttgcccccgctccagtgaacacctacattccccccgcacccgttcaggttgagattcccgccccagctcccgctccagttgccatccctgctccagctcccatcaaggttgctcccgcacccgtgaacacctacattccccccgcacccgtgagcatcccagccccagctcctctgcccgtcaaggtcgccccagctcccgctcccgttcccgtcctggctcctcagcccgttctggaggagatcgagcccgtgtccgccgatggctaccgttacaagaccgtccgccgtgtgatccgtcgccgttactagagagctactccatcgatgatctccgccaggagaaaaattattaaataaaataaaaaaaagttactatctaaactttcactgtgtttgtcttataatttaacaatttgtataaaaacaattccttatcctttattttttctgtatagcagtttagaataacctttataggtactctaaagatgaagatagaaatgtgctcgattaccagacatataatatccaaaactgtgatgcatattctaaagaataaaataataggcgtacaatgtaaaaaaaaagtaaataaatataattaaactagaaatcaaaacacatatccaaccacttttttttagatacatttcaatctttttggcgagcacatcttttactacttatttgcacccaccgaaaacgtgttcaacgtctgccagccaaatgatgcgacgtagaaatactataaactattttattagccaggtgttcgaaaaagtcagagtcagtatccggacctgagtaattaattaagcttcgccagacattttcaagatcaacataatctaaacaaattgaaattaattttggcataaacttgaaacgactccataggcccggccccaggctaatatttcgcccagctcaaaaagcagaaacaagggaattgaaaacgaaaaaaataatccaaaagaaataaaataattattaaaacataaacccaagccaatcttgcgtgtggcccacgaccattcatcaaaataaaaacataatggctaaaaaacaaattaaaccattatacagcgtgcaacaataggtttgtttgatctaattaaagaagcttttgcagtatctgaggactgaagacaaaaagttggcccaagtcaaagcagcgataatgcgattttggataccaaaacctgaaaccaaagccaaacgaaacgaaacgaaaccagaaaacccgtcaaaccgccttggcattggaggctcgttgtcgtgtgttcggtatcgcttgtcttccgacttttttgagtgaggtgaagacccccatgtatcatgggggcatcatgcaattaatttggctccggttgacccgcagccccaaaaaacaatgagctataaaaaccgtagtcacacttcgagttcagcagcacaaatcaacttgtgatccaagcagcaacaagcccatctcctcaagatggtaagttcagggattacactacctaaaggataatcggcaaaatatatatgctaaaatttgattgaaaaaaatatctaaaccatatgtatttccatcctagaaattccttatcattgccgtcgccttcttggcctgcgcctacgctgatgtttccgagccggctgccggaggatacgattacccccagcccgctccaccggcgcctgtgaagagctacattcccccaccgccaccaccacccccaccagcacccaagaacacctacattcctcccccggctgctcctgccaaggcctacatcccacccccaccaccaccaccaccaccggcgccaaagaacacctacatccctccagcaccggctccagttgctcccgtggagacctacatccctcccgcagccccagcccccgcctacatcccacccgctcctgtccaggccgaggagcccatcatcgaggagatcgagcagccagcccaggacggctaccgctacaagaccgtccgtcgccgcgtcttccgtcaccgcaactaagtctgtgtcccccaattgttgactaatgtgataggccccaggcaatgttcaccttgcccaggtatcagttaatgttttctttaaagatggatgtgaagagtaaataaataatcaaaaagcacaacagtctctattacgtataaatcaaaagacagtaggctgacaaaaagggctcaaaaatacaagttatgcaacatgttcccgcaaagaaatcaaaacacgactctcaccggacgtggaggatcccttccagaatgtgcccgattggggaaggccatagaagagtgccctgttgcgcggtcagatggcttcctgctctaataattctgggctttttggtatggtcctaccacgtatttgtttaccaaatctgcataaagaaagtttcggactacttgaccattggactgttgctctttttctaccatctactgttgttcatgtttctatggacatggtttcggtgcattttcgtagctccagttaggattcccgatcaatggaaaatatcacccgaggatgtcgacaaattgaagcgaaacgatggaatagagggagcatctcgagtcttaaattatgcagctagaaatttacccattgccacgtgcaccatcgatggactagtgagatattgcaagacttgctggattattaagccggatagagctcatcactgtcgaacctgccacatgtgcgtcctgaaaatggaccaccactgtccttggatagtgaactgcgtgcactttcacaacttcaagtacttcatactcttcctgttttacgctgaagtatattgcttttatctgttctgcgtaatggtctatgatttgtacctgatttgtggctttgaagttactgccctgaaaaatcagcattcctggaacattcttcagtacttggtatgcatactctttaacatattcaccgtgattatgtacactgtcagcttgttaaacgtatctcgaaatcgcaccactatggagtcggcttatgccacata

SEQ ID NO: 39251 - DNA, 996 bp, DROSOPHILA
atgatgcatatgaaaaaattcctggttgtcgccgtcgccctcttggccgttgcccacgccgatgtgtcccacctgtcgggctacaactatgctcccgtcagcatcccacagccggctccattgcccgtggccgcgcccgctcccatcaaggttgcgcccgctcccgtgaacacctacattccccccgcacccgcaccagctcccgtccagattgaagttcccgctccagcacccgctccagtggccattcccgctcctgctcccatcaaggttgcccccgctccagtgaacacctacattccccccgcacccgttcaggttgagattcccgccccagctcccgctccagttgccatccctgctccagctcccatcaaggttgctcccgcacccgtgaacacctacattccccccgcacccgtgagcatcccagccccagctcctctgcccgtcaaggtcgccccagctcccgctcccgttcccgtcctggctcctcagcccgttctggaggagatcgagcccgtgtccgccgatggctaccgttacaagaccgtccgccgtaaattccttatcattgccgtcgccttcttggcctgcgcctacgctgatgtttccgagccggctgccggaggatacgattacccccagcccgctccaccggcgcctgtgaagagctacattcccccaccgccaccaccacccccaccagcacccaagaacacctacattcctcccccggctgctcctgccaaggcctacatcccacccccaccaccaccaccaccaccggcgccaaagaacacctacatccctccagcaccggctccagttgctcccgtggagacctacatccctcccgcagccccagcccccgcctacatcccacccgctcctgtccaggccgaggagcccatcatcgaggagatcgagcagccagcccaggacggctaccgctacaagaccgtccgtcgccgcgtcttccgtcaccgcaactaa

SEQ ID NO: 39252 - protein, 331 aa, DROSOPHILA
MMHMKKFLVVAVALLAVAHADVSHLSGYNYAPVSIPQPAPLPVAAPAPIKVAPAPVNTYIPPAPAPAPVQIEVPAPAPAPVAIPAPAPIKVAPAPVNTYIPPAPVQVEIPAPAPAPVAIPAPAPIKVAPAPVNTYIPPAPVSIPAPAPLPVKVAPAPAPVPVLAPQPVLEEIEPVSADGYRYKTVRRKFLIIAVAFLACAYADVSEPAAGGYDYPQPAPPAPVKSYIPPPPPPPPPAPKNTYIPPPAAPAKAYIPPPPPPPPPAPKNTYIPPAPAPVAPVETYIPPAAPAPAYIPPAPVQAEEPIIEEIEQPAQDGYRYKTVRRRVFRHRN

SEQ ID NO: 39253 - DNA, 2597 bp, DROSOPHILA
cttgtttgctgctcattattcgacgttggctggttcggagacgtggctgtagttggtcgccaaatgcacgagcgcaaataatttttgccacttgcatgtcatcagcataaagtgagtgcaaaatatgtgaacttcgcagcggaaattcgccttagagcgcagagtcaacagcaattggcccaaatgacttgtaagcgccgtcagacggaggagacgaggtatcctgcccagccacatgtccttgtcgccatcgccctttctgtccagccagccaagctaaccaagcaaccgctcgcagcttattgaattcgcatattttcccattttgcattatgggcaaacattttttccatttcggcatcctttgtttttgtcctctgtttgattttgtaatcgaggatttgtttgctttggctgagtccaagccaatcgattgccgggaaggggaagcgctttttgtccctgctcattgaatgtttcagcaatttttggttaagtcaaattggtctagtcgacggtttgacctttttactgccagactttcgaaatggggagagaattcattggaatgccagtgttggccagaacatgtgtttgtccttgagcggtttgtttaggcctttgtgggttggtcggggttaaagagggttggatgacggaaaaaccagagggggcgatggttatcgccaaggaaaccccattcaaatggcgactttggcattgcaaattgaacttgggcacttggacgatgggaacctgttgataaggcgattgaatttaaaaattgtccttccatacatcgattaggaagtattttatgtatagttttaaattttgtagtatattttcctgcgaactcaactttgatagcaaccaaagaaggacaagacaacgaataatttttcacagatagatatttactctccaagtgaatttctaaagatggtattcagcaattgcactcgagtcaacaaattaacaataacaaatggctttcatcttagttgcggtgacggaagacgtggcggcggacggtcttgtagcggtagccgtcctgggcgggctgctcgatctcctcgatgatgggttcctcggcctggacaggagcaggtgggatgtactcgggtgctggtggtgcaggtgggatgtaggtctcgacgggagcaggtgctggcggtgcaggtgggatgtaggtttccacgggagcaggagctggctgctggtagtcgtagccagaaagctccgagacatcggcgaatgcgcaggccaagaaggcgatggcaatgatcaggaatttctgaatatataaaaaatataaagcaaatgttaaaaaaacaatcgttggaaaggcaaagataaatatttgttagagcgaaaacccagcaactcaccatgatttcaagtgtttagactgcgctcaacgaaagatgtgtgctgtgaatgcgatgatctccgatggcttttatatgcccaaaactgtttggccaactcttgccgacggcaacggaagcaacactagatccaaatgactttgaacttgatctgttgctgatcttcaatcgctcaccaatgacttgatcgatgaatccggccgcatcgaaccggttgtccggcagttttggatgcacaagccataaatcgaatggaaaaactttgatcacgtttcgtgtatttgcttttgtttgcctaatgcatcgcttgtcccattgtctttttaaaagtggtcaagtgatgacttcgtttgaggtcaaattcgtatcaaaaatcttgacttttgccttttgtttgacgctcgaggcgcagccctttaattgatttgcttgttgaacacggccttgtggctcggcccccgcatggaaaatacatgagtctctggctctgcttgattaaaaccaaatttaatttgcatctcactttagctggtttatttggcttcgttgtgattaaacggctggtgtttattgctggacctaaccccaattacaaaactcgaaaaggaactgcagttgcgaagtttaagtggacgcaaatgttctgtgaaaatctatctgaaattaaacagtgggaaaattcggggggcttaatttattgtagctcacttaaaattgtacatagaaaaatttaaatataatttatttttgttcaaactcggcagatattgataaaattaaaagaattttttgataaaatacacttttaaggaaaattcaactgtttaaaacaaaatgcttgaacataacgattatcttatatatgaatgtatttaatagctcacattgttactattgttataagctatcaattgcatccctattgttcatcttttgctaaacaattccacatgatttttccgactgccttggcatattttcattttggtattctcatggccagcattttcatttcttcgtttcgctttccactgttgtctgccttgtaacttttgtagctcttgataatattgcaaataattttcttttttatgttgattattttttggacaccctccgcagacacctgagactcacctggctcgccccctcctccctttacaaccttttttattaacttcgttttcatttgtgccgttgccttca

SEQ ID NO: 39254 - DNA, 327 bp, DROSOPHILA
atgcggccggattcatcgatcaagtcattgaaattcctgatcattgccatcgccttcttggcctgcgcattcgccgatgtctcggagctttctggctacgactaccagcagccagctcctgctcccgtggaaacctacatcccacctgcaccgccagcacctgctcccgtcgagacctacatcccacctgcaccaccagcacccgagtacatcccacctgctcctgtccaggccgaggaacccatcatcgaggagatcgagcagcccgcccaggacggctaccgctacaagaccgtccgccgccacgtcttccgtcaccgcaactaa

SEQ ID NO: 39255 - protein, 108 aa, DROSOPHILA
MRPDSSIKSLKFLIIAIAFLACAFADVSELSGYDYQQPAPAPVETYIPPAPPAPAPVETYIPPAPPAPEYIPPAPVQAEEPIIEEIEQPAQDGYRYKTVRRHVFRHRN

SEQ ID NO: 39256 - DNA, 2546 bp, DROSOPHILA
ggggcaatgcaacatgtttgagtgagttcgatggtagggtttttatatcaaaccatcttcacgatgaattctaatgaagattgaagttgccgggttgggttctttattgaaatctgattgatagcgaaccgggcatcgctcgttcatcaacactcattaggaagagcactatgcaagggcgttggggtgtgaaatcaaaggaaaagataactaaaccaacctcattccaactcacaccaaaggacacatgtgtgccctaatcaaaacatctcacgtgaccgaaactgctctaaaatgcaaatttctcgaggctaataaaaatgttactcatatgcgtggaagatttcccaagtgccgaaggcgaccaaagagaaaattcgcacgcacgtctgaagctgaaaactattacgcggtggcggtttttccaccccggttcggattgccttctgtttgccaattttcgcgataatcacacaactaatttgcatagcactgagaccagcaaatctgggctaatcaaatcaagcaaacgaacaaactcaatttgcggctgaagtattaatgcgaacttatacatgttttattttaaatactctataagaaaggttgtgagtttcaatttgtactggcctatgtttttactatgctacactaaattagtatttcatttttatgtataatagtgtttactccaaatatacatttcggaaaagtacacacaattacatattttgtattttatcctaagaaaatggtgtagattagtttaatctaggaagcggaaataagaattcctccaagtctccttttaaatatttctagtagagcatttcaattttggaaaggggctttttccaagcctacgcagatcttaagtcttacgaaagcctccatcatcatcgcatccatctgttattgctttgatgggactatgcaaatctcggcttgcgagatagcctggcatttcatttcaaataattttagggggaggccagcagaatcccaggcaaagcaaacaattttccaaaagaaataggcaaaattcaaaattaccggaggatggcgcaaagggaacgcaaggcaggagttgtaaagagggacaaggcagataagtggaaccatgtagagacggctcgatactttagggatttgcaggaaaatgaggtgcgaacgatgcattatttggggctggcctacgtggttttgtctcgtcgcccaaatttgcaattgaaagttccactgtccactcaaaactatgaagatggagccattgtgggagcaggggagcgaggaggctatgccctccagttgctcttcacctgtgctgcgaactatccactcgcaaggccgctggtggagatcgtggagaagcgcaatgtgagcgacgcctttgagcaggttctccgcaaagagattgacctgattttggaggaacatcttggcctccagatgattgtgccggtggtgacccggctacaaatcacgctgaataccgagatgaaaaggcagcgcttttaaataaggtcacgcataagttgttttttgccatattatgcgtaacagttatttgtggtcaattttaagtacaataaaattaagcattttccataaatatgtactatgattactgcccatcttcctttttctgtgttataatcgcataatatatattttaaaaatgaataatctcaagtaattgctcggcttttcggccttggtctttgccccagttgtttacaacttggcgttgacgtgaatggccagcactccgtcgtcctcggagctgccaatgtagatggaagcccgtccgtcggatccgacggtgacggtcttgcccgtgcaggaggagccgctcttggagccggaaatgacgtcgcagtaggtgccggcgggcaggcccgtctgcagggagctgttcaggtcgtagttgtcgttgttgaaggccacgaagccgcggctacctcggctgaaggagatctgattgctgccgctgtcccaccagttctggatctcgtccaagcccacggcgttccggaaggccaccatgttgtagatctggcgccagcggtgctcgcacacccagccgccgctgcaggagttgtcgctattgaagatgggcgaggcgatgttgtggccgtcggtggtgggcgggccctgatcggtgtccgtgaaggagaaggaggacatcacgcggggagtgccgaatgggtgcgccagcatgaaggcggaggccatcttgtactgcttgggcaccttgtaggtcagcacgtcggcgcctcctgctccatgtccgcgctggttgtcgtggttgtcgacgaataccagggagcggtcggaggcagcgaagccccaggcggtgccccagttggtcaggtactgcagctggtccttgccgcggaagaccttgccgatggagtcggagtggcggaactcggtgatggcgcccagtccggtgtactcggacttgctgatggcctcgccgcccatgtcgatgacctcctggacgatgtacgccttggatcccgaggcgaagccgtggtcggtgt

SEQ ID NO: 39257 - DNA, 546 bp, DROSOPHILA
tcccaggcaaagcaaacaattttccaaaagaaataggcaaaattcaaaattaccggaggatggcgcaaagggaacgcaaggcaggagttgtaaagagggacaaggcagataagtggaaccatgtagagacggctcgatactttagggatttgcaggaaaatgaggtgcgaacgatgcattatttggggctggcctacgtggttttgtctcgtcgcccaaatttgcaattgaaagttccactgtccactcaaaactatgaagatggagccattgtgggagcaggggagcgaggaggctatgccctccagttgctcttcacctgtgctgcgaactatccactcgcaaggccgctggtggagatcgtggagaagcgcaatgtgagcgacgcctttgagcaggttctccgcaaagagattgacctgattttggaggaacatcttggcctccagatgattgtgccggtggtgacccggctacaaatcacgctgaataccgagatgaaaaggcagcgcttttaaataaggtcacgcataagttgttttttgc

SEQ ID NO: 39258 - protein, 152 aa, DROSOPHILA
MAQRERKAGVVKRDKADKWNHVETARYFRDLQENEVRTMHYLGLAYVVLSRRPNLQLKVPLSTQNYEDGAIVGAGERGGYALQLLFTCAANYPLARPLVEIVEKRNVSDAFEQVLRKEIDLILEEHLGLQMIVPVVTRLQITLNTEMKRQRF

SEQ ID NO: 39259 - DNA, 2357 bp, DROSOPHILA
ccttccagatggttgtggtctattgaattcatttcctggctgctgaaaacctggttggcccctgttgaaatctccacccggttgctggaggcctggatgtcccctgttaaaatcacctacagggtagggatattcctgttgtcctctatgaaaaccacctccatgttggtgaaattgactgccaggttgtccttgaactgcaccgacgttcggataatacggttgacgacctcctgatggttgattatctggataatacgaaggaggcggtggaaaacgaccgaagacaaagggaggtggtccaatggatcctgggccatatcctgacccatgtacgtgatgaccatggtggcgatgatggttccttaatagaaaaaaagtattagtgatacaaatattataaaatcataacaatcttattaattaattttaaatactcacggatatccatgtccgccgttttccacgtagtaaggattctggggacgagctgaagtccattgtccactgattaaaaggatcagtgacatagccaaccttatagataagagttgcaaaaacattttcgacacgaaatcgacccaacggcagcgttgaatattcaaaacagactgagcagcgctgtcgagtcgagaacagacgatctaaccgagtttagtatttattatgagccgctgataagccaagttcatgacagcagataaggcatcaaattacatagcagaagagtagggaataactgatgcagctgaatgcaccgggaattgtttgagttagacactgactcacagtgatggccaccaaactaaaattactgcgttttacacgacgctaagtttcccccaatagcgtttctcccacaattgtgatttgggttttctatgggtatttttgtctgcctccgaatcgtttataatagtcaccgaaaaaaccattaatcaatcaaaagttctacacaaatatcactttattggctaacatcaatcttagcgactacagattacgccggctttctgcatcgttttccgaacagctcaaagccaggcttacatttttgggtcgtctccagcaatattcggttgtctataactggcagcacagtggtgttttcattaaccagctcctccgatccgctggtgatctgttctgtgctgtttgtactttccaaacggagtgctattgtggatgcgggttcctcagttgtcgttgtggtcgagtatgtgaatctcgagctggtatcgtcgtcatcctttggaaaaacgatgcgatcgttaccactgggccgtgttctcgcctcggtgaggaggaagaccagcggtaggatgcacagcaccaatggattaatacgtatcaacattatctccgagatgcacgctcgtttgctacgatgaagcttcgatgactgagcgcggaaacaactggctggccatttacattcagattttcattcccagcgaaaccagataaatgatgggagcaaatcgttgggagacaacaataagaatggcaagggagctcataagctctcccatgaaaacaaaacgtaaacaaagcagaagagtagcgttaagcttttcagatatatctcagctagtctacactgacagaactgaattatcataaagcttttttttaatgaaatatgttggtgcccagctatttcgaacgtttttttttttttttgttgatttgcaatgcaataatttacactcaatacttttgaatttatttcttacatttttgtcaattaattctcacttctttccacttttatggctctaatctaggcaattttccggcaacgatcttttactgtcagagtagtgccgtttggacaaattcgcgttgtttccaggacaattctaggctcaatacccaaactagtggaatcgctagcaatggttggtttcgtattatctgactctgagggaaacgcaaactgatcgctagacactcgagctgcacgatttgtatccaatgccagacacagccagacaaacaaaaatagcatcttcggccagggaagacgccgcgtaattgccatcgtaaagttggttttgtttatttgcaatcgacagagtctctgaagtctcagtttccggctctgtctcactttctgattcagattcggattcacttcgagaggataactttaaaaggaagctcaagtaaacacattcacttcattcaatatcgcactaagttctaaatctgtggaggttcaatttttaagaatttatagcagtttctaagaccctaagatattcatcccgtcgtagatactataaaatattatttaaaaattattctaagtgtgattcagtttttcagcaccttattatagagcgaatcacttg

SEQ ID NO: 39260 - DNA, 357 bp, DROSOPHILA
atgttgatacgtattaatccattggtgctgtgcatcctaccgctggtcttcctcctcaccgaggcgagaacacggcccagtggtaacgatcgcatcgtttttccaaaggatgacgacgataccagctcgagattcacatactcgaccacaacgacaactgaggaacccgcatccacaatagcactccgtttggaaagtacaaacagcacagaacagatcaccagcggatcggaggagctggttaatgaaaacaccactgtgctgccagttatagacaaccgaatattgctggagacgacccaaaaatgtaagcctggctttgagctgttcggaaaacgatgcagaaagccggcgtaa

SEQ ID NO: 39261 - protein, 118 aa, DROSOPHILA
MLIRINPLVLCILPLVFLLTEARTRPSGNDRIVFPKDDDDTSSRFTYSTTTTTEEPASTIALRLESTNSTEQITSGSEELVNENTTVLPVIDNRILLETTQKCKPGFELFGKRCRKPA

SEQ ID NO: 39262 - DNA, 3412 bp, DROSOPHILA
aaacgtattgaaataaatgtaaatgttacgtaaagataatttctgttatagcacattttgaattgaagatcatatgttcgcatataattacacaattataaaatatatatgatttaaaagcatctctgtaagacaactttaaatagctcttggcattctcctaacttggcactcaataaaaattgcaccttatggcattgctaagtgtccacaagaaaattctgcccccactcgttttcgagactttttacacaattgactcaggtcatcagagaagaccctcgattgccccctgattccgcccactcctcggttcactatcaaccaatatgttgcggttgcttccatgtccaacctggccagctggcccacctccactcggaccgagcattacccaagggacggggtggttcggctggctaaccgcatacataatttgcgacagcaaccgcaaaatgcggccgcacaggatccccactctggccaatactcagaccctgactgatatgcaagccaaggactgtcattagttagaggtccattaacaaaaatgcaaccgatggctgctgcgatggccagacgggcggaccgtcatttacaggtagcagctgcattgacaggaccccaagagcaggactccatgtgagggtccggaagttggcgcattaattcaggaggcagccatgaaatatgacgacactcgggggctctgctctgctctgctccgctgaatgagttaattaagcgtctcacggccagaaacataatttgggctcatttatcagtgacggcggtgatgcggtgcatgtaaatttgccttagcgatgggaaatgtcagccgttatccttggcaaaacacgaaagtttcattacaaagtacacaaagaaaaacaaatgcgctatagcctttgcatgaccaagcagagacctatttttctattcaaaaatatcattttatttttttcagtgtacacgctttatgcgcgaatgtctggcgggcttagagctgctgacccagaggattgtccagccagggatagacggacgggcacttgtcgcatacggtcatgtagcgctcctcgccggtggacatcttttggacgtggcactggaccgctcgacactccgcctccggcaaatcgggacagtccttgaacggggagcccagcgtcggctttctcacgtactccaacattcgcgaaattccggtgaaatacacatccgaataggtgttcaggtggttaatgaatctgcgcgaatttaattgggtagttattttcaatttgttagaaacctgaggtataaagctgctttatctttatctgtaggtagtatatggtacacggaattatagttacttactttttaaaggcaccaaagtaattgcgaccccgcgaaaaccacgcagcatgcagatacatcccgaagggtgctctattgccaagatagtgcctattgaagttctccatcatccagtcgaacagctcgtccatatcgtcctccggcgggtaaacgcaagcatcgatcatggagcaactgtagccctcagtatcggtccacgtgaccatgggattcacccagaatccgggaatggatgcctctggacaggggcctatttgacagtcctgcttagacttgtagtccagggtgtacggccacatggccggatccttgaacttttgcgttggccaggaactgtcgtaggtcaagcccaagcgacgggctgcttcaaaggtgttattgcccgaaatttggaggaacggcaggcgcattccctgtatcttcttgggatttactttggcaaaggtctctaacattttgagctgcgctccaaactctcgctcgatggtcggaacatcagctgaacgccagtaatcggtgccatctccatgggtcaccgaatgtagggctatctcgtgaccggccctatagagtgcattcaccctcacgtaatccgtgtattcgtgggacaaaaagaaggtaccggcggctccacaaccatctggattgattaatccatcgaaaagcagctcgtactgggcaaagttgacagcatttacagcgtcatcgaaagtgatggtcacgaactgggaaagaatatattcatatataagtatttataagatgcatttctgatttatcgaaagcaacggaatgtgtaatatattaagaaattgttacaaattgttacacctgcggaatctggttctccttgccctggaacttggatgtgggtaaagcggcatcggagcagcggcaatcgggtaatttgcacttgctgggtttgcagggttcggccattggcaggattccattctgcttattcttctgctttttggacttggacttggcctcgctcatgagagccacggtcaaaattaggcccagaattagcaaggtagagtacttcatgccggcctagaaagaactctatgctcagccatcgatgctcgatggtcttcttataaccttcagggaaaagtgatatcttatcggtttcttggggctccaaatatgatttgcttgttcagcacaaggtgtggctcaattgggtggggtttcctcaagtgaccttgtttcatccgcagagcaataccaacttcattcaaccaaaaagagacaaaactttcaattatagacatgccaacgatctcggagtggccaaagtttgtctcattagcataaccaaggaacttagcagctgagatttgccgagttgaagtggaaaacttttcacacttgccggagatcgcaatcgatgggcgccgactgcagcccaaattatgacagaccatcccccagtcagccaggaaaatgcacttcaaatcgtaaacaagtgcttcacaaacttttcacaacagcgacaggaagctctcaaaaacaaagcacaaggaactctcagacccccagccaatcacacagtgggtggaagtcctcaaatcccggcaggcagtgggaaaaagtcaatacaagattgaggaaaaatctgcaattcccttggggagcgaaagtagtcgaaggagccggaggagtcagacatccgtttcccgattactcggggtgcacgccccgaatgcgatttggtcacgttcctgggcgttgccatctcggctaggagccgcaaacgtggccaaccaaccgccagtcagccgaaaggactctcggaaaagcaggctgaaaactgggtggaaagtttcgacactcggcactccgacactccgttgtaggggcaatgcaacatgtttgagtgagttcgatggtagggtttttatatcaaaccatcttcacgatgaattctaatgaagattgaagttgccgggttgggttctttattgaaatctgattgatagcgaaccgggcatcgctcgttcatcaacactcattaggaagagcactatgcaagggcgttggg

SEQ ID NO: 39263 - DNA, 1194 bp, DROSOPHILA
atgaagtactctaccttgctaattctgggcctaattttgaccgtggctctcatgagcgaggccaagtccaagtccaaaaagcagaagaataagcagaatggaatcctgccaatggccgaaccctgcaaacccagcaagtgcaaattacccgattgccgctgctccgatgccgctttacccacatccaagttccagggcaaggagaaccagattccgcagttcgtgaccatcactttcgatgacgctgtaaatgctgtcaactttgcccagtacgagctgcttttcgatggattaatcaatccagatggttgtggagccgccggtaccttctttttgtcccacgaatacacggattacgtgagggtgaatgcactctatagggccggtcacgagatagccctacattcggtgacccatggagatggcaccgattactggcgttcagctgatgttccgaccatcgagcgagagtttggagcgcagctcaaaatgttagagacctttgccaaagtaaatcccaagaagatacagggaatgcgcctgccgttcctccaaatttcgggcaataacacctttgaagcagcccgtcgcttgggcttgacctacgacagttcctggccaacgcaaaagttcaaggatccggccatgtggccgtacaccctggactacaagtctaagcaggactgtcaaataggcccctgtccagaggcatccattcccggattctgggtgaatcccatggtcacgtggaccgatactgagggctacagttgctccatgatcgatgcttgcgtttacccgccggaggacgatatggacgagctgttcgactggatgatggagaacttcaataggcactatcttggcaatagagcacccttcgggatgtatctgcatgctgcgtggttttcgcggggtcgcaattactttggtgcctttaaaaaattcattaaccacctgaacacctattcggatgtgtatttcaccggaatttcgcgaatgttggagtacgtgagaaagccgacgctgggctccccgttcaaggactgtcccgatttgccggaggcggagtgtcgagcggtccagtgccacgtccaaaagatgtccaccggcgaggagcgctacatgaccgtatgcgacaagtgcccgtccgtctatccctggctggacaatcctctgggtcagcagctctaa

SEQ ID NO: 39264 - protein, 397 aa, DROSOPHILA
MKYSTLLILGLILTVALMSEAKSKSKKQKNKQNGILPMAEPCKPSKCKLPDCRCSDAALPTSKFQGKENQIPQFVTITFDDAVNAVNFAQYELLFDGLINPDGCGAAGTFFLSHEYTDYVRVNALYRAGHEIALHSVTHGDGTDYWRSADVPTIEREFGAQLKMLETFAKVNPKKIQGMRLPFLQISGNNTFEAARRLGLTYDSSWPTQKFKDPAMWPYTLDYKSKQDCQIGPCPEASIPGFWVNPMVTWTDTEGYSCSMIDACVYPPEDDMDELFDWMMENFNRHYLGNRAPFGMYLHAAWFSRGRNYFGAFKKFINHLNTYSDVYFTGISRMLEYVRKPTLGSPFKDCPDLPEAECRAVQCHVQKMSTGEERYMTVCDKCPSVYPWLDNPLGQQL

SEQ ID NO: 39265 - DNA, 2234 bp, DROSOPHILA
agctaatgtgcgcttagccccattggtgaatgtttgttcggtatttcgaattttgtttgaacgtcacatttcgagaagaactagtaatgatttgagttggttttttatggcagcttatttccacagaacaggaagaaatatacaaactgcttacaaaactggtctactacataaaagaacaatcttcttacttattaagtcgtgtgttatttgtattattaatatgtaaataatattacaaaaagagggatggcaaaaagaatgtttagtgtttttttagctaagatcagaaatttataattcagtaatacatactgctaagactaagacctgttgacttataatgaaaatctatctgccaaaactcacttacttaaaattcatatctcacgctctgaccttttgcagatattcacaaaaacagacgacaacgaactttaaaaaggtgtagaaggagaaacccagcgccgaactccgatcgcaactcttggatacatccaccagcaattgcagacccaaaattatatgccatccagcgcattcatttccataggattttggtggaaacttgcgactaacaaagcgaatttcaaatgtgaaccaatcatacaataaaaacgcagaagccaaaaataagaaaaaaaacctcaaaaaaatagcgtgcatggaaaaaaagatattgtgaaaacaacaaaagatacattaggcaaaagtgtttccaaagccaaagtttttgtatgattttttgaaagtgcagtgaaaacgaaatatgattaattaatcattaatgaatattaagtaaagcaccagcaaaacacgaacaaaacgggaaaggctgagaaaacactccaccttgcatgtggagcaaacgagagtttggcgcgcttttaaacgcccgcgactaaagacgcgttcgcgtttttctctccacaaacttgcacaactgcaagcggaagatatagccaaattaaaagcaagttagttgcataaattgcggaggatggccacctcggagcagagcaggaggcccctggagcctatctttatcgccaccccgccgcccacacccctgctccatcaccatagctccataacgcgcaccaccacaccccgcgaaatgcccacaatgtaccacttcgattttggtaagccattcataagcactttggccaattacaactgtaagcccagcgtagggagcttgtcaatcgatttcacacacaaaaaaccataaactaacatagcactgaaagaaatgaactttcattatattatataaaagatatctggttagagaacctaaagagtcgatggaaagctgtttcactttccaaccgatattaaattagtattccacacttatttaaataaatatatataattaggtaaggttttgccagtgcatttgggaaaaaatgcatacaatgtgaatgcaaacaatgtgcggctaattcaaaatactcaaatactcatgccacttccgcgcaggcgcacaatataaaaatctccaaaaaagcacttggcatgcagccccaggcaaagaaactcaaactccggctgtgttagaggaagtgtttaggaaaccacttaaagccaataaccaagaggagagggcgccgatttgaatttataatgaactcaataaagcatgaagtcactttttatgaccaactaagcatggtattccaatggaaaagcaaagaacaggggttattaaaatttttgttaggttcataaaagtgtgtagtgtcaaagattttaagggatttttccggcggatatagagaagaatctaaatattaatgtaggaatataaaatatatatgttgtaaaaaaaaaaaaacaaagaattatttattattaggagaacggatgtgaaaaacaccaaaaaagaacccatcaaaaaagctcctttcaataaaagaagccacttgaatataacaaaaccccagctttctatcactcaaagagccaagatgacatcagttattattattgcaaatactatatagtatgtttgatattgcaaaaatgagcaaaacgcacaaaaagctctcaaccaaatcaaacactgaaaacgtggaaggcatttaaaaatcgaaaataaactcaacaaacataaggcaagcaattgacaacaacgtcaaatgacatatctatgtcaatttccatttgcagtaagcagccaaaaactcaaaaaagtaaaagaaatacacaaaaagtatcacatgagt

SEQ ID NO: 39266 - DNA, 234 bp, DROSOPHILA
atggccacctcggagcagagcaggaggcccctggagcctatctttatcgccaccccgccgcccacacccctgctccatcaccatagctccataacgcgcaccaccacaccccgcgaaatgcccacaatgtaccacttcgattttggtaagccattcataagcactttggccaattacaactgtaagcccagcgtagggagcttgtcaatcgatttcacacacaaaaaaccataa

SEQ ID NO: 39267 - protein, 77 aa, DROSOPHILA
MATSEQSRRPLEPIFIATPPPTPLLHHHSSITRTTTPREMPTMYHFDFGKPFISTLANYNCKPSVGSLSIDFTHKKP

SEQ ID NO: 39268 - DNA, 2505 bp, DROSOPHILA
catacatataaaaaattaaacaaaaaatcatatatatgtaactctcattgtagaaaattctatgattcaatatcatacttggtcttgaactattagccttttaaaatgctttgcgccggaatttaagaacttatttcatgatttagaacatccagaacatcccagtgcatttccacaaattgatttgcccagctgtgatgcccctgatttatataaagtccaccgaaagtgtctccaactctgcggccagctgcttatttatgtgtagcggctgcaacaccgcatgttgctgggaccgccaaatgttgctggcggtgctgtttcgcagttgcaactccaacggcggccaccttttttggcacacttatgcaacagcagcagtggcaataagtggatgtgtttcatgccccaaaagtggacataattgcacatgtgtgggggcaacacccagtcgtggtaccgattcccattagcccaggaaatgggctctctttgaagtcggttaactgattgactgatcggccgtggcgggtgagatttcaatttggaactggaattgctggcactgggaaattggcagccattctggcagagagtgaataatgcccaagtagtcgagggttcagcaacatttgacgtcgccggcggcggctttaaataaatcagccgtaaagacagcagagaccagccgccagtagacaactcaaatcccggcgagagcgagggagtcggaacagaatcgtggcctttgttaatagcaccagccacacaacacaaacgcaagcacagacaacaacacccacactcggaccaaaactggagtgtgcaactatttataatgccgtgcaacatgttgctgcgcgagctttgtgccgtcgatgttgctgctgccgttcagttgagcacgagaagccggcgcgtgaagttcgctcgaaatgcgttcgaaagtagctttgtttacacatgagtgaatagataccgcctcacaatgagtaagaaaatgtggcagaagatctttaagtccaaggcgcaaaagccgcagcccttggccaaaataaacaagcgacacagtcgcattgcttacgaggagtaccagcaattaaccgatctgctggccggtgaaaatggacagctcagtttcggcaacgaaaaggaaaatgagcacgaaaatggaaatggaagtggcagcattaacgttttcgaacagcagccgctgcaaggttctttcaactcgttgcagtttagtgaggcgcatcagctgcagcaacagcaacagcagcagcagcagctacaaaaatcgcagcagcaacagctgtcaacgttttcgcgcgttcgcaatacattttccatgaaacgcaccagcagcagcagcaaaaagctgggaaatgccaagccaagtgagtcggatgcagcatctgcagcagcagcaacagttgcaacagcaacagcaacatcagcaacattaactaacaatgcgccaggcaatcaactgcaacgcgtcttgattgttgtcaataagatcgatgtggccactaactgcctgactaatcatttgcatgccaatcctacagaaattgcgactacaaatgcagcaattaaatcaagtaatttccagtacaaattaacaactcatttttgcttaatgaaacgtttactctgcggtgaaagctgtgtgtaaaatcgcagccaaatcgcctgctgcccacatctgttccaattgtttaatctcactccatgatgacctcttcgttgactcctttcccttatcaaatctcggccagagaatgatgtcattatgggatgtcttcaatacagctgaaacttaaagcattgatgagtgggtagttgtttagttagtaaaggattctaaaggtaatctcgtttttcgggaccacagaaaagatatccactgtagaacgtatacattttcaatgaatcattattattgataatgttaaagttcataaacaaaagttctatctcacattcctatattattgagtcccctaatatgaaataagtatttatctgcggtttgtgggttttcaatttatattcgcttcactttcgtaaggaaaaagattctttttttttacttaaactaaattaaaaagttaagttttgacatttttgccaagtgcaagcaagcccgtctggttcccagcttacccgttccgaggtgccaagtcctcggttttagtttccacggccatacttcttgggtgtcacagggtcagaagttcagagactagccaagaacctgaaagctgcttggcctgggaacagggaaactgtttgtattacgcttttaccatattgcacacaagtaaatacatttatgggcccactgacggcttaagaggcttatggagattgcccaacaacctgccgcaaagacaacgcagtatggaaatgcctaagactagactaaccaaacagaaagatgggccagggattgggcaagccgaaataccatattggacgactagatttacagtggcattc

SEQ ID NO: 39269 - DNA, 505 bp, DROSOPHILA
atgtggcagaagatctttaagtccaaggcgcaaaagccgcagcccttggccaaaataaacaagcgacacagtcgcattgcttacgaggagtaccagcaattaaccgatctgctggccggtgaaaatggacagctcagtttcggcaacgaaaaggaaaatgagcacgaaaatggaaatggaagtggcagcattaacgttttcgaacagcagccgctgcaaggttctttcaactcgttgcagtttagtgaggcgcatcagctgcagcaacagcaacagcagcagcagcagctacaaaaatcgcagcagcaacagctgtcaacgttttcgcgcgttcgcaatacattttccatgaaacgcaccagcagcagcagcaaaaagctgggaaatgccaagccaagtgagtcggatgcagcatctgcagcagcagcaacagttgcaacagcaacagcaacatcagcaacattaactaacaatgcgccaggcaatcaactgcaacgcgtcttga

SEQ ID NO: 39270 - protein, 168 aa, DROSOPHILA
MWQKIFKSKAQKPQPLAKINKRHSRIAYEEYQQLTDLLAGENGQLSFGNEKENEHENGNGSGSINVFEQQPLQGSFNSLQFSEAHQLQQQQQQQQQLQKSQQQQLSTFSRVRNTFSMKRTSSSSKKLGNAKPSESDAASAAAATVATATATSATLTNNAPGNQLQRVL

SEQ ID NO: 39271 - DNA, 8251 bp, DROSOPHILA
aaaatattcctctgtcggcggaataagaaagtagtacggtcgtcttataaaaaccttgcttacaattcatttgttgttctttaattgaaagcaatggaaaaataagccaaataacattatcaaataacatctcaaaacattgagactatatgattccaaacaaaccccgttctcgtcgaacgtattcttataaagactgtaaaaattgatatttttacctaaacacttcgaatttctaaggaatctaatatgtttgtttagaaattaaggtaaattagcgtaaagaataaacattagaatcaagtactggttcgtgggccgacggtggcacctgccatccgcgagataccagatactcgatctttgagatacaattcccgcccacaggccaaaagcaaaagagttttggctgagaccagctgcccaatttggacagagccacatttcatcagtctgcggccataagataaatagcaatttataggctgatcgccaaagacgaaccaaaataatagctataaattatttggggctgggactgctccattgtttctgcatttttggtgaatttattgctgggacagacaatttgtcgcccaaaaaacaatcgaccatgaatctgccagcggttgtttttcacttggctgccagccattttcgctgggaaagtgactgcgctttttccattgccgaactttccctgtaagagccaagcccttttgatctagatatcggatctactgcaccaccaacttaattttaaaacaaccttttcatttatatgttaattaatattaatagggtaatattccattttcatttggttagctgcatgaacctataatatctagtgttgactattgattttatgttaaatatttgtaatagtttactatattaattctccaccctgctgagtgacaattccaagtttttaaaatcaactgccagtttactactgctatcctttgtattgttgatttgtttaaactgaaacacactcctcttttgaacccctcacctcatctaacaaacattgccaaagtgctcgtagctaatagaaacccctgtcgaaattcgattcccaactaacctatccactttttggacgcatccacagcaacaagcagcaccacggatcccgagacagaagactccaggcggggcgcggaggatgatttgcctgccccgccgccactgacctccggatcttctattccggtgccggagtacgtgcccgagcagtccacacagctgacaccctgtccctgctgcagtcgcaccttcgccgtggacacgctgcgcaagcacgtcgtcatctgcgagaaggcctccaagaagcgcaagatcttcgactcgtcgcgccaacgccgcgatggaaccgctctctccacgtacgtgctgcccaagaactttggccttcccaatgcggaacgcacggcgggattaccatctcctccgatcaacagtcgcgagaccacgtcagtaaatgctgctcccgaggtgagtaaatctctgtttatccaattatatcttatggtttctgagcacaatactataagtattccaagaagctgctatacttcttagacaaatattcgatgtcttaatctatagattagacactaagtatgttccttaccaattccagacggtgaactcaccactgccagttcgtcgaaagtctcaaacggagatggtgcgctccactgcccgagcctcgttgcgcaaggcagcatccacactttcgtctaactcgacaccggaggctccagctatggcacccgctgcttcgactgctccagctgctccggctgctccagctgctccagctgctcctcttgtccgcgaacgatcgctggccaagcggatcaaggcacctccctgtgatcgttgtccccactgcgatcgtacctttaatcccaaggcatttgatcgccacgtagaatggtgtaaggaaaaggccattcaggccaccatgaagtccaccaacagccaggagaccagcaaagccaaggagcgcctggaggccaggaagcagtacaggccgcccaatctgaagtaagcctggatttagttgacaccctgtgatctatctacttaacacacgtttttgttttctttctcgtttcaatttattttgttgctattatataattgaccgcgatgtttgacaggaccaagagatccctcgccagggataagtactccggtaaccacgaggaggttctggaagcgggtgagatgacaacacccaaaccaaacctgatgtcccattcgatgacgtcgtccgtgcacagtgataagtgagtaggggttttccgaaatccatagatttctcttagataggttatcctaacccccgatgctctactggcgttatcttagtcgtccttgattaatcccgtaaagcgtaatcgtaatcgtaaccttttgatagcaattattgccaccgtcgtgtagtctcaacacaccgtagttagttcttcgatcagcgatcttcactcatccccaaaatgatcctcagcactcaagctcaagtctccagctcgcgaggaggaagtcgtgccaaagcaaactccacggttacccagaaccaagtgaacctgttcaatgaggatccaccatcatcgccgccgcccagggaacgatctgcactgcgccgttccaagcgcactcagcgggaatcctgcatagaaattgacgagaccatggaacaactaaggcggaacggcagtggagatgctctccagttggccaaactcgattgcgtggaagcgccagttctccagccagctagacgacgcaagagagggcccaagacggataaactagatgcggtcgaaaagcaaatctgccttccccaagtaaccatgacatttgacgagctcaatgggttaatcaagcgcaaaggtatgggttgaacttctgatttggtattcaccaatccccaccagagctgcccactgtaagtggcatgcagttcaccaattaaacactaaaacactgatgcatttaagatctaagaacccggaaccatttcgtgatcgttaattagtgcgcgccgcatcgaagcattcgaaagatcagcgaagcattaagacaaggtgtagtccaggtgcagggtggcttcagttgggttttaataatattatgattcgaagaagtagagggtatcaaaagaaatatatgggtgggagaatagaagtggggaatatcgattgaaagtagctctagagtgatataaattttctacacaaaaccacaaagtaatactcccaatatttgaggaaaattcttttgtaagtctatcccgaatctaaaacccttccatcctccatgctgttccacatcaggcggcacgcccatttgcaatgtggaaatggatgagcagggaatcggtagtctggtctccaagcaccaatcatcagcaaccctagtgcgtcaggcgcgtcgtcggattcgcaccaaggagaaccccgatctggagttgcgtgccctgcaatcgtcatgttcagcaatttccaaagatgtacagtatgcttccctgaactctagcctagtgcccatgcagagaaatcagtcaaaggtgtactccggatccgaggaggattcgccaaggtcagagattcagataaagctagaaactgcaaccatgcgcacggtatgccgaccccagaagaaatcaggtcgctcttcccagttgatgactgactcggagcccaaacgagctttgccaatgtcagatttaaaggaaagctttgaggccatcaaccaatccatagggcaaacagttctcccaagattacagctgggaaatgagaggcaggactacgaaccggaggaggacggagcggataattataccagtgatctagatgatgaacctgaaggtgttgacctaatggctcgagcggcaaaactgatagagagggctcgttcaagctccagccccatccccaatcctgagcaggtagatagccacagtgaatatgaagaggagcaaccagaggcggaacgggaaccgcctttgaacaaacaaaatggcaacgtcagtcgccgtgtatcgcttgaggataacgaaagtgctattgcgtatttcaaggcacttaatgcaaagcgtcgttcaaataggtttgtatcctaaatgagagccaattaatccatccaatcctccccagacgacagccagacagagcacaaatgggcggtttatcatatcgtaccataccgtatataatgtttacttaaccgtttgtaatctttttttaacagcggcctgggggacaaatacgatcccttcctctcggccaagcggcagcttgaggagctttgctcacccagcacgccgccgccagaggaagaggtgatcaccaccaaatctactagaacattgacacccacagcaaccagcacacccacagccacacccagtatcgccatgaccacttcattgactacggcagtcggtaagcccgcacaggttacccaaaagaccactccgacttccaattttcgacgtacttcatcgctgagagggccacgtcgtacgcccatgctgaacagccgaccgttgtttgccaccaactatcgccccaccattcagcggggtctctccgatgagggacccatctccaccaacttcctcaaaccagaggagttcgacgagatgccggtaagagctgcatgcggtaatgacttccacagcccaagagtcgtgcgccgggatacgagtgcctccaaccgaaagcaattgcttaaattgcccgtgggtggaaccagtgaagccagcaatgcaccctcctctcctcaggccgcccgcagtgtggccaaaactgactctctggctgtgttcctcaagtacgagcacgagctggagcagctgaatgccaaggcggctgagctggcagccgccagccagttgaccagcaaggagcaaaaggataaaagcaacacgctgagcaaacagaactctgcgaagagcttgggacacagtactcccacacagttgccaccattaactacaacaacggtgcccgtttcgccaggtttggttaaagaggtcaactatccaccggtggccactccgctccgattggagcccatcagcaaggtggcgaagaactcaccagcaccccttacgcctatcaagctggaaagcatctttggaccaaagagggaaacgggtctggggtcaggatcgggctctgtggcaggcgactacatagatcccaagctgataaacgcctttgataatttacatgttaacagtggtatatcctcggataccagctccacgccccagcagttgtcccaaagccgaagcaggagtagctcccagtccaccatcacccacgaacggaggcaatccggtgaggccaggaacctgctgaagcggaagatgcgattgggacggaaccagtttctgtacgatgcctcgccagaggatgcggatgcttcatcgggctgctcggcagacgatgaggccaaccgctcgtccatggagtacgacgaacagtgctggcagcaacagcagaaacagctattggccaatccgctgccgctggtcatgcccatggtgcacaacgccatgcccaccttcgatgattttgacttcgaggagttcctctcctcattcgagaacgagaatgacgacgagcaattcccgctgttcaaggactgtcgcgaattcctcatgaatcgctcgacgagcagacaacgctcgttccagaaagcgacttcgacgcaacagacgacagccacacagataacaccacttagtcaccagtccaagattaaagacaatcacgcccacaggtctgattcaaaaatgcccgaggacaagctgcaacggcagcagtcgaatgcctccaatgccagcagccaggaggagaagagccgccaggagacggagaaacggccggccgacgatgatcaacggaagcgagagatttttattagcattgagacggaggccaatgctcaggggcgctcacccatttcgcccgattcactgcgccacatggtgggcaatgcccagacgcacatcgatgtcctgcacattgaaaacggaaacgagccggaacacgcaagatttagcaagatcagcgacacggaggacgccggaaacgagcccagggatcaggccagccaatctactaaccggctgaccccatcctcgagcggatccggattggcgcccaacgtgcagctgaacaatgccaagaatctgatccagcagatgcatagcgaatttcggcttatgggcgaggaggccagtgcctccatgcggcgccagcttatcggaagtagcggcggtagaggcgaggaagcgcagcgctccagtagtgggctccctgctccaaatccaacacaccaggtcgtggccagctcaccgtcggcggattcagatgagttaagcagtctcgatggctatcccatgtcctcgtcgcagggttcacgtcggggagccagctccaagctaagcacggattcagcatacggcaggtaaggtcttcttaaaatggcagtatgcaatgtattgatatatatatatattccattataaccacctgtagcagcaactcaccttatagcttgtcgcgacaacgctcctctgaactccaagccggcacactacagtcccagggattgatgcgtccacatacggccagtgccaagatggccagctgcatgatcgatgcctccacgcaggcacacactgattatggcaccctgaaggctcgccagcgtctctttgcacccgaatgtggaaacaacaatggcgaaggaggcgagtcgtacagtagcggatccgaacactcttttgcaaccaatccaaaacaggagcagaacatcaactacaactatcaacagccactgcagcaagatcagcagaagcagcagcagatgcagaagcagcagcagatgcagcagcagcaacagatgcagcagcagcaacagatgcagcagcaacagatgcagcaaatgaactgcaactacaactaccatcaagagcagcagcagcttcatcatcagcagcagcaggctaaaatcccagcatcaacaggttacaacacaacaaacaacaatgtaccgatgacacccacaacgtcagagaactcattgatgagcacctcgtccatgagctcaagtaagaagtccaattactgctacgaatgtggctccaagttcatattcgagaccgccaagttctgcatggattgcggcttgagacgtgctgaactttagattaattccacgtagccattgttttcagtagctgacaccactcacaaaacacagaaaatgaacactagcccggaatgaagacgtcctcctggatcggttttgggatcttaaatatataccaaatgtagttgttaaacgcaaacagtttgcgaagagcgctaacaccgcttctatacataataatacgaataatatatattttaatacgaaccaaatgaaacaaaacaaaggttttatgtcgagcaaactttaattaatcgaactaaacttggcatttctatcttacacatttctctcatcttcaattgcttaaaatacaaaaaagcaagcaaaaaacgcaactgaacactttaacaaagttgttgattaacaaagactgaacgaatttaaaaaatagcgataaaaaaaaaacacttgaatatccaacgcgacaagagcaaaactatttttaaacattttttcaatacctaacgcagcaactccattgtatttgtattttgtaatcgttttactaattatatagacacagcttaaatatatataaatatatatgataaatacggattcgaatcaccgatttggttgaatataaaaaaaaacttgattaaaatgtcgaatttgacttaacattcatatgaacacatccgtttgaattccattggtcaatttcttacacaaagcttcaatcaaatgtttttctttttcaatttgcaggacgccaaatggaatatcttggatattcttcttcataacgtaatattaagctgattattgttatcagaaacttacattaaaacaaaacataaactttaagttaacagatgtgggtggcatagcttagaatattttggtgctgcctgagcatcgaatacatttgatttggtttcattacatctcttctagaggatcattttatggacacactaatgccttgaactttaacattaaacttttgggagtctgtaattttccacttagtctacagcttatacataagtct

SEQ ID NO: 39272 - DNA, 5093 bp, DROSOPHILA
ctcctcttttgaacccctcacctcatctaacaaacattgccaaagtgctcgtagctaatagaaacccctgtcgaaattcgattcccaactaacctatccactttttggacgcatccacagcaacaagcagcaccacggatcccgagacagaagactccaggcggggcgcggaggatgatttgcctgccccgccgccactgacctccggatcttctattccggtgccggagtacgtgcccgagcagtccacacagctgacaccctgtccctgctgcagtcgcaccttcgccgtggacacgctgcgcaagcacgtcgtcatctgcgagaaggcctccaagaagcgcaagatcttcgactcgtcgcgccaacgccgcgatggaaccgctctctccacgtacgtgctgcccaagaactttggccttcccaatgcggaacgcacggcgggattaccatctcctccgatcaacagtcgcgagaccacgtcagtaaatgctgctcccgagacggtgaactcaccactgccagttcgtcgaaagtctcaaacggagatggtgcgctccactgcccgagcctcgttgcgcaaggcagcatccacactttcgtctaactcgacaccggaggctccagctatggcacccgctgcttcgactgctccagctgctccggctgctccagctgctccagctgctcctcttgtccgcgaacgatcgctggccaagcggatcaaggcacctccctgtgatcgttgtccccactgcgatcgtacctttaatcccaaggcatttgatcgccacgtagaatggtgtaaggaaaaggccattcaggccaccatgaagtccaccaacagccaggagaccagcaaagccaaggagcgcctggaggccaggaagcagtacaggccgcccaatctgaagaccaagagatccctcgccagggataagtactccggtaaccacgaggaggttctggaagcgggtgagatgacaacacccaaaccaaacctgatgtcccattcgatgacgtcgtccgtgcacagtgataacactcaagctcaagtctccagctcgcgaggaggaagtcgtgccaaagcaaactccacggttacccagaaccaagtgaacctgttcaatgaggatccaccatcatcgccgccgcccagggaacgatctgcactgcgccgttccaagcgcactcagcgggaatcctgcatagaaattgacgagaccatggaacaactaaggcggaacggcagtggagatgctctccagttggccaaactcgattgcgtggaagcgccagttctccagccagctagacgacgcaagagagggcccaagacggataaactagatgcggtcgaaaagcaaatctgccttccccaagtaaccatgacatttgacgagctcaatgggttaatcaagcgcaaaggcggcacgcccatttgcaatgtggaaatggatgagcagggaatcggtagtctggtctccaagcaccaatcatcagcaaccctagtgcgtcaggcgcgtcgtcggattcgcaccaaggagaaccccgatctggagttgcgtgccctgcaatcgtcatgttcagcaatttccaaagatgtacagtatgcttccctgaactctagcctagtgcccatgcagagaaatcagtcaaaggtgtactccggatccgaggaggattcgccaaggtcagagattcagataaagctagaaactgcaaccatgcgcacggtatgccgaccccagaagaaatcaggtcgctcttcccagttgatgactgactcggagcccaaacgagctttgccaatgtcagatttaaaggaaagctttgaggccatcaaccaatccatagggcaaacagttctcccaagattacagctgggaaatgagaggcaggactacgaaccggaggaggacggagcggataattataccagtgatctagatgatgaacctgaaggtgttgacctaatggctcgagcggcaaaactgatagagagggctcgttcaagctccagccccatccccaatcctgagcaggtagatagccacagtgaatatgaagaggagcaaccagaggcggaacgggaaccgcctttgaacaaacaaaatggcaacgtcagtcgccgtgtatcgcttgaggataacgaaagtgctattgcgtatttcaaggcacttaatgcaaagcgtcgttcaaatagcggcctgggggacaaatacgatcccttcctctcggccaagcggcagcttgaggagctttgctcacccagcacgccgccgccagaggaagaggtgatcaccaccaaatctactagaacattgacacccacagcaaccagcacacccacagccacacccagtatcgccatgaccacttcattgactacggcagtcggtaagcccgcacaggttacccaaaagaccactccgacttccaattttcgacgtacttcatcgctgagagggccacgtcgtacgcccatgctgaacagccgaccgttgtttgccaccaactatcgccccaccattcagcggggtctctccgatgagggacccatctccaccaacttcctcaaaccagaggagttcgacgagatgccggtaagagctgcatgcggtaatgacttccacagcccaagagtcgtgcgccgggatacgagtgcctccaaccgaaagcaattgcttaaattgcccgtgggtggaaccagtgaagccagcaatgcaccctcctctcctcaggccgcccgcagtgtggccaaaactgactctctggctgtgttcctcaagtacgagcacgagctggagcagctgaatgccaaggcggctgagctggcagccgccagccagttgaccagcaaggagcaaaaggataaaagcaacacgctgagcaaacagaactctgcgaagagcttgggacacagtactcccacacagttgccaccattaactacaacaacggtgcccgtttcgccaggtttggttaaagaggtcaactatccaccggtggccactccgctccgattggagcccatcagcaaggtggcgaagaactcaccagcaccccttacgcctatcaagctggaaagcatctttggaccaaagagggaaacgggtctggggtcaggatcgggctctgtggcaggcgactacatagatcccaagctgataaacgcctttgataatttacatgttaacagtggtatatcctcggataccagctccacgccccagcagttgtcccaaagccgaagcaggagtagctcccagtccaccatcacccacgaacggaggcaatccggtgaggccaggaacctgctgaagcggaagatgcgattgggacggaaccagtttctgtacgatgcctcgccagaggatgcggatgcttcatcgggctgctcggcagacgatgaggccaaccgctcgtccatggagtacgacgaacagtgctggcagcaacagcagaaacagctattggccaatccgctgccgctggtcatgcccatggtgcacaacgccatgcccaccttcgatgattttgacttcgaggagttcctctcctcattcgagaacgagaatgacgacgagcaattcccgctgttcaaggactgtcgcgaattcctcatgaatcgctcgacgagcagacaacgctcgttccagaaagcgacttcgacgcaacagacgacagccacacagataacaccacttagtcaccagtccaagattaaagacaatcacgcccacaggtctgattcaaaaatgcccgaggacaagctgcaacggcagcagtcgaatgcctccaatgccagcagccaggaggagaagagccgccaggagacggagaaacggccggccgacgatgatcaacggaagcgagagatttttattagcattgagacggaggccaatgctcaggggcgctcacccatttcgcccgattcactgcgccacatggtgggcaatgcccagacgcacatcgatgtcctgcacattgaaaacggaaacgagccggaacacgcaagatttagcaagatcagcgacacggaggacgccggaaacgagcccagggatcaggccagccaatctactaaccggctgaccccatcctcgagcggatccggattggcgcccaacgtgcagctgaacaatgccaagaatctgatccagcagatgcatagcgaatttcggcttatgggcgaggaggccagtgcctccatgcggcgccagcttatcggaagtagcggcggtagaggcgaggaagcgcagcgctccagtagtgggctccctgctccaaatccaacacaccaggtcgtggccagctcaccgtcggcggattcagatgagttaagcagtctcgatggctatcccatgtcctcgtcgcagggttcacgtcggggagccagctccaagctaagcacggattcagcatacggcagcttgtcgcgacaacgctcctctgaactccaagccggcacactacagtcccagggattgatgcgtccacatacggccagtgccaagatggccagctgcatgatcgatgcctccacgcaggcacacactgattatggcaccctgaaggctcgccagcgtctctttgcacccgaatgtggaaacaacaatggcgaaggaggcgagtcgtacagtagcggatccgaacactcttttgcaaccaatccaaaacaggagcagaacatcaactacaactatcaacagccactgcagcaagatcagcagaagcagcagcagatgcagaagcagcagcagatgcagcagcagcaacagatgcagcagcagcaacagatgcagcagcaacagatgcagcaaatgaactgcaactacaactaccatcaagagcagcagcagcttcatcatcagcagcagcaggctaaaatcccagcatcaacaggttacaacacaacaaacaacaatgtaccgatgacacccacaacgtcagagaactcattgatgagcacctcgtccatgagctcaagtaagaagtccaattactgctacgaatgtggctccaagttcatattcgagaccgccaagttctgcatggattgcggcttgagacgtgctgaactttag

SEQ ID NO: 39273 - protein, 1514 aa, DROSOPHILA
MVRSTARASLRKAASTLSSNSTPEAPAMAPAASTAPAAPAAPAAPAAPLVRERSLAKRIKAPPCDRCPHCDRTFNPKAFDRHVEWCKEKAIQATMKSTNSQETSKAKERLEARKQYRPPNLKTKRSLARDKYSGNHEEVLEAGEMTTPKPNLMSHSMTSSVHSDNTQAQVSSSRGGSRAKANSTVTQNQVNLFNEDPPSSPPPRERSALRRSKRTQRESCIEIDETMEQLRRNGSGDALQLAKLDCVEAPVLQPARRRKRGPKTDKLDAVEKQICLPQVTMTFDELNGLIKRKGGTPICNVEMDEQGIGSLVSKHQSSATLVRQARRRIRTKENPDLELRALQSSCSAISKDVQYASLNSSLVPMQRNQSKVYSGSEEDSPRSEIQIKLETATMRTVCRPQKKSGRSSQLMTDSEPKRALPMSDLKESFEAINQSIGQTVLPRLQLGNERQDYEPEEDGADNYTSDLDDEPEGVDLMARAAKLIERARSSSSPIPNPEQVDSHSEYEEEQPEAEREPPLNKQNGNVSRRVSLEDNESAIAYFKALNAKRRSNSGLGDKYDPFLSAKRQLEELCSPSTPPPEEEVITTKSTRTLTPTATSTPTATPSIAMTTSLTTAVGKPAQVTQKTTPTSNFRRTSSLRGPRRTPMLNSRPLFATNYRPTIQRGLSDEGPISTNFLKPEEFDEMPVRAACGNDFHSPRVVRRDTSASNRKQLLKLPVGGTSEASNAPSSPQAARSVAKTDSLAVFLKYEHELEQLNAKAAELAAASQLTSKEQKDKSNTLSKQNSAKSLGHSTPTQLPPLTTTTVPVSPGLVKEVNYPPVATPLRLEPISKVAKNSPAPLTPIKLESIFGPKRETGLGSGSGSVAGDYIDPKLINAFDNLHVNSGISSDTSSTPQQLSQSRSRSSSQSTITHERRQSGEARNLLKRKMRLGRNQFLYDASPEDADASSGCSADDEANRSSMEYDEQCWQQQQKQLLANPLPLVMPMVHNAMPTFDDFDFEEFLSSFENENDDEQFPLFKDCREFLMNRSTSRQRSFQKATSTQQTTATQITPLSHQSKIKDNHAHRSDSKMPEDKLQRQQSNASNASSQEEKSRQETEKRPADDDQRKREIFISIETEANAQGRSPISPDSLRHMVGNAQTHIDVLHIENGNEPEHARFSKISDTEDAGNEPRDQASQSTNRLTPSSSGSGLAPNVQLNNAKNLIQQMHSEFRLMGEEASASMRRQLIGSSGGRGEEAQRSSSGLPAPNPTHQVVASSPSADSDELSSLDGYPMSSSQGSRRGASSKLSTDSAYGSLSRQRSSELQAGTLQSQGLMRPHTASAKMASCMIDASTQAHTDYGTLKARQRLFAPECGNNNGEGGESYSSGSEHSFATNPKQEQNINYNYQQPLQQDQQKQQQMQKQQQMQQQQQMQQQQQMQQQQMQQMNCNYNYHQEQQQLHHQQQQAKIPASTGYNTTNNNVPMTPTTSENSLMSTSSMSSSKKSNYCYECGSKFIFETAKFCMDCGLRRAEL

SEQ ID NO: 39274 - DNA, 9957 bp, DROSOPHILA
agcatttccaacaaattctcggttgtaggatcgatgattgcagttgcttggttcagaaccaattgtgattatcttttaaattattgatagcaaattgtttgtgatatcttcgtgtttcatgcacctatcataatatgacatgtgttaatgactttgttcgaacgctttttgtgtgatacgcccgttttgtatctctgataactaactctctgccatgatagccagttcattcattcagtttgtactttttaacttgaattaaataaatttgaatagtcgcgaagccaggatttcgaccgtaaacggtaaaagaaatatatatatatataactatagccactgccacgccgaagtgaaccgctgatacagacacacacgcagctgcactcaaagactcgtactcatatgcgcacccacacacttgcatggcacatatgcagacccataaacggcagaaaaaaacaaaatcgcaaatttcacattcaattaaacgacattctcttgatcatacaaatcgaaaaacgaaagaaaaaaaaacgacagcagccacgcctaatttttaaataattgtaattaatgttaacgaatccatgatttaattataaataaaatttatcgaattgcgtttaaaacaaaatcaaattgagcgattttattgaaacgggaaagaagcctgttcggttttcgaactaaaagcggttatattttcgttatttctaattatgtcgaaagagtcgagtatatgataagtgcaagcggggtttcgaacctttcggatgctatgactaaaggtattgtgttgatctattgctgctgtttgtgatgtttttaaaacaaatacatgagtgctttaaagttgctttatagctggaagaactaacaaaccttttcaacaaaaacaatcgatattacctcaccgcctaaaacaacaagcgcatatgtttggcttatcgatagtctggagctattgcagtttgtccacctctactcaatctgctcgcgacagtaaaaaaaaatcggatcgaagtgtaaatcggtgtgaattaaattattcgctgtgatgtgataaaagctaaacggcagcgagtgctcgtaataaacgcgcaaatgttcggcgtagtgtccccaaatcgaaggaccttgaaacgaaattggagaccaaaacaaaagtgacgtcataatggtgctatttatgtatttgtatgtacgtctaggcatcatctatgtatacaaatttcgcttaaaaatttgccagtgagacgcaaacacacaaacacacgcccgcaggaacaataatagataaaaacaaaactagcaataagctgtaaatctcgagtatttataagaaattcaagaaagacaaaggcaaagtgacaactaaaggtcacaaaacagcgaaaaagaaaaacaaatacaacacaacacaagaactgtgcgcgcgtgtgtgtgcgtgtgttttttgagtgtttttgcagacaacaaagcaacaaaattcaaaaataaatttacaatagtgttttccgccttgcacactctaactttcgattttaagagggtctgccttttttttttggttcccttatgaatgaaccttgtaaactgacccagaaatttatagcatataaccaggcgtctatattgtttttcattccgcatccagatcgcctgcagaagttagctggtaaaaatgacacaatagattactgaaaaagcaaagcaacgacgatccaaacgggtctaatttttatacaaaccccaacacccccaaagatatccaaattaaagagccctacgatccacacccgctaagatggccagcgtatggaagcgattgcagcgcaatttcaagcgagccgccaaattccagttcaccgcatcgtaccacgatctgcatctggaaaccaccgccaagtggtaagtgccccacatgaaagtggattagttcaccgggagtcggctaaagtgggcggggcgggtcggtggcggtcttaagtgcctttcaacttgaggggttaatagcacgtttctggcggaaagatatctcgtttttagattcctttttgtgtatcattgaaatcaatatatttttttccgtttccatgtaatttttgtgtttcttcaaaagaatatcttcttattaatgtttatatttacttgccttatcttgcattcgcgtctatttttattaatgaatatatacgtatatatatttatgcgcaaaaaatgtgtagaccctactgcagtatcatttgttgaagttataatatttcttatcattttcaaagaacaagctaaacaaacgcttatagttgaagatttattttcccttcatatacaatgattgtttcataaatacgataaaatattgatatgactagttacttgacctttattactctgcacctttaatttacctttatctaaataagtacatatttcggagaatatcattgagcaactaattatatagtttaattcaattgccgagaggagttagtcatgcaaataaattaagcaaaatattgaaaatagtataatattgatgaggctattggctactgaattccatgactacgaatttataatatagtcgtactccatttgctatctatatctttgtatttgcaaatgaccccaacttttcctgttgacatgaaatgttttgtacagacttttgtttaataaaccaatcatcgcatatatttatcaactgaagaacccacatatgcatataatgacgccgcatccggtgttcagaaattgttattcatggtcttgtatataaaatacatgatcagagttgaaagaactttgagaaaccaatttggcatgaaatggttaacaatcatgtgatggccaatttcaggcggccgtcgaacctctctatcgtttggaccagaagatctagacgagtggccagtgctcctttgccatgggagccggacatgatgaaccccttggtgggcaatatatcctggccagtgcccgacaatcacaccatatccgtcaccctgtttaaggatcctcggacacacgagctggaggacaaggactggacgtttgtcatcgaagatgtgggttaaataatgtcatggatgcatagagttgccagtaattggtgttaccttccattaggtcactccaatgggcaagaaacgtgtgctggccaatgccagcattaatatgaggaagtatgccagcatagaatccactcagcagagctttaccttgagcctaaagccagtctcgaagaagattactgcagccagtttggagctcacgattagctgtgtatttttgcgagaaggaaaggctacgtaagtcgactgccctttaattatctacttagaatggagcctcactactaagtttcgattccagagacgaggacatgcagagcgttgtctccatgatgtccgtgaacaacaatgatgtggcgcctttggatgacttggaggatattccagatcttgatggctttagtgaaattacggacaattttaatgactttacacagcaactggagcatatgacaactagcctaaatggctgcattgatgtggccacgcctcaaagtggtaagaaatcttgtactataacttaaaaattatgttctatgtgctaaaattcaagtatttgtatctgttagtatgtaaaatggactagatcgtatctattatgtatattgagtgctaaacataagaagcagggattttaaatattgtaaagctctgttttcgttatgtaaggcactttggttaagtatgttatataccctgtaaatgttttctgatctctagatcagaattcccaaactacgcatctaatggataccatatatgtacacttgatgatgcatgatctaacaaacaacaaattaattgattctaattatagcatcttagctttagatactttgtacagacacttttatctgacggaaaacgaaattatttcctttctatatcccatgacatctacatcacatcacgtatcttgaatggtttcctgcaacttgtaatttgtgcgtaaattgttaaatgtacatttcctttattttcgttttctttttgtttgtcattatgtagtaccttcgttatcagaagatccaactccgttggccgagtcatttaatcccttgcattttgaactagacgccgacggcaagcgggaagctgctaacaagttagacttgcccacagctgcatccggtggttctagtggtgctgaagagtccctgaaaacgccgaatggattgcagcatgtggtggaccaaacgccaataaagtcaccagatgaagtaaagcagccaaagcagacgccggtggagtcattgaggtccaaaactaacgaggactttgacaaaatggtcacctcaacgccactcgaacccaacgtaaacaaggatgatgtgaagccaaagaagaagagggctttattcttcactgagaaggaggatgagcaggacttaagggtggaaagtgtgaaggaggataccaccaagactatcggcgacaacagcaccactaaggaaaagcccaaagaagaaagccaatccagtaaggatgcctcatccgtggtggttccgagtgccaagcgccctgaactgcagcccctaaatctaaagaagagttacgaaccctcgcagacacctgaatccgcacccgtacccgcatctgtgataaacgaatcgattggatcgtgctttagtacgtctggctcgttgaacaacagccttaagccggtggagaagatcgtgctgaaggagaacacgcccgggcaggatctgctggagtggtgcaaagaagttaccaaagactaccccaatgttaaggttaccaacctgacgaccagctggcgcaacggcatggccttctgcgctattattcatcattttgtgccggagctcatgtgagttgtcatgattacgttgaatttcttattgagcactttatttacaatcaattgatttattacaattccaattctaactttaagttataataacgggactgaataaactaataaatgcatttcaattcatagtgacatgtctaagctgagcgcccatgacgtagttggcaattgtcgaattggcttcgatgcggcggaatcattaggaatacctcgtgtaatcgagccgcgcgacatgaatatgctcacggtaccggacaagttggccgtgatgacctatttgcatcagttgcgggcgcactttaccggcaagcagctaaaaattgagcaaatcggtgagcgagttcttaaaaatggtcattataatataacataacataaatatgctttttttttttaggttcaacggcagacgagtcgagctacgttattggagactacaagtcggacaatttgtcgcagaatcgcattaacttttcgcaccccaagtcgttgttgctgcatcaaaactcattcgatgaggagataaatggttcaaataaatcggagcaactttcacccacaagcaaaaaggatgtgaagaatttgattctgtacaactcgaagaatattctggacaaggtgctgtcgcccaccaaggacaagaactcgatcaacgcatcgcagcatgcaaatcaatcgccgatgttgagctgccagacaacaccgccgcaggatgaatcactggataaagggtcacaaccgggtggcaaggagaacagctccataaccaccattgatccgcaggcggccagtgtgagtaaaaagccagcaccacagttgcctcgttgagttgaatttatgcattgagttgttgctttggctttggcgatttatttatttatctacttagcactttatttcctagaccttttcagttttgtatatattgttgttttctttatttcgctttatttttgatttgatttgtagcgaattttaacgcgccacaagatgatgagcgaaaaagccaagctgatgatggaaaagcgaaagcttaacaaaaccagcgacgcgaacgacgtaagtagcttcttgcttaagccgcagttcgccgcacgaagcgcagcttatctctagcatgtcttgttaagttaaaatatctgattagttttaagaatttaaatacattgaaaaacattttttgaacatttttatgtattcattgtttagaacattacttgttttgttaaacttgaaacttgtgtacatgtggcactcataaagtgtcgctctttaacaattatctacacagattttgtttcactttttaggaaaacctctcataagttttatagttctatattttgtcatacaaaggtgctgccttgtataaatcctcacttagttgtttcaatgtgtttgccccggcaggaggagaggcagcagcgtctgctggaacaggctcgtcgccttatcctggagactcgtgtgaagagcggtggttccatcgagagtcccaccaggcccaagctggagcgcaccatctcgccgatccacaacggagccgaggaattctatgcggagcacgcgaaaaagctggagcttaaggagccaggcagtcctagtcataggttaagtgatccgaaggtcctacagtccttcaacgcaatcgtggagcgcgtctcaccaaagcacgagaagagggtaagcctaaaacatacaattagtctactttgtctttcatcttgatttaaattaataactaatttaagtcattttcgcatcgtttccagggtgacaagctgtcctacatcgattccgagctggaggccctggagcgggagcaggaggctatcgaccagaaggccagcaatctggaggccaagctgcgcgccgtaatgggcggcaatccaagtaataatcgtcggggtggcgctagaaacagcaaccccttccttaggctaatccgaaatagtattggtggtggtgatgtgatacgtattaagctgctcgattcggatgacgagagcctttttggtggaggtgccggtagtggtggcggtcggagcggggcgtgtagcgaggacgacgatagggacacgtccagcgatagtgtctgcaactcaggcgacgagttgcacacgaggctacgcccccggccacgctcccattcgtgctttgtgaacaagaaccatcaatcgaccatcaacacgcccgctcatctgcgcccgcatcatgtacatcacgttgtgccctatacccacatgctagacagctccccgtcggcgctctcctcgcagcagtcttcctgtgataatctgcctgcgtgcagcgatgatgacgaggtcctggcggtggcggccaacggtcgtgcggcctcgttgcggcggcagcaggatcgtcataggcgacgccgtcagaggcgggagcggcgctcccatttatgtcacactcccaatcattgtggtaaagtgcggcccatcctatcatgcctgtaccattgagctgccctgctaattgctaactgccagagcactgccacgcctcaccgcctgactgccgatcgcccagatcttccgcctgctcgctcgctcgctcgcctctttcaaccgcatccactcgctcattctttgtgccgtttgtttgttccaattaatgtctgtgtttgcttgttaacttggcgggcaaccgttccaacttgtgtctaactatgttcggacttggttctaacagctccgatgatataacgctcactaatcacagagtcctccctctgcagcagcttttgaaaaaggcaaaggacgccttcttagaataaagcaaagcacgaagcgcctgttctggtattgcctatttcaaaaactgttttaaaatacttaagccacttatgtatggttgcgacttatgtagaaaatcaatttcagtagtataatcagaacaggcaggctttaaataatcttagtgcttcacaaagaaaacccccatcattgcctttttataatcagacacttaaacattccacagagaccgaggagacagaggagcaactgctatcgcaatggtttacgctggtcaacaagaagaacgcactcctccggcgacagatgcagctaaatatactgtaagttatcacttagaactactatcggctttgtttcttattattatctacacccttcagcgagcaagaaaaagatttggagcgaaaatatacaatgcttaatcaagagctgcgggcggcgcaatctgtggaagattggcgcaaaacggaagttcagcgtgaaaaggagcgactgctgctcgaggaactgatgacgattgtcgacaagcgcgaccagttggttcagcacttgcacaaccaagagatagcgtaagtgaagcacttttcccatcattaaaatatacgaagctaaccctcggactcgtttaggatcgaagacgaccaggagatcgcgaggaaactggagcacgtggacatcagtgctgaaaaagacaaatgtgttcttcaatagaaatcgaaattaaccaaacctgactggagattatacttacacacactcaatcttatctatgtaactagttagataacaactatgttcagagacacgcgataaggtcgcgtggtttttgtggttcggtgtcgcttcttatgcaatcgttatatccaacgacaacaaatacttggaccacttggtatggttattaaaaaaaaaaaggtatactgtgaaacaaaacaaattgcttttgtatttaagcaaaacaattcaagaaataagaacaaaacgtccgttagtgaactaagtaaaaagacaggcacacgtttatacacctatttacgataatcagatcttggtattactttaaattaaatggtggtaactttgtttcatgtttcgttgttgtgccatctgaaccactcctaacttatgtaaatcctgaacgcaatagcgatgtgagatagggaattgaggaggcaattttacgttagttttactttagcatttatcccacataactagaaacgcttcatccaaaaatacacgtacacttatatatttatgaattacacttatacaacaaacctatcttaacataccttatttagacccgtacatttgctctaagttaagcaaagcgctttaatcataatttaaaggtggcttatatacttatataaaatacattttaatttactttgcccaggcgaatgttgtataaagaactgttcgacccaaggaacattaatagctaataaaagaaacgaaaatgctgtcatcagcatcgaataaacccaaaaccattctaagaagtcttatccgttgttatctgggaaagttactccaataacaaaacaaaaatgcgtcatatcgatttatttatttttttgtattaacaggtttctcaatacaaatacttaacagagtatcattttaattgactcagtaacaaaaaagattagtcacgtcgagaggtaatagttttttttattcgatcaacagtttagtgtacaaaaatacatttgtttaatgcaatcaatcgttaaattaatatcgtcttaattgagtgataacatatgtatgtatatatactcggaagctgcattatttccatggatcacttgagaattgcttaaatgattgctaaattagcagagatttcatcacattgtacttgatattattttcgtttctcttgttccttctgaaaggaagtcttttaattactctacaactcgtctacgcatataatctaaaagcatgcaaagagatttaaaagttcacaactaagtgacgtcatgacggcgctaccattgctctagttcagcgataaataactacaaaagaagcgaaatcaaagttgagtataggacacagctacaaaaacaacaaatgcgaaggatagactaacatttggcgtcgccggagatgaggcagatccgtgcgtcatttcgtggagctcctcgtcggtgtaggtctggttggcagcctcgaccttgtagttgaatgtcgccgatacgggcttgtggtcggagagagtgtagtccatgtgggactgataaga

SEQ ID NO: 39275 - DNA, 3773 bp, DROSOPHILA
cgacagtaaaaaaaaatcggatcgaagtgtaaatcggtgtgaattaaattattcgctgtgatgtgataaaagctaaacggcagcgagtgctcgtaataaacgcgcaaatgttcggcgtagtgtccccaaatcgaaggaccttgaaacgaaattggagaccaaaacaaaagtgacgtcataatggtgctatttatgtatttatcgcctgcagaagttagctggtaaaaatgacacaatagattactgaaaaagcaaagcaacgacgatccaaacgggtctaatttttatacaaaccccaacacccccaaagatatccaaattaaagagccctacgatccacacccgctaagatggccagcgtatggaagcgattgcagcgcaatttcaagcgagccgccaaattccagttcaccgcatcgtaccacgatctgcatctggaaaccaccgccaagtggcggccgtcgaacctctctatcgtttggaccagaagatctagacgagtggccagtgctcctttgccatgggagccggacatgatgaaccccttggtgggcaatatatcctggccagtgcccgacaatcacaccatatccgtcaccctgtttaaggatcctcggacacacgagctggaggacaaggactggacgtttgtcatcgaagatgtcactccaatgggcaagaaacgtgtgctggccaatgccagcattaatatgaggaagtatgccagcatagaatccactcagcagagctttaccttgagcctaaagccagtctcgaagaagattactgcagccagtttggagctcacgattagctgtgtatttttgcgagaaggaaaggctacagacgaggacatgcagagcgttgtctccatgatgtccgtgaacaacaatgatgtggcgcctttggatgacttggaggatattccagatcttgatggctttagtgaaattacggacaattttaatgactttacacagcaactggagcatatgacaactagcctaaatggctgcattgatgtggccacgcctcaaagtgtaccttcgttatcagaagatccaactccgttggccgagtcatttaatcccttgcattttgaactagacgccgacggcaagcgggaagctgctaacaagttagacttgcccacagctgcatccggtggttctagtggtgctgaagagtccctgaaaacgccgaatggattgcagcatgtggtggaccaaacgccaataaagtcaccagatgaagtaaagcagccaaagcagacgccggtggagtcattgaggtccaaaactaacgaggactttgacaaaatggtcacctcaacgccactcgaacccaacgtaaacaaggatgatgtgaagccaaagaagaagagggctttattcttcactgagaaggaggatgagcaggacttaagggtggaaagtgtgaaggaggataccaccaagactatcggcgacaacagcaccactaaggaaaagcccaaagaagaaagccaatccagtaaggatgcctcatccgtggtggttccgagtgccaagcgccctgaactgcagcccctaaatctaaagaagagttacgaaccctcgcagacacctgaatccgcacccgtacccgcatctgtgataaacgaatcgattggatcgtgctttagtacgtctggctcgttgaacaacagccttaagccggtggagaagatcgtgctgaaggagaacacgcccgggcaggatctgctggagtggtgcaaagaagttaccaaagactaccccaatgttaaggttaccaacctgacgaccagctggcgcaacggcatggccttctgcgctattattcatcattttgtgccggagctcattgacatgtctaagctgagcgcccatgacgtagttggcaattgtcgaattggcttcgatgcggcggaatcattaggaatacctcgtgtaatcgagccgcgcgacatgaatatgctcacggtaccggacaagttggccgtgatgacctatttgcatcagttgcgggcgcactttaccggcaagcagctaaaaattgagcaaatcggttcaacggcagacgagtcgagctacgttattggagactacaagtcggacaatttgtcgcagaatcgcattaacttttcgcaccccaagtcgttgttgctgcatcaaaactcattcgatgaggagataaatggttcaaataaatcggagcaactttcacccacaagcaaaaaggatgtgaagaatttgattctgtacaactcgaagaatattctggacaaggtgctgtcgcccaccaaggacaagaactcgatcaacgcatcgcagcatgcaaatcaatcgccgatgttgagctgccagacaacaccgccgcaggatgaatcactggataaagggtcacaaccgggtggcaaggagaacagctccataaccaccattgatccgcaggcggccagtgaggagaggcagcagcgtctgctggaacaggctcgtcgccttatcctggagactcgtgtgaagagcggtggttccatcgagagtcccaccaggcccaagctggagcgcaccatctcgccgatccacaacggagccgaggaattctatgcggagcacgcgaaaaagctggagcttaaggagccaggcagtcctagtcataggttaagtgatccgaaggtcctacagtccttcaacgcaatcgtggagcgcgtctcaccaaagcacgagaagaggggtgacaagctgtcctacatcgattccgagctggaggccctggagcgggagcaggaggctatcgaccagaaggccagcaatctggaggccaagctgcgcgccgtaatgggcggcaatccaaagaccgaggagacagaggagcaactgctatcgcaatggtttacgctggtcaacaagaagaacgcactcctccggcgacagatgcagctaaatatactcgagcaagaaaaagatttggagcgaaaatatacaatgcttaatcaagagctgcgggcggcgcaatctgtggaagattggcgcaaaacggaagttcagcgtgaaaaggagcgactgctgctcgaggaactgatgacgattgtcgacaagcgcgaccagttggttcagcacttgcacaaccaagagatagcgatcgaagacgaccaggagatcgcgaggaaactggagcacgtggacatcagtgctgaaaaagacaaatgtgttcttcaatagaaatcgaaattaaccaaacctgactggagattatacttacacacactcaatcttatctatgtaactagttagataacaactatgttcagagacacgcgataaggtcgcgtggtttttgtggttcggtgtcgcttcttatgcaatcgttatatccaacgacaacaaatacttggaccacttggtatggttattaaaaaaaaaaaggtatactgtgaaacaaaacaaattgcttttgtatttaagcaaaacaattcaagaaataagaacaaaacgtccgttagtgaactaagtaaaaagacaggcacacgtttatacacctatttacgataatcagatcttggtattactttaaattaaatggtggtaactttgtttcatgtttcgttgttgtgccatctgaaccactcctaacttatgtaaatcctgaacgcaatagcgatgtgagatagggaattgaggaggcaattttacgttagttttactttagcatttatcccacataactagaaacgcttcatccaaaaatacacgtacacttatatatttatg

SEQ ID NO: 39276 - protein, 957 aa, DROSOPHILA
MASVWKRLQRNFKRAAKFQFTASYHDLHLETTAKWRPSNLSIVWTRRSRRVASAPLPWEPDMMNPLVGNISWPVPDNHTISVTLFKDPRTHELEDKDWTFVIEDVTPMGKKRVLANASINMRKYASIESTQQSFTLSLKPVSKKITAASLELTISCVFLREGKATDEDMQSVVSMMSVNNNDVAPLDDLEDIPDLDGFSEITDNFNDFTQQLEHMTTSLNGCIDVATPQSVPSLSEDPTPLAESFNPLHFELDADGKREAANKLDLPTAASGGSSGAEESLKTPNGLQHVVDQTPIKSPDEVKQPKQTPVESLRSKTNEDFDKMVTSTPLEPNVNKDDVKPKKKRALFFTEKEDEQDLRVESVKEDTTKTIGDNSTTKEKPKEESQSSKDASSVVVPSAKRPELQPLNLKKSYEPSQTPESAPVPASVINESIGSCFSTSGSLNNSLKPVEKIVLKENTPGQDLLEWCKEVTKDYPNVKVTNLTTSWRNGMAFCAIIHHFVPELIDMSKLSAHDVVGNCRIGFDAAESLGIPRVIEPRDMNMLTVPDKLAVMTYLHQLRAHFTGKQLKIEQIGSTADESSYVIGDYKSDNLSQNRINFSHPKSLLLHQNSFDEEINGSNKSEQLSPTSKKDVKNLILYNSKNILDKVLSPTKDKNSINASQHANQSPMLSCQTTPPQDESLDKGSQPGGKENSSITTIDPQAASEERQQRLLEQARRLILETRVKSGGSIESPTRPKLERTISPIHNGAEEFYAEHAKKLELKEPGSPSHRLSDPKVLQSFNAIVERVSPKHEKRGDKLSYIDSELEALEREQEAIDQKASNLEAKLRAVMGGNPKTEETEEQLLSQWFTLVNKKNALLRRQMQLNILEQEKDLERKYTMLNQELRAAQSVEDWRKTEVQREKERLLLEELMTIVDKRDQLVQHLHNQEIAIEDDQEIARKLEHVDISAEKDKCVLQ

SEQ ID NO: 39277 - DNA, 8440 bp, DROSOPHILA
gggtgagctgaaacagcaaattagctgactcgcagaagagccagaagttcagggcgacagccaccaccagcaggatagattcctgtgataaggagatcccgatggcctccacggcctgtcccacgtgacgcacgacaaccggatatagtggatagaaggccaacgtgttttcgtagctgtacagattctcggctatatgcagaaagtattctccatcccagtgccgtaatcctcccaagcagcgcttaatcaccttgtctatccaggaggcattctgatctgacgaaaccggcatccggaatacatctggtttgtgctctggcagggctccgttggcgaccaattgtaccaggaggacgataaggcgactggccagcgccagtttagtcactttctctgtcatttcagatttctaggtcttgggtggagtcgattatcattcggcgggcatgtgattcatatcaggtcgagggcatacctcacagctaaaacgatgtggacggatcttctggcctggacactgctgcggagggaaaaaggcaaatcagctcctcggttgcttcttgaactgccttctcttttggtgacatttactttgtgaagcggttttattattatatattatttttgggcagaagcccggaaaagcagagcatggtgtgaccagagggtttgaggaagcattagacactttcgatatattatcgatacgagaataatatatttaataaacagaattaaattaatatgtaaacttaattctcgttgctctcgaactattaatttagtgtacaatacagccttataatttaatttaaaaataaacagttaatacgtcacgtgaattgcaatcgatactatcaaactaatatcgttgattgccccacctcaaatcgatatggcacattatagtggcggcatttcctaaataaactgccgcttttatttggcagttgggttgaatttaagctaaaatttcactcataaatgaagtgtcgcaatgccgagcagtgcaaagaagtcggactctgcaaagagcaatagctcgacgccacgaagaccgcgaaagcgcaaacgagtggatcgccagagcctggactcgcaggtcgatgaggatgccaaggagatcgatcgccggctacggaaagtggccaagaagaactccatcagtgccgaggacatgcaaaaggtggtccggaaggtggtgcgcaacgatcatgttctggcattagtcactttgaaggcggaggacgagctggcgcgggagaagttggagtcggcggagcagcaaaagcggggtgccatcatcataacggacactccatctgtgcccaagctaacgcgagcgaaagcacgggaactgaactgcacgcctgggatctcgctgccccagctcaatgaaacttccaccgacaataatggtatagaggctctaatacgtgaggatttgcactctgatgaggaggacgaggagtataccttcaaggaggaggactttcatgtgagtataaacattgaggccaattgatcgttgttcaataattgttattattcctttattatcagtccgatgatgatcctaacactacagcatcggatttcgactccaatccctgcacgcctcaaactcctcttactgccaatgaggaatctcctatcaaattctctgatgacggttgtttcaaggtgccgttggacagaaattttcaggataaagaggatcttaggattgccactagaacgcgctccaaattttgtttgcagcaaactaccattgaggatttgcagtcggaatttgtcccgccggacgtggagcctagcgatgtggtggagaacgaaatgaccgccaacgatgcggattggatgcagttcctcaatgactttacaaagcctttaagtatgtagtatcaatggatgcttttatgctctccctaactttaatatcttacagacaatacggtccagggcgacgatgatgatcctattaacgatccagaatatgtggccgctgatcacttggaatcggaatatgagaacgccgaggagctgcgcgatgtaaatatatctaaaaaagagttaactgacctggtctctgagctgtttgctggtttgctggaagaaggagtctctctggaatcgattgaattggaaacacctcaaaaattcgttgaaagtgccaacgtttcgatgattcccattgatcaagtgtcccgtaacatcgattttgatggccagcagataaatgctaatcagcaggagctgtccgtttttcaacctaatctaatgccgcctccttgcgaagggaacgaaatgggcatgggtgtgcctgtccctgtggctgtgctgcaggaggaaactggtggatccgcttgcaatgtggtaaacataccttccgaggcgctgactgttccccccgaactaatagctgttccaatacctgggcaacctaattgcttccaaatcgccaaagttgtaggcaatgattcaactgttggtcttccattaactgaagagacactgcagaacttttctagcttgcatccaatggaaccccccgtggtagctgcaagcaatggagatcgatataaaaaaccatttgatacgaacttcacctgggaatacatctcggttaggaaacatatatattcggagtatgaggaaaagtttgagagcctgcgaaacgtagagccagtaaacctcaatcatctcgccaggagcaggggatttacccagtctcagcatgatatgcttcagcagcagcttcgcattcacacgcagttgctcagtcaaagctatctgcaaacctactcccatcctacgttgtaccccatggccaagaagcccagagaaatgttggaagaattgcacaaaatggcaactaaagatcccagttttaattgctggaatctgcaggaggctgttcagctggttagaaaatgggaacatgatctgtccagtgatgagtttaaggaggagaacgagaagatgatggacttcatcaataaggaaacggatctgacgtaagttggtgaaactttaaacaaaacatgctgctgtacaacttgtatttactattttagtgatggccacacgcgccaggttcccaggctggcgcctcgtattatggatctcatgctggatagccgggtgtttatgtatccgcagtacctaccccgtatggcgtttcaaccgaaactgactcaaaccaccgcttacgcaccatccgaatatcagcttattgccattggcctagagaagcacttggcattaatggtaaaagccaagagacaactacgcaaaggtgcagatcccattcgcgttgcctgtaagcgaatgattaaggatacgatttgtggaaagactgcccgccgaattttcttgaaaatcgcggagctacgcaactcaaaacagtacaatccagtgaagtatttctttgaacatcgtcgagcaccgcccgctaacgccatcctttggggattcgctggtgggctggtgagaactccgcgggaacgacacatggagcttcccagtggctggcaatactacattgaggtaaggaatacaatgggttattatcggatacattgtttaacatttaataagcatcaaaaagggggaaaatctcaaagggtaaataagatgggattaggaaaactagcttagttggtggcccactcgatctctgggtatgaggcgcagctcggatccgtgctttaggaacacattaccagcagtctgctgtgggctgatgccaattccatcgtccgtgatgatggcactcgtctccgccggaaccttgaactcttcagaggcgaatttcagcacagccgtaaagggagttccctccggaacactaagcaccttaaagggcagcttggggtccgaagttagcgtgattttgaaggttactttgctcatagtggaatgtgcagacgtggtcagttttgatactctatgggaataaacgggtttccgatgttttccacaggcagagtgtttgagccctggtggttaaagtttaaacaagtataaattagttggtttgaaaatagttttaaggggtattttatttaaaaacaataaaatatgttgacgctcttactttagtgcggtcaatattacgataggcaaggcagcgagttatcgtctgtgatgagtaatatttgcataaatgtacctatgtccgtacctaattaggaatacatgtttagaactttattaatttttctcttaaattttaagtaatatacttgctagtgattgttggcagaattattttacgaaataaatcactggtcatcggtggctaggtaccatcgaccaaagttatcgatatcaatatacatagcttgtgccatcgctgtgtttataaatcgcggacaattttcaatctattatttttcagaaaacttgggatcaaaagcgcacacgtcgcaattttaaagcatcgaaagcatcgtcggtggctagtgcttcttatttggagtttgtacgcgaggcggtcggcgaggacctgctgctgccagagacttttggtcaggctgcggtccccaatggcagtgctgctggttcggaaccgcccaaggagagcaaaccgaagaaaaggccagcgcaaaggagaccccgccctgcggaaaacccaccacagcttaccatcaatgtgaattatgtttttggcgggaatacgagcgcgggaaacatacccggggtctctggggtttcggtgcccttggtggccggcggaaatctggccgagaacgtactgaacatcaatcgcagcttatacaccgccgccgagtgcagtagtctgctggccttgccgcctgctcctccaccattggatgaaaatgctccgccagccatcaacttcacagtagacaagttcactaacacactacaaatctgcgaattggaggaatccagcaaggccgtacagccggatctgttgcctgcgcaggataccccttccgtcccaggcagaaacgccaaaagggcgcgataccaaatctttaagccaaaggttcaatccgccaataaatcgcgaaaagggtcaacaccaacccgcagtcgataccatatattgcgcgaacgtttgcgccataaactaagccagcgctgtcattccctaatcaccacctatgaatcctacctgcgtcatcacatcgaaaaatataaagactgcgagttggtacaggtcgtgcacaatcgttttttcgccctcgaactgtacactcaacttctggtcgatctgaggatgttctgcagcaatacaaactctaaaacggcagcgcagccaaagagatctaggagtgatgatgaggcggcgaagctgagaagagccaaccggcaggaggagatgcttcgccaaatgctccagccggatactacagaagagcgcaatcgcaaagatgccagtaagttttagttcaatcccatttaatgaaattcaacttgaataattttattattttgcacgttcagtttttgccatgaatttttatgaaaaggtagaggaggccttgctgagtgccaatcgcctagatgattgcaaaaaattcaacagtattttgcaaaacttcgaccccaggcaggagaaagtttcatctttgtatttggtatgtatcacttaagtgtcttactcttattgcattctaatttttttttggggttcttagaaagtggaagaaattttgctacccactcatcccgaactggctgaagtattcctcaactttttgctacctgccgaggccgctgagatgggaaaattctttgagcactttatgatatgcaatgctaccaactttatcaacaaacttaacatttacttcagtaagcagccagctcaaatcaggaagatttatgcctgtctaaacgagttggccgaaatgcctaatgtcagcatgaaaaaagttgaaaataagataatgcccttgctcaagggcaatcaatttctgatcgattggtttgtgcaacaattcccacagggaaaaccaccaaaaaggtaagaatggtaaacaaaatactcgagattgatttaatgtaacattgtcttttatttccagaatcctttctcctgtagagaccataaatttgcatgacgttcaaaacaatacaacgggagaatatacggaaactattcaagagtttacagatgtacctacgccaagtaaaccaggttgtcacttaaagtatatcaatggtcgcatattttatggagccaagatcctattgcctgccaaactgtcttttatggctgccagtatttacaatgaacaatctcatgacgtgccacccgtctccagtgactcgataaactgcgcccatggtattcgtgcccagggagaaaaacttcttagtatggcttccaatacagatagcgacgatggcgcggatcggagtgaggaagatgatgccagccgcgccttgattattgataccacgagtgatgagcagaacagctgctcatctattgagatgtgcgatgagacaggcttaagagcacatgcaatcagattgaatcccggcttgtataccaactcaagctttaacaatgcagcgaccagtacgcccaatctgggcaactctcaccaatcccatcatccgcacgccaaaaaaactgccataaactttggtgaaatatccccacgcaagcaatcggcatttaacaactcgggattgagtcccttatcggcggcccccaacagttcccctcaagtcgacaaacgaaagtcacctactaagaagatccgatctcctcttaatcaaactcagagcagacaacgtgccaataatcagccaatggttgttatccatgagtctcagccttcatcttcgccagccattgagtgtgcaaagcgcttgcgcacgctgatcgatcaggagagcgtgcgggatgcagcagatacaaaggcgggcattcgaattattgcgcaagccaagcagcaacctccaaaccaatgcagctctgaagctattacgaaagtcgaggtagtcagcctggatgaaagtgccgagaatatgcctttctgtacaaatctcaaaatggacacagatcaatcggaggaggagctggagccactgcaattaagtgctggcaacacaccacagcacgtgatcacaacacaattcgatagcgatgaggactgcaagctggatgttgtggccacgctggcgaactgcaccaccaccgaagatagatcggaatcggcagcggcattacctgccaccacatcgcactctgagtctggtagttcccactcggcaccttggactcgtgaagaggacaaagtaatcctgatcgaaatgaaaataggggcacgggatcgagagcagctcattcggcgtatgcgcgccaagctaaagaatcgcagtatagaagaactacgtagtaggcatcagtttcttatggactttctgtccaaattgcagggaaagtgaggtttctctaagatggtcttttgtgtattataatccaagctgaaataggatactaataataactgtatataaacgaaatggtttaccccatacctacaaaccaaactttttgaagggaattctttgttgtactgattacctatttaagcatacaaaaattcccttcagaatacttagttttattattaaaaatttgaatattttgaaatctactgtacgttgaaattgactattaatagatatattgaaaccatgaatttaatatttttgtgtccgtctaagtttacttttctatatgataagaaggtcgcattgtttgaatttgattattctattctatagttttggttaacgagcacattgttttccattgtcttaaagattgtaaatatataaaaatataacattttttaaaatctctaaaatgtatctgatattgtcaaaccagcttgttcgggaacttcaaacgtattcgcatttgagaacttaaacaaacctggaattgttcctttaagaagtacgacgtaagactaaaatatggagctctcgttggatgaaccgcaatgcgcatccttcttttgcatcctgggtgccgtgtgcgccattgtcttttcgacattgggagccgcctacggaacagcgaaggcttctgtgggaatctcttcgatgtcaatcaagcatccgcagctgatcatgaaggcgattgttccagtggttatggctggcattatagccatttatggactggtgatcgcggtcctgcttgctggatcacttagcagcccctatagcgcctacaagggtttcctaaacctcagtgctggactggcggtgggagtctctgggatgggggctggaattgctattggcgtggtgggcgaagctggagtccgtgcatctgcccagcagccaaaactctttgtggccatcattttaatattgatatttgccgaggtcttgggtctgtatggtctcatagtggccatttatttgttttcca

SEQ ID NO: 39278 - DNA, 5220 bp, DROSOPHILA
atgccgagcagtgcaaagaagtcggactctgcaaagagcaatagctcgacgccacgaagaccgcgaaagcgcaaacgagtggatcgccagagcctggactcgcaggtcgatgaggatgccaaggagatcgatcgccggctacggaaagtggccaagaagaactccatcagtgccgaggacatgcaaaaggtggtccggaaggtggtgcgcaacgatcatgttctggcattagtcactttgaaggcggaggacgagctggcgcgggagaagttggagtcggcggagcagcaaaagcggggtgccatcatcataacggacactccatctgtgcccaagctaacgcgagcgaaagcacgggaactgaactgcacgcctgggatctcgctgccccagctcaatgaaacttccaccgacaataatggtatagaggctctaatacgtgaggatttgcactctgatgaggaggacgaggagtataccttcaaggaggaggactttcattccgatgatgatcctaacactacagcatcggatttcgactccaatccctgcacgcctcaaactcctcttactgccaatgaggaatctcctatcaaattctctgatgacggttgtttcaaggtgccgttggacagaaattttcaggataaagaggatcttaggattgccactagaacgcgctccaaattttgtttgcagcaaactaccattgaggatttgcagtcggaatttgtcccgccggacgtggagcctagcgatgtggtggagaacgaaatgaccgccaacgatgcggattggatgcagttcctcaatgactttacaaagcctttaaacaatacggtccagggcgacgatgatgatcctattaacgatccagaatatgtggccgctgatcacttggaatcggaatatgagaacgccgaggagctgcgcgatgtaaatatatctaaaaaagagttaactgacctggtctctgagctgtttgctggtttgctggaagaaggagtctctctggaatcgattgaattggaaacacctcaaaaattcgttgaaagtgccaacgtttcgatgattcccattgatcaagtgtcccgtaacatcgattttgatggccagcagataaatgctaatcagcaggagctgtccgtttttcaacctaatctaatgccgcctccttgcgaagggaacgaaatgggcatgggtgtgcctgtccctgtggctgtgctgcaggaggaaactggtggatccgcttgcaatgtggtaaacataccttccgaggcgctgactgttccccccgaactaatagctgttccaatacctgggcaacctaattgcttccaaatcgccaaagttgtaggcaatgattcaactgttggtcttccattaactgaagagacactgcagaacttttctagcttgcatccaatggaaccccccgtggtagctgcaagcaatggagatcgatataaaaaaccatttgatacgaacttcacctgggaatacatctcggttaggaaacatatatattcggagtatgaggaaaagtttgagagcctgcgaaacgtagagccagtaaacctcaatcatctcgccaggagcaggggatttacccagtctcagcatgatatgcttcagcagcagcttcgcattcacacgcagttgctcagtcaaagctatctgcaaacctactcccatcctacgttgtaccccatggccaagaagcccagagaaatgttggaagaattgcacaaaatggcaactaaagatcccagttttaattgctggaatctgcaggaggctgttcagctggttagaaaatgggaacatgatctgtccagtgatgagtttaaggaggagaacgagaagatgatggacttcatcaataaggaaacggatctgactgatggccacacgcgccaggttcccaggctggcgcctcgtattatggatctcatgctggatagccgggtgtttatgtatccgcagtacctaccccgtatggcgtttcaaccgaaactgactcaaaccaccgcttacgcaccatccgaatatcagcttattgccattggcctagagaagcacttggcattaatggtaaaagccaagagacaactacgcaaaggtgcagatcccattcgcgttgcctgtaagcgaatgattaaggatacgatttgtggaaagactgcccgccgaattttcttgaaaatcgcggagctacgcaactcaaaacagtacaatccagtgaagtatttctttgaacatcgtcgagcaccgcccgctaacgccatcctttggggattcgctggtgggctggtgagaactccgcgggaacgacacatggagcttcccagtggctggcaatactacattgagaaaacttgggatcaaaagcgcacacgtcgcaattttaaagcatcgaaagcatcgtcggtggctagtgcttcttatttggagtttgtacgcgaggcggtcggcgaggacctgctgctgccagagacttttggtcaggctgcggtccccaatggcagtgctgctggttcggaaccgcccaaggagagcaaaccgaagaaaaggccagcgcaaaggagaccccgccctgcggaaaacccaccacagcttaccatcaatgtgaattatgtttttggcgggaatacgagcgcgggaaacatacccggggtctctggggtttcggtgcccttggtggccggcggaaatctggccgagaacgtactgaacatcaatcgcagcttatacaccgccgccgagtgcagtagtctgctggccttgccgcctgctcctccaccattggatgaaaatgctccgccagccatcaacttcacagtagacaagttcactaacacactacaaatctgcgaattggaggaatccagcaaggccgtacagccggatctgttgcctgcgcaggataccccttccgtcccaggcagaaacgccaaaagggcgcgataccaaatctttaagccaaaggttcaatccgccaataaatcgcgaaaagggtcaacaccaacccgcagtcgataccatatattgcgcgaacgtttgcgccataaactaagccagcgctgtcattccctaatcaccacctatgaatcctacctgcgtcatcacatcgaaaaatataaagactgcgagttggtacaggtcgtgcacaatcgttttttcgccctcgaactgtacactcaacttctggtcgatctgaggatgttctgcagcaatacaaactctaaaacggcagcgcagccaaagagatctaggagtgatgatgaggcggcgaagctgagaagagccaaccggcaggaggagatgcttcgccaaatgctccagccggatactacagaagagcgcaatcgcaaagatgccatttttgccatgaatttttatgaaaaggtagaggaggccttgctgagtgccaatcgcctagatgattgcaaaaaattcaacagtattttgcaaaacttcgaccccaggcaggagaaagtttcatctttgtatttgaaagtggaagaaattttgctacccactcatcccgaactggctgaagtattcctcaactttttgctacctgccgaggccgctgagatgggaaaattctttgagcactttatgatatgcaatgctaccaactttatcaacaaacttaacatttacttcagtaagcagccagctcaaatcaggaagatttatgcctgtctaaacgagttggccgaaatgcctaatgtcagcatgaaaaaagttgaaaataagataatgcccttgctcaagggcaatcaatttctgatcgattggtttgtgcaacaattcccacagggaaaaccaccaaaaagaatcctttctcctgtagagaccataaatttgcatgacgttcaaaacaatacaacgggagaatatacggaaactattcaagagtttacagatgtacctacgccaagtaaaccaggttgtcacttaaagtatatcaatggtcgcatattttatggagccaagatcctattgcctgccaaactgtcttttatggctgccagtatttacaatgaacaatctcatgacgtgccacccgtctccagtgactcgataaactgcgcccatggtattcgtgcccagggagaaaaacttcttagtatggcttccaatacagatagcgacgatggcgcggatcggagtgaggaagatgatgccagccgcgccttgattattgataccacgagtgatgagcagaacagctgctcatctattgagatgtgcgatgagacaggcttaagagcacatgcaatcagattgaatcccggcttgtataccaactcaagctttaacaatgcagcgaccagtacgcccaatctgggcaactctcaccaatcccatcatccgcacgccaaaaaaactgccataaactttggtgaaatatccccacgcaagcaatcggcatttaacaactcgggattgagtcccttatcggcggcccccaacagttcccctcaagtcgacaaacgaaagtcacctactaagaagatccgatctcctcttaatcaaactcagagcagacaacgtgccaataatcagccaatggttgttatccatgagtctcagccttcatcttcgccagccattgagtgtgcaaagcgcttgcgcacgctgatcgatcaggagagcgtgcgggatgcagcagatacaaaggcgggcattcgaattattgcgcaagccaagcagcaacctccaaaccaatgcagctctgaagctattacgaaagtcgaggtagtcagcctggatgaaagtgccgagaatatgcctttctgtacaaatctcaaaatggacacagatcaatcggaggaggagctggagccactgcaattaagtgctggcaacacaccacagcacgtgatcacaacacaattcgatagcgatgaggactgcaagctggatgttgtggccacgctggcgaactgcaccaccaccgaagatagatcggaatcggcagcggcattacctgccaccacatcgcactctgagtctggtagttcccactcggcaccttggactcgtgaagaggacaaagtaatcctgatcgaaatgaaaataggggcacgggatcgagagcagctcattcggcgtatgcgcgccaagctaaagaatcgcagtatagaagaactacgtagtaggcatcagtttcttatggactttctgtccaaattgcagggaaagtga

SEQ ID NO: 39279 - protein, 1739 aa, DROSOPHILA
MPSSAKKSDSAKSNSSTPRRPRKRKRVDRQSLDSQVDEDAKEIDRRLRKVAKKNSISAEDMQKVVRKVVRNDHVLALVTLKAEDELAREKLESAEQQKRGAIIITDTPSVPKLTRAKARELNCTPGISLPQLNETSTDNNGIEALIREDLHSDEEDEEYTFKEEDFHSDDDPNTTASDFDSNPCTPQTPLTANEESPIKFSDDGCFKVPLDRNFQDKEDLRIATRTRSKFCLQQTTIEDLQSEFVPPDVEPSDVVENEMTANDADWMQFLNDFTKPLNNTVQGDDDDPINDPEYVAADHLESEYENAEELRDVNISKKELTDLVSELFAGLLEEGVSLESIELETPQKFVESANVSMIPIDQVSRNIDFDGQQINANQQELSVFQPNLMPPPCEGNEMGMGVPVPVAVLQEETGGSACNVVNIPSEALTVPPELIAVPIPGQPNCFQIAKVVGNDSTVGLPLTEETLQNFSSLHPMEPPVVAASNGDRYKKPFDTNFTWEYISVRKHIYSEYEEKFESLRNVEPVNLNHLARSRGFTQSQHDMLQQQLRIHTQLLSQSYLQTYSHPTLYPMAKKPREMLEELHKMATKDPSFNCWNLQEAVQLVRKWEHDLSSDEFKEENEKMMDFINKETDLTDGHTRQVPRLAPRIMDLMLDSRVFMYPQYLPRMAFQPKLTQTTAYAPSEYQLIAIGLEKHLALMVKAKRQLRKGADPIRVACKRMIKDTICGKTARRIFLKIAELRNSKQYNPVKYFFEHRRAPPANAILWGFAGGLVRTPRERHMELPSGWQYYIEKTWDQKRTRRNFKASKASSVASASYLEFVREAVGEDLLLPETFGQAAVPNGSAAGSEPPKESKPKKRPAQRRPRPAENPPQLTINVNYVFGGNTSAGNIPGVSGVSVPLVAGGNLAENVLNINRSLYTAAECSSLLALPPAPPPLDENAPPAINFTVDKFTNTLQICELEESSKAVQPDLLPAQDTPSVPGRNAKRARYQIFKPKVQSANKSRKGSTPTRSRYHILRERLRHKLSQRCHSLITTYESYLRHHIEKYKDCELVQVVHNRFFALELYTQLLVDLRMFCSNTNSKTAAQPKRSRSDDEAAKLRRANRQEEMLRQMLQPDTTEERNRKDAIFAMNFYEKVEEALLSANRLDDCKKFNSILQNFDPRQEKVSSLYLKVEEILLPTHPELAEVFLNFLLPAEAAEMGKFFEHFMICNATNFINKLNIYFSKQPAQIRKIYACLNELAEMPNVSMKKVENKIMPLLKGNQFLIDWFVQQFPQGKPPKRILSPVETINLHDVQNNTTGEYTETIQEFTDVPTPSKPGCHLKYINGRIFYGAKILLPAKLSFMAASIYNEQSHDVPPVSSDSINCAHGIRAQGEKLLSMASNTDSDDGADRSEEDDASRALIIDTTSDEQNSCSSIEMCDETGLRAHAIRLNPGLYTNSSFNNAATSTPNLGNSHQSHHPHAKKTAINFGEISPRKQSAFNNSGLSPLSAAPNSSPQVDKRKSPTKKIRSPLNQTQSRQRANNQPMVVIHESQPSSSPAIECAKRLRTLIDQESVRDAADTKAGIRIIAQAKQQPPNQCSSEAITKVEVVSLDESAENMPFCTNLKMDTDQSEEELEPLQLSAGNTPQHVITTQFDSDEDCKLDVVATLANCTTTEDRSESAAALPATTSHSESGSSHSAPWTREEDKVILIEMKIGARDREQLIRRMRAKLKNRSIEELRSRHQFLMDFLSKLQGK

SEQ ID NO: 39280 - DNA, 4224 bp, DROSOPHILA
tattatattatggtatatattaagacaactcacatctaggaattgcagaaactcatcgaacaatcgcttcaaatcgcgtctgttgcgctgcagcatgggtaggaactcatcgcgatggaactcggcgatctgctcgatgtttccaaacagatcgtacttctttccccgcagacccaggggaagatccttgcgctggaagatgttgccatagttctcgatgcccgtgaacaggttattcacgtaggcctcctccgtcttgatcagctcctcgagaatgggatgcacgcacttgtcgctcttatcgcgcagttcgatctcaacctcctcctccctggtaaaaattaaaaatatgattatataaataaaataaataataataggaggtaatactcactcatctttgggttgatagaccgagtgaaacttgcccaccaaatgctcgttggtggtcccaatgatttcagtctttcgcctcggcgtagaacgatagtttctggagaggaagacagattgtaagtcccggttaaatagaactctggctatctacagcttaatgaaaataaccgcccagacaatggcaaaaacaagtgcagcagtgataactgtttagataaaccccccgggagcaggagacatcgggtgagtcagcagtaggagctctagtgataagagcagtgtcaacctttaagcaactgaaaactgatctagataatgtcggagcatacatgcttgcccagccagtgagtgagtcagggaattcaattttcggagacttcagtccggtagctcgggggaaagacgactatcgtcttgatgttctttagtggggccaccaaagatcatcatggattcttcaagcgatttggccgtccaggtgactaccacaagaataaaatccatttgcgagataatgaaccaggagatcattataagaagacccatggacagtgcggtcacaatgaaaccggttatctggaaaaggactttgcaaagttggcagttagtccgtgcgacctggattgtgaatggtacgaaccccggcaaggcagccatccatatcctcaatattaaaatcttcccttcgccagtgggaggaggagctgcttgaaggaccggattccacatccttttccgcctccgaactgccctccctgagaacttcgatcgcgtcgtagtctacatttctttgcgccccttttgttctatacttatcattttctttttccagatcatcagtatatgaggacaaactatcccgatctaaggaacgtgttcgcaatcctctcacttctctatgagaggatcgtgaactggaggccagttcagtgctggctgatctcacggaacgctgggatctgggtgcactcttcacactgtcggcacttccggcatccgtttggttgtcaaatcctttcacgcgtttccttaccggcactgcgggtggaaccctcttcttcctttttcgcggcggaagcggatcatcacgggtgtctgtgctcacggacactccaccgggcgctgtatacactatggcgcgttgttcgcgttcctggagagcctcctcggagatctgacgctcgagcccgggattcgtttgagaactggtactatcctcgtccttcttgggctcatccatgatcgaggtggaactgcttcaaggtgaccggctcccaaggattcattttacgatttttgtcattctcaaaactagaatagtctacgaaatgcctgctctgcttggcagctggctatcctccgttttagtgcttgttttttttttttggcagtttcactgacgaaccggttgacgaaatgtactccaaaattcaattaacactttgcccatcaagttttggcagtgcgattgctgtgaaaagcttacttttttatgggcaagctcgcataatttgatttccacaccgaaaaggaagctgaacgaccgcgaagtctagttagtcaaaactggaggaaggctgactgtgttggagctgctatctagttctatgcgtatcctgccataacgctatcataaaatgtttaacagctagctaataattcatatcacctatcaatagatgatagataaaacttgctgttttagcttgcatactttgagaaagcagcttaagcggaaagcccacaaaactatttgagttaaaactttgatgtttattattcaccataaatctagctaaacaaacaagagttgtttgaaagataaatttctttcacgttcaattaagaaaaaagctttttccataacgcacccttacaaagtatttccattagacatatgtatgtaattagcgaaataacacagctgcacccgttagttttcccgcaatctaaagttttcataaatccacccgcactgataaggtttatcgttatctaattatttacctggggaaatcgttgcgcatttttagcggcaatgtgagcgcttctttggactgatctgcgctaatggatcgctgcacctgctgctggtcgacctttgagtccgcgacctcctcactgggaacgacctccgaggtggtatccacaaccaagtattcctcagcggcggtatgcgaatccgtttcaaagtctgatatctgatccacctcgtcctcggatcgcacctcatgaatgccagcttgaaaactgggtatggagctgctgcgactactgcccctgctgcccagccccgggaggcgtatgcgacgcggaggcgtggcaggtggcgtgtggtgatcctcggattgatcctcaaacgacggatgacgacggttctccagtaatttgaggctatgcctctcctgcttaatgaagcaaatgttcgtcctaaaagcttcgaaacgatgcaccttctgccggacatctagcagtgcgggatctggtgtttggggcgacattggtgactccggtgtggattctgttcccaacccaccgacgctctccgcctcgtgcatcttgagcagtgagcggtgacggtaggaactatccgtatcggaattcacggagtacgagagctggatcgagctggagctgctgctcaccgaactgactggccgtgcgacgtcgttggactccagattgctactgacgagcgtgctgctatgccgctcctgctccgccgcctgatgactgatccggcggcgcgagttgcgcttgttgaagttgcggttgctgagattgcgctcccggcgaaagggcagcggactgagatcttcgtccgccatttttgagggggtggtcttccgataaaccttatctatggtttggggctctccttttgggtggctctctttctctctgtcttgggatcttcactgtgacattgtcgccgagcgagtttgcgttctcagttctcccccgccgctccagttgaattaattgtttacgaccagctatttacttttggtttttgtcagcaccaagtgtatataatgtttatcttatacgtatattcaatttgttggttttaaccttttttttttggcgttgaaacacgtattcgtatctttctgtttgtgttggcgtcaagtgttgcgcttttttgcctgacttctgatactttttcgtcactttattgcgctgcgaaacagaaatttataattaaagcgatttatcgtcaaagccttataaataacgagtgtacaactaattagacatgtaggggaataaatgttgacgtattgcgaatgcaaatttgaacaagggacttaatcattaacgactaggaaatccggaaagcaaccttgagcgcacagctagcatgggaagcaattacaaataaaataggtcattaaattcagtgagaatttagcgcaacttcttaacttttgataaagctgtcaagagctaaaaaaaacgacattgtagtctattaagtttatctatcaattacagctgaaaatgtttgatcaaaaacaatagtataattatgattgacacttcttttctcttgtagctcaacaattattattttaatttaaatgtctgcattgataagatggccaaatatttgcatagaatttaactaagagatacaaaagatatatttttgtgacaaatgacgtcaagttgtcggaggttcgtgacagaaagagagagcgctcaagtgggaaagggaggcattctgtgtatagttaattatgtgtgacgtttggtttgctgtttctgctgctttttatttgaacaaaaaaaaaaagctaaaaaaaaaaaataataaaaaaaaca

SEQ ID NO: 39281 - DNA, 1473 bp, DROSOPHILA
atggcggacgaagatctcagtccgctgccctttcgccgggagcgcaatctcagcaaccgcaacttcaacaagcgcaactcgcgccgccggatcagtcatcaggcggcggagcaggagcggcatagcagcacgctcgtcagtagcaatctggagtccaacgacgtcgcacggccagtcagttcggtgagcagcagctccagctcgatccagctctcgtactccgtgaattccgatacggatagttcctaccgtcaccgctcactgctcaagatgcacgaggcggagagcgtcggtgggttgggaacagaatccacaccggagtcaccaatgtcgccccaaacaccagatcccgcactgctagatgtccggcagaaggtgcatcgtttcgaagcttttaggacgaacatttgcttcattaagcaggagaggcatagcctcaaattactggagaaccgtcgtcatccgtcgtttgaggatcaatccgaggatcaccacacgccacctgccacgcctccgcgtcgcatacgcctcccggggctgggcagcaggggcagtagtcgcagcagctccatacccagttttcaagctggcattcatgaggtgcgatccgaggacgaggtggatcagatatcagactttgaaacggattcgcataccgccgctgaggaatacttggttgtggataccacctcggaggtcgttcccagtgaggaggtcgcggactcaaaggtcgaccagcagcaggtgcagcgatccattagcgcagatcagtccaaagaagcgctcacattgccgctaaaaatgcgcaacgatttccccagcagttccacctcgatcatggatgagcccaagaaggacgaggatagtaccagttctcaaacgaatcccgggctcgagcgtcagatctccgaggaggctctccaggaacgcgaacaacgcgccatagtgtatacagcgcccggtggagtgtccgtgagcacagacacccgtgatgatccgcttccgccgcgaaaaaggaagaagagggttccacccgcagtgccggtaaggaaacgcgtgaaaggatttgacaaccaaacggatgccggaagtgccgacagtgtgaagagtgcacccagatcccagcgttccgtgagatcagccagcactgaactggcctccagttcacgatcctctcatagagaagtgagaggattgcgaacacgttccttagatcgggatagtttgtcctcatatactgatgatctggaaaaagaaaatgataagtatagaacaaaaggggcgcaaagaaatgtagactacgacgcgatcgaagttctcagggagggcagttcggaggcggaaaaggatgtggaatccggtccttcaagcagctcctcctcccactggcgaagggaagattttaatattgaggatatggatggctgccttgccggggttcgtaccattcacaatccaggtcgcacggactaa

SEQ ID NO: 39282 - protein, 490 aa, DROSOPHILA
MADEDLSPLPFRRERNLSNRNFNKRNSRRRISHQAAEQERHSSTLVSSNLESNDVARPVSSVSSSSSSIQLSYSVNSDTDSSYRHRSLLKMHEAESVGGLGTESTPESPMSPQTPDPALLDVRQKVHRFEAFRTNICFIKQERHSLKLLENRRHPSFEDQSEDHHTPPATPPRRIRLPGLGSRGSSRSSSIPSFQAGIHEVRSEDEVDQISDFETDSHTAAEEYLVVDTTSEVVPSEEVADSKVDQQQVQRSISADQSKEALTLPLKMRNDFPSSSTSIMDEPKKDEDSTSSQTNPGLERQISEEALQEREQRAIVYTAPGGVSVSTDTRDDPLPPRKRKKRVPPAVPVRKRVKGFDNQTDAGSADSVKSAPRSQRSVRSASTELASSSRSSHREVRGLRTRSLDRDSLSSYTDDLEKENDKYRTKGAQRNVDYDAIEVLREGSSEAEKDVESGPSSSSSSHWRREDFNIEDMDGCLAGVRTIHNPGRTD

SEQ ID NO: 39283 - DNA, 3867 bp, DROSOPHILA
ccatgaatttaatatttttgtgtccgtctaagtttacttttctatatgataagaaggtcgcattgtttgaatttgattattctattctatagttttggttaacgagcacattgttttccattgtcttaaagattgtaaatatataaaaatataacattttttaaaatctctaaaatgtatctgatattgtcaaaccagcttgttcgggaacttcaaacgtattcgcatttgagaacttaaacaaacctggaattgttcctttaagaagtacgacgtaagactaaaatatggagctctcgttggatgaaccgcaatgcgcatccttcttttgcatcctgggtgccgtgtgcgccattgtcttttcgacattgggagccgcctacggaacagcgaaggcttctgtgggaatctcttcgatgtcaatcaagcatccgcagctgatcatgaaggcgattgttccagtggttatggctggcattatagccatttatggactggtgatcgcggtcctgcttgctggatcacttagcagcccctatagcgcctacaagggtttcctaaacctcagtgctggactggcggtgggagtctctgggatgggggctggaattgctattggcgtggtgggcgaagctggagtccgtgcatctgcccagcagccaaaactctttgtggccatcattttaatattgatatttgccgaggtcttgggtctgtatggtctcatagtggccatttatttgttttccaagtagtgggagttatgcctacctttgctgttattaaagaaaaactggtttgatacattctgttctgtctgttgatgcttcatcattagtcaaacgtcaaactatttgctcagctgtaagacagttttttgtagtcagcttcgttctatcttttagtggaatagttaccatttgggattcacagggttaacatcaaactgaagatgtatctccattatttttttggattcagcttagtctgcagtattgttctagttcaagttaagactcaacagaatgctacaagcaacgctaccaatatccatgggaataatactagaaggcacataatggtacggaaattgcacgctgatgagaagcagggtaaaggaatgatgagtatagtgatacacaagattcaacccgggcaatcctactacaaggtgtttgatggcgatgaggaggcagcgcgtggattcaccaataagatatggaaccgtttgtttaatcgctatagcacaatgcgcatataaattattagtcttaattctagttacgtatgcggaataagttagcttaagttataattataaagctagaactgaatatggattcctcgtctggtgcggaatcctttgagtgcaggcaggcactagatctggtgtagaaaacctctgactcatggtggctatgacttccttcgtcctgctcggaatccttcatggtgaatgttcccactgccgtcttgcaatgggcattgattttgcagctggagtcactggcccaactctcgcaaccgcagggcaatgcctcatctggtggcagatgttgtggagtcacactgctcaccacccgctcctctgctgtggccttctgctttctcttgtcctggcagcgtctccatgtccttcttacagcccggaaacaacacaaaccgaagcacacatcggaggttcccttaagacacaggaaaaactccggcataaacgatggattgatcacggcgtagacaactatgttcagggacaactgcagtgcattcaatgttatgcagatcacctccagctgctcaatgaaggagtcatccaccttgttggcatcaccaccgaataaaaggtttaaggagctctttctggacgtcatgtgtgcgggaagttcgccgaagaggtacaatgtaatcacaatcactatgctgatggtcaacttcatttggtgctgcaaaaagagggatttaatgtttatgcgaatagataaaataaaatataaattacgttttccagtcgtatttatatttattggatacctgatatcgcttggcagtggtgcggctattagcagcggggttgttagcctggcatatacgactttgcttcgtccatttccggaaggctataataatggccccattgccgatgaccagaaatatggctgggaggagggccaacaaggcgaaggtgaaccagttttgaactttataaaaactgcagccaaaagaaaaactgcatgaaaacatatggccacttactccctttccagttaaactcactttgtgtagtagaattctgtgacgtgacaagttcccgagtcactcacgtagaagacgaaaaagtatggcatattgaccacgatggatatgcctattgccacaacaatgatgcagcgagccacctttcggcgacaaaatcgcggagcaccgttgttccttttaaaacaggacagatagatgaatctatccaggctcagacacgctagaatcaggttcgctccgccagtgctgatgccaaagagtggcgtttgccactgatagtcgtaggtaatccatgtgggactgctgtagaaatagctcctggacagggcagtcattgtgatgagcaggcatgagatgcagtccatccacgaaagggccgccaggtaactgaaggccgatggcgtcatcttgggacgcatgaataccacggcgttgataaagttcgtacacagtccaaaggccgacaaggtgggcacggccagtccgtagagcacaaagagcacaactgtgggccttcgtctctggaagatgcactcatcgctatgctgcattccgtgctcctgcccaattagccaaccggattctgagctggtgaaattgccggcgtacatgacagattggatgattcgatgactggccatgttgttcactgactgactgactgactgggtgaagaggaggatttggcagcgactgctggacacgtctatctaattgttgcaaattcacgataagattatctagcgctaacggacgcataaatgttaatttgtacgcaatcaatgataacgccgccatgcaaacccacctcaacatcaacctctttctcggccgatccccctctcccattatcttatataggtgctatagaggtatatatgaccagatatcctgacgttcttttatttttttgttgcatacttagctgagctccgtgaatttatgatctactggttgagatgtaattcgaatttttgatacccacgcctggattgtggctaaaaaaaaattttaaaaagaattctgttgaaaaactcttcaaatgattattgaactaccaccccagataaacatttttcatttacgagattcagatgcatttaatagtacttttatttactttcgggtactcgtactgtatgtgtgtggtgtgcccaaagccgtttgtttgatttatttgagtttgtctctttgtttggcttggctcaataaattatagattatatccagcctggtactgtgtgtactcgtaaatgtatatagtgaatgcacatatgcacaggcatatagcacggactgactgttcgggttttgggtgggtgaattattcagacgtaaaaatagtattcattagtttagttcggatttcggtcgagagttttgtttggaagttttcgctctctctttctctcgcgtgacatcttattatatcttttaagtaattcacatcgatatttcatagatataatcatgttaatgtatatgtttatatatctatttagtttgtactaagttaatatgcaattcaaatacatacgtatgagacttaggtttaaaaaacgaccgtgaaaatgatcaaaattacataaatatgttttgtaaaaatgttga

SEQ ID NO: 39284 - DNA, 1179 bp, DROSOPHILA
atgtacgccggcaatttcaccagctcagaatccggttggctaattgggcaggagcacggaatgcagcatagcgatgagtgcatcttccagagacgaaggcccacagttgtgctctttgtgctctacggactggccgtgcccaccttgtcggcctttggactgtgtacgaactttatcaacgccgtggtattcatgcgtcccaagatgacgccatcggccttcagttacctggcggccctttcgtggatggactgcatctcatgcctgctcatcacaatgactgccctgtccaggagctatttctacagcagtcccacatggattacctacgactatcagtggcaaacgccactctttggcatcagcactggcggagcgaacctgattctagcgtgtctgagcctggatagattcatctatctgtcctgttttaaaaggaacaacggtgctccgcgattttgtcgccgaaaggtggctcgctgcatcattgttgtggcaataggcatatccatcgtggtcaatatgccatactttttcgtcttctaccaccaaatgaagttgaccatcagcatagtgattgtgattacattgtacctcttcggcgaacttcccgcacacatgacgtccagaaagagctccttaaaccttttattcggtggtgatgccaacaaggtggatgactccttcattgagcagctggaggtgatctgcataacattgaatgcactgcagttgtccctgaacatagttgtctacgccgtgatcaatccatcgtttatgccggagtttttcctgtgtcttaagggaacctccgatgtgtgcttcggtttgtgttgtttccgggctgtaagaaggacatggagacgctgccaggacaagagaaagcagaaggccacagcagaggagcgggtggtgagcagtgtgactccacaacatctgccaccagatgaggcattgccctgcggttgcgagagttgggccagtgactccagctgcaaaatcaatgcccattgcaagacggcagtgggaacattcaccatgaaggattccgagcaggacgaaggaagtcatagccaccatgacgtgcaatttccgtaccattatgtgccttctagtattattcccatggatattggtagcgttgcttgtagcattctgttgagtcttaacttgaactag

SEQ ID NO: 39285 - protein, 392 aa, DROSOPHILA
MYAGNFTSSESGWLIGQEHGMQHSDECIFQRRRPTVVLFVLYGLAVPTLSAFGLCTNFINAVVFMRPKMTPSAFSYLAALSWMDCISCLLITMTALSRSYFYSSPTWITYDYQWQTPLFGISTGGANLILACLSLDRFIYLSCFKRNNGAPRFCRRKVARCIIVVAIGISIVVNMPYFFVFYHQMKLTISIVIVITLYLFGELPAHMTSRKSSLNLLFGGDANKVDDSFIEQLEVICITLNALQLSLNIVVYAVINPSFMPEFFLCLKGTSDVCFGLCCFRAVRRTWRRCQDKRKQKATAEERVVSSVTPQHLPPDEALPCGCESWASDSSCKINAHCKTAVGTFTMKDSEQDEGSHSHHDVQFPYHYVPSSIIPMDIGSVACSILLSLNLN

SEQ ID NO: 39286 - DNA, 3682 bp, DROSOPHILA
tttgcaatttggttatatctttttgaattgttaagtaatcacgttgtttgcaatttaggcaaaagcgcgataatatcatcaattagatatttagtagaagagatagttatttctactaacaaataactgagattaaagtcgaattaatgcgttatttcaagtatttgaattttctaacgaaatttaaatttgtataaataaatacatctgttttaaactcttaaatagtgaatactaccttattttgctctgtagaggatatgcatttatttaaggaaataattttcttttgctgaaacttgagataaatttgatttatcttttgtttagggaatgtaaaagtatgcaagaaaaacactttcttcctgccggtctgcatttgtcaacatcacgatccatgcatttttcattagtcttcaggtgccccatgtctgcccggcgattcccttccgacaaatgagccacattgtcaacaattaaaatcgcgatcgtttcattagcgaccagggggcatactatatagatatatacatacatatagtatatatccgtggggtgcagtgcggagtcgccaactcttttccctcacgaccgatgatccaactgcaggcgaaaccagtctgcgtagctttcactgcccacccaaagtgaggaagctgacacgatcgatctgctacaattagcactatccgatgagataatttttgctggcgctaatttccatttcataatcgggccgggtctcgttgacatttatgcgcaaattgattggaattgtgttttggttgtgggtcttttgaaattgtaaccacaaatcgggctaattttgcgaaatcacgagggcgtttcctgaccttgttggattctccaaatgcagagatggcttgcgtcatttatccaacagttccatatttatccgaataatacaaaaacccatttacataataaaacaaattggccaaataaagagggcccagacccgaaaagtctttggcccagcatgatttgtcatcagctagctcatttgacccaggtcaggcattgtatgaaattataaacatctggggttatgcaacatttctttgtcggtcgcccaaaaaacaatgccagactctgacccacttaaaactggttttcagtcactcacctttctttggagaatatggaattcattaacatgatcgttgcgaattcaatttaaacaagctttcttcatgcccgagttcgttgtctcagtcttttgatttgtatctattaactacaagcataaacttccacgctcatttcagttgggtctgctcggtgtgctctgtttggccatcggaggcagtcaatccaaggctgtggtggatcagcagcctgcagcttcccaggtggatagcaaaagtgtcgctcagcagaggatcgatctgggattgggtctgggcgatgacctgatccacgaccaccatcacgagcacataatcgaacatcacgaacatcatcacgagcaccatgaccccgggtactggaagaagaaggtcacttggaaggagggatggaagaaaatttggaatccggctaagaaacaaatctggaatccttcatggaagaaggtaaatagcttagtctataataaaataaataatcaatatatttagggattgagtacaattttaattatgtctatcacagatctggaagccacattgggtgaaagtgcccggctggaaggaaatacaggttccagcttggaaacaaatttgggtatgttctaaatttaactctcaatgaaagtgcaattaactatatacactctgtatattaggttcctcactggaaagagattttagtgccagcctggaaggatattcaagtacccgattacaagcagatctggacaccagaactagtcaaggtataatggaatatacatttacctttaagtgcatgtagctaagaatcatgttaatttaaaggttggcattcccggagaaaaatatttgggcaaggatcacgaaggttgggagtacaccagccacgatttgtggaagaaggttggttgtaaaatatattttaagtttaaggatgttatttaaacacttaaatcccgaatgtttagaaagtggtctggaaatcgcactggaagaagatctggaagccagccaagaagcaaatctgggtgccagagaagaaattggagtggaaggaggcatggaagcagtactggaagccagcgaagaaggaaatctggaccgataaattggtatgtttatcatactaatcagaaataaaatccgaactaaatattccaactcttttcaggaatggaaggaggcatggaagcagatttgggtgcccggctggaaggagatctgggtgcctggatggaaaaagatctggaagccagtggtcatttcagaatggttcccctcgcccgatcaccacgatcatcatcatcatgagcaccatgattgggatcgcaaggacacaggtgttacggccaccaggacggcagatggcaaagataaggtggtctggaaacgagatgacaccaatgccgctggcaagccaacaatgctgcagccagtggccagcgccgacttccaggccaagtctctggaggcagctaaatcccccgtagcagcacctgccgcctcggtggccaccacctcgcagtcattcaagtttcccggcgcgtaggaggtcattgcatcacctaaacggttgcataacagcgcccggttccaagctccttgtaaatagtcgtaaaccagtcgctagctcataaggccatccatttccacttccatttgccttggcgccactttaaattatctctagactttaattaccagtgaatataaaataaaatataaacaactaaaccataaataatcttagcctatgtttcagtctcagtgctatttttaggagcgatccttttccgcctcccattcattgggcacattgggcaagggcacccactcgttgtgaatggtgggtgtccagacctttttccacaccggctcgtagatcttcttggcccgccagtactttacccagcgagcgttccacgtcgtcttgttgacccagaagccatcggcctgcggatcgagggtgtctgtgtggctaacgctgggtttttcgaaagggagaaaggaggatggattagtggattagttagtgaaagtggtctagtggctggctagttgcgtaatcctctcacatggtggtcgtcttgccggccaggccgtagctgaagaaaatgaccaatattactgtcagcatcagcaggggcctcattttaatccatggatacgccatcctgtcgccacttttcgccgctttcatgtttcgcaatcgactggcgaggctattagccaatcttcacgttttaaaggcctccagtttcacggcaagccgagctccctaattgtgattcagtgcgtctgtgcaaatgaattgcaaattcccgcactttgcacgatctgattgggttgtgaataaccctagatgccttatataacgcacatttcttttctttcattttgtagtttattttgtttttgttgcatttctttcttaaatgtaatgtaaaacactgcaaatgataatctgtatgtgtgacaaagcttaggtgttacaattcaatttctcaaccgaaaaaaagaaacactaacattactttcgtttcctataa

SEQ ID NO: 39287 - DNA, 1101 bp, DROSOPHILA
atgatttgtcatcagctagctcatttgacccagttgggtctgctcggtgtgctctgtttggccatcggaggcagtcaatccaaggctgtggtggatcagcagcctgcagcttcccaggtggatagcaaaagtgtcgctcagcagaggatcgatctgggattgggtctgggcgatgacctgatccacgaccaccatcacgagcacataatcgaacatcacgaacatcatcacgagcaccatgaccccgggtactggaagaagaaggtcacttggaaggagggatggaagaaaatttggaatccggctaagaaacaaatctggaatccttcatggaagaagatctggaagccacattgggtgaaagtgcccggctggaaggaaatacaggttccagcttggaaacaaatttgggttcctcactggaaagagattttagtgccagcctggaaggatattcaagtacccgattacaagcagatctggacaccagaactagtcaaggttggcattcccggagaaaaatatttgggcaaggatcacgaaggttgggagtacaccagccacgatttgtggaagaagaaagtggtctggaaatcgcactggaagaagatctggaagccagccaagaagcaaatctgggtgccagagaagaaattggagtggaaggaggcatggaagcagtactggaagccagcgaagaaggaaatctggaccgataaattggaatggaaggaggcatggaagcagatttgggtgcccggctggaaggagatctgggtgcctggatggaaaaagatctggaagccagtggtcatttcagaatggttcccctcgcccgatcaccacgatcatcatcatcatgagcaccatgattgggatcgcaaggacacaggtgttacggccaccaggacggcagatggcaaagataaggtggtctggaaacgagatgacaccaatgccgctggcaagccaacaatgctgcagccagtggccagcgccgacttccaggccaagtctctggaggcagctaaatcccccgtagcagcacctgccgcctcggtggccaccacctcgcagtcattcaagtttcccggcgcgtag

SEQ ID NO: 39288 - protein, 366 aa, DROSOPHILA
MICHQLAHLTQLGLLGVLCLAIGGSQSKAVVDQQPAASQVDSKSVAQQRIDLGLGLGDDLIHDHHHEHIIEHHEHHHEHHDPGYWKKKVTWKEGWKKIWNPAKKQIWNPSWKKIWKPHWVKVPGWKEIQVPAWKQIWVPHWKEILVPAWKDIQVPDYKQIWTPELVKVGIPGEKYLGKDHEGWEYTSHDLWKKKVVWKSHWKKIWKPAKKQIWVPEKKLEWKEAWKQYWKPAKKEIWTDKLEWKEAWKQIWVPGWKEIWVPGWKKIWKPVVISEWFPSPDHHDHHHHEHHDWDRKDTGVTATRTADGKDKVVWKRDDTNAAGKPTMLQPVASADFQAKSLEAAKSPVAAPAASVATTSQSFKFPGA

SEQ ID NO: 39289 - DNA, 2376 bp, DROSOPHILA
atacatttacctttaagtgcatgtagctaagaatcatgttaatttaaaggttggcattcccggagaaaaatatttgggcaaggatcacgaaggttgggagtacaccagccacgatttgtggaagaaggttggttgtaaaatatattttaagtttaaggatgttatttaaacacttaaatcccgaatgtttagaaagtggtctggaaatcgcactggaagaagatctggaagccagccaagaagcaaatctgggtgccagagaagaaattggagtggaaggaggcatggaagcagtactggaagccagcgaagaaggaaatctggaccgataaattggtatgtttatcatactaatcagaaataaaatccgaactaaatattccaactcttttcaggaatggaaggaggcatggaagcagatttgggtgcccggctggaaggagatctgggtgcctggatggaaaaagatctggaagccagtggtcatttcagaatggttcccctcgcccgatcaccacgatcatcatcatcatgagcaccatgattgggatcgcaaggacacaggtgttacggccaccaggacggcagatggcaaagataaggtggtctggaaacgagatgacaccaatgccgctggcaagccaacaatgctgcagccagtggccagcgccgacttccaggccaagtctctggaggcagctaaatcccccgtagcagcacctgccgcctcggtggccaccacctcgcagtcattcaagtttcccggcgcgtaggaggtcattgcatcacctaaacggttgcataacagcgcccggttccaagctccttgtaaatagtcgtaaaccagtcgctagctcataaggccatccatttccacttccatttgccttggcgccactttaaattatctctagactttaattaccagtgaatataaaataaaatataaacaactaaaccataaataatcttagcctatgtttcagtctcagtgctatttttaggagcgatccttttccgcctcccattcattgggcacattgggcaagggcacccactcgttgtgaatggtgggtgtccagacctttttccacaccggctcgtagatcttcttggcccgccagtactttacccagcgagcgttccacgtcgtcttgttgacccagaagccatcggcctgcggatcgagggtgtctgtgtggctaacgctgggtttttcgaaagggagaaaggaggatggattagtggattagttagtgaaagtggtctagtggctggctagttgcgtaatcctctcacatggtggtcgtcttgccggccaggccgtagctgaagaaaatgaccaatattactgtcagcatcagcaggggcctcattttaatccatggatacgccatcctgtcgccacttttcgccgctttcatgtttcgcaatcgactggcgaggctattagccaatcttcacgttttaaaggcctccagtttcacggcaagccgagctccctaattgtgattcagtgcgtctgtgcaaatgaattgcaaattcccgcactttgcacgatctgattgggttgtgaataaccctagatgccttatataacgcacatttcttttctttcattttgtagtttattttgtttttgttgcatttctttcttaaatgtaatgtaaaacactgcaaatgataatctgtatgtgtgacaaagcttaggtgttacaattcaatttctcaaccgaaaaaaagaaacactaacattactttcgtttcctataatttacgcatgcatttgttgttgatacgtacatatgtactttatagctctatttatgtctagtgcatcaacttaaggcagatatagagattaacggatgttgatcatgatagtggtagcgatacacaatattaaagcccttagttacgcgtagaaagttcgttggatttttgatttttcgttacaaagttaggagctgggcaaatcgaatttggattcgtttgctggccaacagtgtttgtgtagacacataaatttataaactaatatggcacagtctgcgcaaaattaagttgagtaaacgtccaagtaatttacttaatataacattttacaaatacaaagtacagcaaagacagcacattaacaaaaagacagccctgttgccaagctaagcgaattcggaaataaactggtttttagctagtagtattggatcccatttacagattttactacatttctaaattctgggtcactgaacaatcttaaaataaatatatattcgatgacaagccgttttatcaattccgtttccgatacattcaaattcaaataaaattggacttttataacagggccattacaaatttgggattctaatt

SEQ ID NO: 39290 - DNA, 285 bp, DROSOPHILA
atgaggcccctgctgatgctgacagtaatattggtcattttcttcagctacggcctggccggcaagacgaccaccatcgttagccacacagacaccctcgatccgcaggccgatggcttctgggtcaacaagacgacgtggaacgctcgctgggtaaagtactggcgggccaagaagatctacgagccggtgtggaaaaaggtctggacacccaccattcacaacgagtgggtgcccttgcccaatgtgcccaatgaatgggaggcggaaaaggatcgctcctaa

SEQ ID NO: 39291 - protein, 94 aa, DROSOPHILA
MRPLLMLTVILVIFFSYGLAGKTTTIVSHTDTLDPQADGFWVNKTTWNARWVKYWRAKKIYEPVWKKVWTPTIHNEWVPLPNVPNEWEAEKDRS

SEQ ID NO: 39292 - DNA, 4329 bp, DROSOPHILA
ctccagctgctggtgcattttatatcaaataatcgatgtacatgcgatgacagccactgcgtcgcgcttttttaattactattcaccacgcttattggcttcacctttcgttcgtttgttttaaaactcgagaacaacgaaaattcagcagcgaattagccgaaaacgatccgcgcgcgacgccgacgccaacgtacagtgtgaccgtgtggcttttggcttgaaataccactcacgaaaatgtactaatataagtcgaacggtaaaatatgcttcttaaatatattttttaaagtcattataatttaatcagattccattccatatttttatgtatctcagtgtatgacttagatattcattattaaaactgtttttcaaataatttctttaaatattaattttaaaatttgttttgtatgttcttgttatagcaagttataattgaaatttattagtacattttggttgggaacctggataacaatgtagcattgactcgagccgtatggccaaaaaactcagtcttgataatttttttaaattcttttttgaaacttgttagcattgataaaagtttaatgcgaaatttgattataatgtccctttaaagcttcgatcttaaattccaaaaatgtacatatgtatgtagcccatgatccaaaataccgaccctttgccaaacaatgaaagtccttaacttttataaaaaatatatatgtatttaatttctttacttacatcggaagtagctttatcatttcattcctttttttgggttatttttcgcacttgcatttagatcaacagggacttacgactacgaggaattgagcaggctgaatggatgggcgaaagacagcaagaagtgggatagaatgggcacgaatagatgcggaaggatgaggggcataggtaggggacatagttctagaaggacttaacactaggtattgctatatgttcggggaatctagctaaatgtgtctgtgagtcgttcctagtaccgataaccgctgccatcgttgtcaccgttctgaccaccgggtccgaatccattccggccaccctgacccggcctgccgctcgagtatccttggccatcctgactatcctggccgttgccgcctggccgaccaccaggacgaccgctggagtagccatcacgtccaagatcctgaccaccgggacgtccgccggagtagccctgatcaccgccatcctggccgcctatcacacgtccaccgatgatcacacgaccgccatcggatccaccgttgccattgccgcctggcctaccattggagtagccgctggcaccgaggtcctgtccacctggacgtccaccggagtagccgtctcgacccaagtcctgacctccagggcgaccaccggagtaaccgcctggtcccaagtcttggccgcccggcttgccattggagtagccaccggcgcctagatcctgacctcctggacgaccaccggaatatccactaggtcccaaatcctggcctcctggacgtccaccggagtaaccgccatttccgttgccatttccattgccgggacgtccactggagtagccatcggcaccaagattctgaccgccaggacctccaggaccgctgggaccactgccatcgttggcatcgccttcgtagcggatctgtggccggtagccctgctggtcggcttcatactccacaatctaagaaagacaaagagaaaagagaacgagataacaatgttagccgtgacagaaggatgaggtggtggagcagtgggtggatccacatcgccttctgctgcccgccatcgctgccgccgccgcttacttgcttccttccgtcgggcaacaggacattgtactggccggtggtgaagtcaccgtcgcgcatctctgaatgcccgaacgagagtccgctgggcgcgtcctcaacctggtaattaaattcgtacttggcgggctcctaaacgccgtacaacggatcatggagcatggagcatggatcatggacagcggatcatggagaatggagaacggattggggcgtgtggagaaagagagaaacacagagagatagagtgtctgggatcaagaattcagttttctatggggatgcaagctttaaacgccgatggctgtgcaggtgagcgataacgagtctaccaaagatttgcaagggcaagtgtgcagcggtgtgggcggtggagcggtgttcccttgtggtcaattccacccagtgatccccgtatacaaatcccattttaccatataccctatttgctaagctatctcaaacacttacatcgttatcgtagtcagcgccgccgggtccactgcctccagcgccacctgctcccgatccagaagctgggggtccgtaggagtcggagggtcggccaccaggtcctgagcctggagctccatagctgctcgaaggacgtccgccgttgccattgccgctaccaggggcgccatatgaatctgatggtttttggttctgaccaggagcaccataggagtccgatggacgaccaccaaatccaccttggccctgaccaggagctccatagctgcttgaaggacgaccaccgctgccgtttccgttaccgccaccaggagcgccataggtgtcagatggacgaccaccgtttccaccaccaggagcgccgtagctgcttgagggacgaccgccattattgccgccaccaggagcgccgtaagtatccgaaggacgaccaccgtttccaccaccgggagcaccgtaggtatccgaaggacgaccgccgtttccaccgccaggagcaccatagctgctcgatgagcgaccgccatttccgttgccttgtccttgaccaggagctccatagctgcttgaaggtcgtccgccgttgccatttccaccaccaccaggagcaccataagtgtccgatgggcgtccaccatttccgccaccaggagcaccgtaggtatccgaaggacgaccaccgtttccaccgccaggagcgccatagctgctcgatggacgacctccgttgccatttccaccaccaggagctccataggtatctgagggcttgcctgcatatccaccttgtccttgtccctgtccttgaccctggcctggagcgccatagctgtctgagggccgtccaccgtttccaccaccaggagctccataggaatccgacggcctgccgccgggaccactctgacccggtgctccatagctatcggacggaggtagatacgagttaactggtggctccggtcgcccaaggaccaccattgccatgagcagcgtcaagccgagtaacttgaacatattccacttgtatctaaagctgaagctggaactgaagctcggtctacggactgatcgaaatctttgggatgagactagcgcttggaagcagcgccgaattctgactgatctgtggtagctgccacatggcgtatttatatgaggcaaaaccgaaaaactgaaagtctaggatgcacacacacgaactcgactatgagttggaggtggcggttttgtggagcgtgtggcaaccagcgcaacagctgctgctgctgctgttgctgctgatgcagctgatgaggctgccacatacgatcgtcttcagagaagcggtggctgattctatgcggtcgaaagcaaaaatctcaatcactgagcttgcttgccaacacttcaccaccccgatctgcgccagattgccacgtaaagggtgcctcggtcttgggtctcgggctgatttgccttctttcggtgcacatcttctcgaggcgcggcgaggtggtgattgtgcccgggccccaaacctttttgcatccgccgttgcgttggcccaaagtagtctactcggtctactccactgggtgaatgtgtcggcggcgtctgccgcggctcactctcccaagcgagtggttcagtgttccagtggttcagtggttgctatgacaagcgccaaagtttgcatttgtttgccttgtcttgtcagcgacgaaaaaggaaaaataataataaaaagcccagcgatacattgttgacgatcgtgccaaagacgaccccaattgggtgtaggatctccagatgcgtctgatgggtgtagacgggtcgaatcgatcgcagattggagattgtggcgatgcctcgaggatcagagaatcaattgaaaatgaagggtatgcagatgatatgcaaactggaatcactgagactaattgcattgattatgttccaactagatccagagcagcttggtggtatcgaaatgacagcttaataatcttcatggcaaatctacaagatcgatcat

SEQ ID NO: 39293 - DNA, 1863 bp, DROSOPHILA
atgttcaagttactcggcttgacgctgctcatggcaatggtggtccttgggcgaccggagccaccagttaactcgtatctacctccgtccgatagctatggagcaccgggtcagagtggtcccggcggcaggccgtcggattcctatggagctcctggtggtggaaacggtggacggccctcagacagctatggcgctccaggccagggtcaaggacagggacaaggacaaggtggatatgcaggcaagccctcagatacctatggagctcctggtggtggaaatggcaacggaggtcgtccatcgagcagctatggcgctcctggcggtggaaacggtggtcgtccttcggatacctacggtgctcctggtggcggaaatggtggacgcccatcggacacttatggtgctcctggtggtggtggaaatggcaacggcggacgaccttcaagcagctatggagctcctggtcaaggacaaggcaacggaaatggcggtcgctcatcgagcagctatggtgctcctggcggtggaaacggcggtcgtccttcggatacctacggtgctcccggtggtggaaacggtggtcgtccttcggatacttacggcgctcctggtggcggcaataatggcggtcgtccctcaagcagctacggcgctcctggtggtggaaacggtggtcgtccatctgacacctatggcgctcctggtggcggtaacggaaacggcagcggtggtcgtccttcaagcagctatggagctcctggtcagggccaaggtggatttggtggtcgtccatcggactcctatggtgctcctggtcagaaccaaaaaccatcagattcatatggcgcccctggtagcggcaatggcaacggcggacgtccttcgagcagctatggagctccaggctcaggacctggtggccgaccctccgactcctacggacccccagcttctggatcgggagcaggtggcgctggaggcagtggacccggcggcgctgactacgataacgatgagcccgccaagtacgaatttaattaccaggttgaggacgcgcccagcggactctcgttcgggcattcagagatgcgcgacggtgacttcaccaccggccagtacaatgtcctgttgcccgacggaaggaagcaaattgtggagtatgaagccgaccagcagggctaccggccacagatccgctacgaaggcgatgccaacgatggcagtggtcccagcggtcctggaggtcctggcggtcagaatcttggtgccgatggctactccagtggacgtcccggcaatggaaatggcaacggaaatggcggttactccggtggacgtccaggaggccaggatttgggacctagtggatattccggtggtcgtccaggaggtcaggatctaggcgccggtggctactccaatggcaagccgggcggccaagacttgggaccaggcggttactccggtggtcgccctggaggtcaggacttgggtcgagacggctactccggtggacgtccaggtggacaggacctcggtgccagcggctactccaatggtaggccaggcggcaatggcaacggtggatccgatggcggtcgtgtgatcatcggtggacgtgtgataggcggccaggatggcggtgatcagggctactccggcggacgtcccggtggtcaggatcttggacgtgatggctactccagcggtcgtcctggtggtcggccaggcggcaacggccaggatagtcaggatggccaaggatactcgagcggcaggccgggtcagggtggccggaatggattcggacccggtggtcagaacggtgacaacgatggcagcggttatcggtactag

SEQ ID NO: 39294 - protein, 620 aa, DROSOPHILA
MFKLLGLTLLMAMVVLGRPEPPVNSYLPPSDSYGAPGQSGPGGRPSDSYGAPGGGNGGRPSDSYGAPGQGQGQGQGQGGYAGKPSDTYGAPGGGNGNGGRPSSSYGAPGGGNGGRPSDTYGAPGGGNGGRPSDTYGAPGGGGNGNGGRPSSSYGAPGQGQGNGNGGRSSSSYGAPGGGNGGRPSDTYGAPGGGNGGRPSDTYGAPGGGNNGGRPSSSYGAPGGGNGGRPSDTYGAPGGGNGNGSGGRPSSSYGAPGQGQGGFGGRPSDSYGAPGQNQKPSDSYGAPGSGNGNGGRPSSSYGAPGSGPGGRPSDSYGPPASGSGAGGAGGSGPGGADYDNDEPAKYEFNYQVEDAPSGLSFGHSEMRDGDFTTGQYNVLLPDGRKQIVEYEADQQGYRPQIRYEGDANDGSGPSGPGGPGGQNLGADGYSSGRPGNGNGNGNGGYSGGRPGGQDLGPSGYSGGRPGGQDLGAGGYSNGKPGGQDLGPGGYSGGRPGGQDLGRDGYSGGRPGGQDLGASGYSNGRPGGNGNGGSDGGRVIIGGRVIGGQDGGDQGYSGGRPGGQDLGRDGYSSGRPGGRPGGNGQDSQDGQGYSSGRPGQGGRNGFGPGGQNGDNDGSGYRY

SEQ ID NO: 39295 - DNA, 2455 bp, DROSOPHILA
gtaaaatctgtttttaaagcttctaatagaccgtgctgattcgattatcctggggcctataaatagggcataaaacacaggggctccgaaagtttgatcttcagccgtttagtcgaaagcacacagataaggcttccaatgaaactgataaaggttacactagtgttcagcttactggctgtaagtacattatttaaatatgatctttttaggcacaataacaatagataaacttcacttaacagctcgtatttgtggcccaaacggaggcgcaaaatccaatatgggagaattggttggcatgcaatagaattggtactaaagcgcttgccagtctgctgagagaaacaatcccaactgttcgcaatttactgaactgcattgacttcaatccaccaaccgatattggaaatagttacctttcaaaacttaagttgtactatgagcttgttaagcgaggtgcgcttgacaagactcagtgtctgattgtgccactcaaggaatcagtgagactactgaggccttatgtaaaatcgcttgagaccaacaaatgcttgggtgaataaatcactattttggccataataaaataaatttctgagcattaataaagcacagcaatcaaaaatgtatattttttaaaggagggtaatgcctaatagaccttccaaattaatcatgatataagttaagtgcggtttttttctcaaattttttatttatattatgatattaccgaaacccaaaaacacattttggtttggattcaatcggctgaaatactttatatgcgagacaaattattctgttgtattgcatttgaaaattgaattgacatgtattaggcgcaaaatttattatggtttttaactgtaaccaatttttttagcactgcttaggtggatgaaattaaaattagcttgtaatcctataaataggacagccctttcataaatattctaagttttttctggtcataatcgcgacttaaaacaggagaatgagcgtgatcaagtccatatttctgctcagtattttggctgtgagtacatttggctcacttaattactttttaaatatacttaccattctccataggtctgcctcattccccgggagacggaggcccaggccactataagtgaaagctggggaaggctgggcaagtgtactcaggtggccatcgaaacactgaccagcctggccgataaaatcgtcccgaccgtatatgagttgaaacaatgctccggatacgtaactttggaaccggcaaacggcaaagacagaaagattacctggtacctaaaggtatcctatgaattcttcaagaaacttgtctttgacgaacccaaatgtctgcacggtctactgaacaagttggctgccacaatcaaaccatttgccgagcagatatcgggattaggttgcttggacgaagaagattatatcatttaaaaagaaaagtgtgcacattacataaataaatcgagagcaatatggggtctcaaatgtcagcaacaaaaatgtatttcttattaagtataattttacaatataactactgcatttggaagttaagttgaagttaaagttggctaaacacattcaagttatgtgattaaattttattttatatgattaattcaacagaagcttgataataatggagaagtcgcggccacggtctggaaattagtaagattagattcggattacaatcatattttcggtataacaattgaaaggcggtacattgggtatcagtgatgctcgacagcattactaaagcgattatcctgaggcctatatatatagggcaatatttccacatggcccacaaagttggatcaaaagttgctggaataagaaccccaatgcatttgattaagatcgccttgttactaagctttttggctgtaagtacgtcgacctttaacgggattatttcttaaccatttcgccatttagttatgccaaaagtcgcaagttcaagccgccataagttcggaactcgatcactatctgcgatgtttggaagtggtgactgatgccggtgccctaatgatcgagaactctataacggccataagcctcctatccgattgcgttgattttcagccgaaaatcaaactaactggtagcattctcagatttattagggtggcccatcagtttggcaagaaggcgatatacgatcgaccggaatgtctcgtacaaacctttaccaccggagtcggactgattagaccgattatagccaagtttgatagcttgaggtgctttgatgagtaagacaacctacctagtttgaataaatattcagaatataccgaaagtttgcctggccaagcaaacggatcagaaccatcttaattgttttattctcattcttttaaaattcaaattcaacatatcacagaacttccatttgaaattacaaccattgttatttaaa

SEQ ID NO: 39296 - DNA, 399 bp, DROSOPHILA
atgagcgtgatcaagtccatatttctgctcagtattttggctgtctgcctcattccccgggagacggaggcccaggccactataagtgaaagctggggaaggctgggcaagtgtactcaggtggccatcgaaacactgaccagcctggccgataaaatcgtcccgaccgtatatgagttgaaacaatgctccggatacgtaactttggaaccggcaaacggcaaagacagaaagattacctggtacctaaaggtatcctatgaattcttcaagaaacttgtctttgacgaacccaaatgtctgcacggtctactgaacaagttggctgccacaatcaaaccatttgccgagcagatatcgggattaggttgcttggacgaagaagattatatcatttaa

SEQ ID NO: 39297 - protein, 132 aa, DROSOPHILA
MSVIKSIFLLSILAVCLIPRETEAQATISESWGRLGKCTQVAIETLTSLADKIVPTVYELKQCSGYVTLEPANGKDRKITWYLKVSYEFFKKLVFDEPKCLHGLLNKLAATIKPFAEQISGLGCLDEEDYII

SEQ ID NO: 39298 - DNA, 2728 bp, DROSOPHILA
atgcaaatcccacgcagtatgccagtagtgcataagctccgacaagctgctaagtgctttcggagtaagaggatgaggagaatatggagtatactaacttttgaaggacgcacatccataccagaatatctgctgtaattaggcaagttgtcgctactgtttgccttttgccatttggccgctgctcccccggcaatagcattttatgggcttttgttggcgggtttctcttccaacaacattttctaccattttcaaaatgaataattcaatagtccggtagaagcctctggttcgcggttctccctacttgccaacctcggaccaactcggttgcagccataattgaggtcagtgaaatcaaatagttccgaccaagtgcttagcacttgcccagcggtgtgtggaggaactggacttggagctgcttggctgctccctgggctctcgcgtcggctgcactttcagtggccaaaagcggccatgggatcttccttgtcgtttggccggtcgctttggtttccgtcagccaaaatcactgccactaaaaatagacaacaattaaatgcaaatcaattgaattgattttcccgtaatacacagtaggtaatacttgcgagcaacagagattctttactacaaaacaaataacaatttcaacttgatatatttggtcagaatgtgatgttctcttatattataaattataaacataatttacaaaatgataacaacgatcttattacttaaatatttatattttttctttgtttattttttaggcacttttccctgtacttggcacattcatttggtaaaccccttgacattgtccctgtatccgtatccgctttacttgccaaattatcggctataaaagcaagtgatcaactcgagcagcgccagacgataaagtaccttctgtccgtttcaaacggcttggattcagtttcatcttaccagtttctagggggccacacttactgttgagttcgccacaatgttcgactcaaagattagggtgcccaagtacgactcggatgcgttcgacaatgtcgcgtacgagctgcagatgacgtacaccctggagacggattgtaggataatgagcttttacgacgcgatgtggggcatggaggtgactggcggcattgaccagttcgagccgctgaccattgtgaatgtgtcacccactggcctggcgaagagaggaggcatgcgagtgggcgacgagatcacccagatcaatgatgtgccggccctggagatgaccttcaatgaggccctgcaaatgttccgaaagaattcgcgatacgttcgtgtctacgttagggggtgagtttaaccttaaacattcttagcatcatgatttcttaactcatctggttctttagtgatgacgatgctcccggtgaggaggattggacctgcgattgctggtttaagcccaggaaaccctggcgtcgtgacttcacgcccattcaatggacattcccctggaacgatcgccgcaagcctgtctacaaggagtccaattgcttcatggtgcccagcaaaatggaggagaagattcgggcgagacgtgctgccacctcagctgttcacaaaaaggatgagctggctccacacactcgctccttgacgcccactcccaggccaaagaatcaaccaggtccgaatcttctcgagaccgtgctcaggccacgtggaccaccgccaagggattaggagaccaatctaattggaaagatgatgctgaccaagtcacaagaagttgcaggcagcgctgaatccgctgcagtgcatcaggaccttcaaggactatacactcaaaagaaggcagacagctgaatatacagttgaagtgccacacaaatgctgggaaactatttcgaaaagggttctcctgagaaccgtgtcttaatcctgcccagaaataagcggataactttattgatggataagttaaaaccatagctggcaggcatctgtggaaaacagttgcagtgctttgggttagaaattttgaaaagagttctcaaaatgctaatcataaatatggtgatacgaactcgattattatccttaaaggatatatactacctcctctgtgttatagaaaaaaatataaaatcaatctaaaattccaaaaagctaaatttagcttaattatttttgtaaataactttttatcaaatcacttaaattttcaaacactatgtatagttacaaaaaaatacgaataaaaaatattttctgatatatgatatttaaagtactcaaattgaggcatattgttaagtaaatgggcttgtaatcagttagttccacttattattcgattaagtaattcgtatcacccagattttatcatttatgttccgttttgaatcttgaaatgaaagttattattttgctggctctcttcagccagattatcctggaaattgttgcctatgagcataaaatcgctcacaggaaatgtggcgagaacactttcccagattgttattcatattgtaacaaaggatgcaaggataacccagtcgactgcattcattactgcgagaaaggatgtggatgcatcgaaggctcaatagtgagaaacaatggaggatgccgaagaataaagatttgcgacaaggatgatgattccctatccgttgaaaataacgagttggctgaaaaatacgtaacatcttattgggaggacccggtaaatagtaat

SEQ ID NO: 39299 - DNA, 669 bp, DROSOPHILA
atgttcgactcaaagattagggtgcccaagtacgactcggatgcgttcgacaatgtcgcgtacgagctgcagatgacgtacaccctggagacggattgtaggataatgagcttttacgacgcgatgtggggcatggaggtgactggcggcattgaccagttcgagccgctgaccattgtgaatgtgtcacccactggcctggcgaagagaggaggcatgcgagtgggcgacgagatcacccagatcaatgatgtgccggccctggagatgaccttcaatgaggccctgcaaatgttccgaaagaattcgcgatacgttcgtgtctacgttaggggtgatgacgatgctcccggtgaggaggattggacctgcgattgctggtttaagcccaggaaaccctggcgtcgtgacttcacgcccattcaatggacattcccctggaacgatcgccgcaagcctgtctacaaggagtccaattgcttcatggtgcccagcaaaatggaggagaagattcgggcgagacgtgctgccacctcagctgttcacaaaaaggatgagctggctccacacactcgctccttgacgcccactcccaggccaaagaatcaaccaggtccgaatcttctcgagaccgtgctcaggccacgtggaccaccgccaagggattag

SEQ ID NO: 39300 - protein, 222 aa, DROSOPHILA
MFDSKIRVPKYDSDAFDNVAYELQMTYTLETDCRIMSFYDAMWGMEVTGGIDQFEPLTIVNVSPTGLAKRGGMRVGDEITQINDVPALEMTFNEALQMFRKNSRYVRVYVRGDDDAPGEEDWTCDCWFKPRKPWRRDFTPIQWTFPWNDRRKPVYKESNCFMVPSKMEEKIRARRAATSAVHKKDELAPHTRSLTPTPRPKNQPGPNLLETVLRPRGPPPRD

SEQ ID NO: 39301 - DNA, 7671 bp, DROSOPHILA
aaaacacttttacgaatcctccccctctcacgtacacacacaaatgcaccttacacccaacaaatacatacgcacgcacacgcacacgtcgagcgtttggcatacgaaaacatgatgcaaacttttcctattggaaaccaattgtgttttccatctgaatcggatggcaccgtgggccgaaatatttactattcgcacataaaaatcgcatcgtacagggctcactcaataaacaaatcacaggaaaaaaaataaataacccaatgcacattagaggtggaactaggacctatttccatgcgatactatcgatagatacgtatcaagttttgttggtgctgtgtgtaacgggcaaggagagcggatggcaactcttgtcgcggcgcgtatctccgatagaagaaaaggtggcagcacagaatttatgggcgcactgggttagcagaggagcaagtacttgctaagcgtgagtgtttggcatcccagatgtggaacttagttccacaaagtaaagtaagtaaataagtaaaggtggcaactaatgtcgtaaacaatattaccgcttgggaatcgattcttttcgattctaaaaaagatcgattaagtcgaaaaaaacggccttaaatcaattaatcagcttaaaaattaagaggcagctcttatgcttagaatttttgttatctaaaaaaatgcaatgttaatatattttgtaagatcaatatgttttcatagattatttataatccactggtacgtagggggcagtacaaatgtgattaatttaattgaggaatattactttaagattagatttgtcaccttataaagatagatagacatagcatcgatttcctagtaatgttatcgatttcttcgcccatctgaaaatatcgattagatcgattttgaaatcgaattgctcacagctctactgacaacaccaaagtggctgatttaaaccatctgatatttactatttatccgcaatcctgacagaaccatgaacgatctgaacctgcgcgtggccgccttgaaggtgtgtgctcaccccaagagatttgccgagctgcgcgacgcccttgtgccactgcccaacacgtggattgccggtgggttgtggtgggtcacttagtgaccaccagtaagctatgtataaacatgcatgctgaggctccaatcgcttctccattttccagcgccacatgactttgtgctccagttcgcggcggccaagagcagtgcggagcaggtgcaggtggtcaaggatgtcttttacggggagcaggcgcaagatcatgaagatgtagcccacttcctggcggatctcctgctggccagtcccctgaagcacgccgtgcgcaaccagctgaccaagtacggtgagcccacggcgactcaagccacacgatccaactggatgtcctatagccgatgatcaatcccatttagactcttctcggacaatgcgctggccaaacagaatgcgtcgccacatcgcaggcactcgaaggagcacctgctggaggctctgcagcagtcgctcggcgaaatggccaacagtctcgcagtgatcacgccgcctgtcagccacgagcgcaccaacgatgtcttcgtgtccgccaacgcctgcctgcagaactttccctttggacgggaggccctgggcaaacaggtgcatcgctttgcgccgctgctaactaccgccttggagcgctactgggcggacatttggtgcgtcaatctaatgtatatgatagctgcgcacaatgctgactccacaattaccttgctttaagacagtgaccctacgctggaactctcgccaacgcgtcgcaacgagctctacttgtacgtgcagaatgcgctgcggttcttggttagtctgctggccgagtggagcgacaagttgcgcctgttcgaggatcagcggtttccgggcacgtcgaatgcggtggcccaaaaggtggctcgctactacgacactccgtgggacgtacgctccattgccgccctgctgatcggtcacctggctcggttttccggaacattcaaggcgtatgtcgaagactgctcgaggccaaaggcagagcaggatgttcccatacagatggccgccctgctcgtcctgcggcccgtcgattatacagaaaacgctacactagcactggctattctgaagaggatcgtggccgtcagcgagctgaaaagcaccgtgaccaatctgcttgtcttcctttccaagcatctgttcatttactccaaatcgctgggcgagatgcacgcccatcttcctgacgaccagaagttgctataccaacggatcttggcacagctgcaggtgttcgccctgcagaatatctccagtgacacggactccgtgcgccacatgagcagcgccctgctgcaccaggtgctgcagcacgcccaggccgccggccaggaggagctcttccaagtcgtctatcgccagtttgaagatcgtgctgcatacctaaatgccagttgcatggcactggagcagctggttgcggtggccggagtcagcaagtccatcgagaactgtccttcgctgttcggagtcatattcccgcgccatctgggctgtgaggattgtgtggatgccctgttcaaaggcaagtatccttcattgaatgcagcctcgaatcgtgtacttattccttttgttattatacttattagccatgatggtatcggcccacaagacggaacccttcgccgagtggcagagccggtggttcggtctgcttttggcggcaatccgcgtgccggagaagcgccgccaggtcattgaggagctgatcgcacaggccgtacagctggagccaacgagactggcgcaagtgctcctgccagacgaccggctgccgcttagctgcaagctggcggcgattctgggcgtgaggcaactcagcgccaggcggcagaatctgttgcgtggcatgaaagaggaggtggaacaggccctcatcggactggacgaccacacgcgcctactggcgctgcgatttctggtggagacgccgcgtcccagcgaacttttaaatgccgaccaaatgggcgccattgaactttacgtgcggcacaatgccaacaatcctagcgcccatctgcggcagctaggctacggtctgctgcagaaggccctcaagagagtccatttcggcctggtcgagtaccggaagagccgcacgccggcgtcgcaggaggtgctccagttcctaatacggcttatccgcactctcgcgcagaatctgtttcccacggcgaactacggacgacgctggctttcgctgcgcttgctgcgcgattgcctggagttaagcgagatggtgggcataacgttcagcgagttgggaatagagctgcccacagaggcactgatggcctgcttgggcgacagctacgagcacaacaaagtgctggccgctcagctgctggagcgatttcaatcccattccctcttcaagccggatgagatgatcgagctgctgctctccctcaggccatcggactccgccaccggagccttccagctgcaggtctattgcaaagccagtcgagtgcaaagcgagatgcccacgccaacgcacggtggcacaatccacgagccgcttaccttcagggcattgcagtggtgcctgcagcacttgagggagggcctgcgtctcgcccagcttgatcttggcgaggcggccaagctgaaccctttgtacggcctgctttttgccagccggcatctgctgcagcaactcaaactcaaggaactggcgaaagagcctcagtggaggcagtacatagacgagctagtgaccatgtgcctggcagtcagcagcgtagtgctgcctgtggtcagcagcgcttcccccgaaggccacctgcccgaaacctgcgaccaggagacggatcagccgctgaccaacgtgctcgaccgtcagttgagccgcgaggaactgctgcaggtgcgcacgacgccccagatgatactgctgtgcgcttggcgcagcagcaaggaggtgtgcctcatcctgggcgagcttgtccagcgcgcaccactggaggaggaggaggatgaggagcagcagcagcagcagggcgacttcctgctcagccgtgctcagctggaggccatcggggagcatttcctgcaactgctggccgagacgaagcatcgcggcgccttcgagcaggcctacgtgggattcacgatgctgtgccgccgcttctggcacagcgagtcggtgcgtctcaaccagctgcccggccagtgggtcgacgaggccatggcgatggtcagcggccaggaggagtgggcaggcaagggtgcccgcctgtgcgctacgcgccgcagtgccggaatgcccttcatgctgcaggcgctggtcggcacggagctcaagctgggcacccatgccactctctatcgctgcatgaaccgcctgctcgaggtgtgtgagcgccggacaggtggagccgctggtatcaccgcccgcagccacgccctcaacatcatgcgcgccctcttccgcagcagcgaactggccgagctggtcaccgagttcatggcccgcggcattcagtgcgccctcgacggactgctgctcgcggaggagtgggcggagcgcaatagcgccactctgctgctggccgccctcatcgttcgcgtctttggcgtggagcgtgcccgcctggagaccggtgagctgcacgtgcgcaaccgcatgacgggacgcatcttctttacgcgctatccgcagctcttcgactacttccacgccgccctgcagcgcgagtcggagcagatggacgccggcggcgggggcagcgagaacgcgagcgggaagcggcggcaggcggtccagctggaggccatgctgctgatgctcagccggctgtatccgtcctcgctggagggcgcggagtcaaccttaaatgtaggtggatcgggcacattccttcttgctgttcttgctattacaaatatgatttattaatttcccacagctcagcgagtttgtgcccttcctgataaggatctgccactcccacgatctgatgacacgtgaaatggctgccctggtggtggccaactttgtcacccaggaacaagcgctggccgagatcaggcgcatcgtcgtggaacttaaggcactgcagctacggctaaaggtgagtttgcatcctgctattactcggaatcctctcaagaacttcagctcttcttcccgcagaacaccgaggcagctaacaccaagctaaacaccaatgtcctgcacggccagttgcttctgctgctgcatctacaccgcttggttcgctggacacgtccttcgttgaccagaatgcagctacacaccctcgccgaactggcagctccgctcctacagcacgacgcgtgtgcattcagtgcgctggtggcggtgatggtggctgccatggaggatgccgtggagcccggcttgctggatttccagctgctggagcagattggcgtcgtttatctgctgaatcataaggaggtccaaagccgttgccagcagctgggtatctccaaccgtttctatcagatctttggcctccatctgcaccgtctacgcggcatttcccagggaatagtgctgcacatcgtcgaggatctggccgaaaccatctgggctctggacgagctgaaagtggagctgtggctgtacattcttctacagagatccctaagcgagcagaattcgctggtcagtgagcaggatatcgagcactttgagttttcacgcgacattcgccgatatttcgagacccttagtcgtgagcagcgggaggaggtgggccaggaactgtatgaatcgccggctgttcgctcgagcgttctgcacatgatgcacatgatcaaaagctcaaagaacagctgttggagccttcagctggccggtcgcctggccgccttgcaaaccctgcttcgagatccgggactggaactgaatcagttagtccagcgctgctcagaggagcactccacccaccaggaggcgggcttgctgctcggcctgcgtaggctgatcggcgaaagcaagatgctggagcgaaagcactggctgcccatgctgaactacgcgcagcgacttgtgcatcctggccaaccggtctatcttcgccatcaggctgccgagctgtgcgattcgctggctcgcaatcacctgcgtgatcaactggttgcaggtaccacagatgtggacattgggttggtcggacgctttagtggactggtgctgctgctgctgcacgacgacgcggagtgggtgcgtcatcgggctgtccagctggtgtgcggcgctggactgcggacgaggagtggggctggacaggagcaagagcagtctgccatggcgccactcatcctgcccagtgccttgataccaccattcttggacaccatgatcggtaagctgaccttcgatgacttcaacatggtacagcgcctggttgacatcatcgctgagcccttcactaccgccgatgcaatggagctgttcgacaagcaggagaacaaccattactgcgaaaggaaccacgttttaaccgagctatgggacgctcgtggacgagcagatccacgtgcaagaacaccaacaataccgacggggtatcaaatatttaagtgacgatcgcacatttaaaacatatgtattaaatgtacaaaagtttttaaatcagcaaaatgttttacttttctattggctatgtgatagtcgatcgttttctattctatgatattaagaactctacatgcgcacagatgcaaacattcttgagtatctgatagtctatcattttctattatatttgaagttaagtggatgtgtaaactggctacaattgatgttgtatttatgggtttacttaagatctctccatgcgcacagctacaaactgcctgtggctgcattaatgggtaactgatagtcgagcaaattgtgcattctattgccatattttgtgagtgagtgccgaattagagggagacagactacaatgtcattgcgtttgcaaatgaaaaagcaaccaccaatcgttttagaaaattaacatttttttattgatatataaaactaaacatatcgcttggccaccgcctacgaatcgaagctggaattgacatcgttggcagtgatgggggcgaactggacgagcgccttaatgcgtcgcagcagcgagccattgaagcctttgcacttaatcgagtaatcctcgctggcgttgattagctgcgtgcagaatgtctcgttgaatgtggagatgagcagctgcttgagctgcacgatctcttcctgcgaggcgttcagcacggacatgtcattgtcgtcgtccatgttgctctcgttgatggcgttcctgttttcgttggcgtagtcgatggtgttgcgcagatagaagtccagatggatccacagcagatacagattctgctcggcaatgaagacggcctgcctcagttcgctgcgcttctcgttgtatcgctggctcagttctatgtagctttgtttacctggttgattggtacaaatggatcagccaaatgtggaatgcatcaatgctaaatgctaaatgccaaaatcaaggagaacttaccgttgggcccaaagctgatgttgggcagggagg

SEQ ID NO: 39302 - DNA, 5160 bp, DROSOPHILA
atgaacgatctgaacctgcgcgtggccgccttgaaggtgtgtgctcaccccaagagatttgccgagctgcgcgacgcccttgtgccactgcccaacacgtggattgccgcgccacatgactttgtgctccagttcgcggcggccaagagcagtgcggagcaggtgcaggtggtcaaggatgtcttttacggggagcaggcgcaagatcatgaagatgtagcccacttcctggcggatctcctgctggccagtcccctgaagcacgccgtgcgcaaccagctgaccaaactcttctcggacaatgcgctggccaaacagaatgcgtcgccacatcgcaggcactcgaaggagcacctgctggaggctctgcagcagtcgctcggcgaaatggccaacagtctcgcagtgatcacgccgcctgtcagccacgagcgcaccaacgatgtcttcgtgtccgccaacgcctgcctgcagaactttccctttggacgggaggccctgggcaaacaggtgcatcgctttgcgccgctgctaactaccgccttggagcgctactgggcggacatttgtgaccctacgctggaactctcgccaacgcgtcgcaacgagctctacttgtacgtgcagaatgcgctgcggttcttggttagtctgctggccgagtggagcgacaagttgcgcctgttcgaggatcagcggtttccgggcacgtcgaatgcggtggcccaaaaggtggctcgctactacgacactccgtgggacgtacgctccattgccgccctgctgatcggtcacctggctcggttttccggaacattcaaggcgtatgtcgaagactgctcgaggccaaaggcagagcaggatgttcccatacagatggccgccctgctcgtcctgaggatcgtggccgtcagcgagctgaaaagcaccgtgaccaatctgcttgtcttcctttccaagcatctgttcatttactccaaatcgctgggcgagatgcacgcccatcttcctgacgaccagaagttgctataccaacggatcttggcacagctgcaggtgttcgccctgcagaatatctccagtgacacggactccgtgcgccacatgagcagcgccctgctgcaccaggtgctgcagcacgcccaggccgccggccaggaggagctcttccaagtcgtctatcgccagtttgaagatcgtgctgcatacctaaatgccagttgcatggcactggagcagctggttgcggtggccggagtcagcaagtccatcgagaactgtccttcgctgttcggagtcatattcccgcgccatctgggctccatgatggtatcggcccacaagacggaacccttcgccgagtggcagagccggtggttcggtctgcttttggcggcaatccgcgtgccggagaagcgccgccaggtcattgaggagctgatcgcacaggccgtacagctggagccaacgagactggcgcaagtgctcctgccagacgaccggctgccgcttagctgcaagctggcggcgattctgggcgtgaggcaactcagcgccaggcggcagaatctgttgcgtggcatgaaagaggaggtggaacaggccctcatcggactggacgaccacacgcgcctactggcgctgcgatttctggtggagacgccgcgtcccagcgaacttttaaatgccgaccaaatgggcgccattgaactttacgtgcggcacaatgccaacaatcctagcgcccatctgcggcagctaggctacggtctgctgcagaaggccctcaagagagtccatttcggcctggtcgagtaccggaagagccgcacgccggcgtcgcaggaggtgctccagttcctaatacggcttatccgcactctcgcgcagaatctgtttcccacggcgaactacggacgacgctggctttcgctgcgcttgctgcgcgattgcctggagttaagcgagatggtgggcataacgttcagcgagttgggaatagagctgcccacagaggcactgatggcctgcttgggcgacagctacgagcacaacaaagtgctggccgctcagctgctggagcgatttcaatcccattccctcttcaagccggatgagatgatcgagctgctgctctccctcaggccatcggactccgccaccggagccttccagctgcaggtctattgcaaagccagtcgagtgcaaagcgagatgcccacgccaacgcacggtggcacaatccacgagccgcttaccttcagggcattgcagtggtgcctgcagcacttgagggagggcctgcgtctcgcccagcttgatcttggcgaggcggccaagctgaaccctttgtacggcctgctttttgccagccggcatctgctgcagcaactcaaactcaaggaactggcgaaagagcctcagtggaggcagtacatagacgagctagtgaccatgtgcctggcagtcagcagcgtagtgctgcctgtggtcagcagcgcttcccccgaaggccacctgcccgaaacctgcgaccaggagacggatcagccgctgaccaacgtgctcgaccgtcagttgagccgcgaggaactgctgcaggtgcgcacgacgccccagatgatactgctgtgcgcttggcgcagcagcaaggaggtgtgcctcatcctgggcgagcttgtccagcgcgcaccactggaggaggaggaggatgaggagcagcagcagcagcagggcgacttcctgctcagccgtgctcagctggaggccatcggggagcatttcctgcaactgctggccgagacgaagcatcgcggcgccttcgagcaggcctacgtgggattcacgatgctgtgccgccgcttctggcacagcgagtcggtgcgtctcaaccagctgcccggccagtgggtcgacgaggccatggcgatggtcagcggccaggaggagtgggcaggcaagggtgcccgcctgtgcgctacgcgccgcagtgccggaatgcccttcatgctgcaggcgctggtcggcacggagctcaagctgggcacccatgccactctctatcgctgcatgaaccgcctgctcgaggtgtgtgagcgccggacaggtggagccgctggtatcaccgcccgcagccacgccctcaacatcatgcgcgccctcttccgcagcagcgaactggccgagctggtcaccgagttcatggcccgcggcattcagtgcgccctcgacggactgctgctcgcggaggagtgggcggagcgcaatagcgccactctgctgctggccgccctcatcgttcgcgtctttggcgtggagcgtgcccgcctggagaccggtgagctgcacgtgcgcaaccgcatgacgggacgcatcttctttacgcgctatccgcagctcttcgactacttccacgccgccctgcagcgcgagtcggagcagatggacgccggcggcgggggcagcgagaacgcgagcgggaagcggcggcaggcggtccagctggaggccatgctgctgatgctcagccggctgtatccgtcctcgctggagggcgcggagtcaaccttaaatctcagcgagtttgtgcccttcctgataaggatctgccactcccacgatctgatgacacgtgaaatggctgccctggtggtggccaactttgtcacccaggaacaagcgctggccgagatcaggcgcatcgtcgtggaacttaaggcactgcagctacggctaaagaacaccgaggcagctaacaccaagctaaacaccaatgtcctgcacggccagttgcttctgctgctgcatctacaccgcttggttcgctggacacgtccttcgttgaccagaatgcagctacacaccctcgccgaactggcagctccgctcctacagcacgacgcgtgtgcattcagtgcgctggtggcggtgatggtggctgccatggaggatgccgtggagcccggcttgctggatttccagctgctggagcagattggcgtcgtttatctgctgaatcataaggaggtccaaagccgttgccagcagctgggtatctccaaccgtttctatcagatctttggcctccatctgcaccgtctacgcggcatttcccagggaatagtgctgcacatcgtcgaggatctggccgaaaccatctgggctctggacgagctgaaagtggagctgtggctgtacattcttctacagagatccctaagcgagcagaattcgctggtcagtgagcaggatatcgagcactttgagttttcacgcgacattcgccgatatttcgagacccttagtcgtgagcagcgggaggaggtgggccaggaactgtatgaatcgccggctgttcgctcgagcgttctgcacatgatgcacatgatcaaaagctcaaagaacagctgttggagccttcagctggccggtcgcctggccgccttgcaaaccctgcttcgagatccgggactggaactgaatcagttagtccagcgctgctcagaggagcactccacccaccaggaggcgggcttgctgctcggcctgcgtaggctgatcggcgaaagcaagatgctggagcgaaagcactggctgcccatgctgaactacgcgcagcgacttgtgcatcctggccaaccggtctatcttcgccatcaggctgccgagctgtgcgattcgctggctcgcaatcacctgcgtgatcaactggttgcaggtaccacagatgtggacattgggttggtcggacgctttagtggactggtgctgctgctgctgcacgacgacgcggagtgggtgcgtcatcgggctgtccagctggtgtgcggcgctggactgcggacgaggagtggggctggacaggagcaagagcagtctgccatggcgccactcatcctgcccagtgccttgataccaccattcttggacaccatgatcggtaagctgaccttcgatgacttcaacatggtacagcgcctggttgacatcatcgctgagcccttcactaccgccgatgcaatggagctgttcgacaagcaggagaacaaccattactgcgaaaggaaccacgttttaaccgagctatgggacgctcgtggacgagcagatccacgtgcaagaacaccaacaataccgacggggtatcaaatatttaagtga

SEQ ID NO: 39303 - protein, 1719 aa, DROSOPHILA
MNDLNLRVAALKVCAHPKRFAELRDALVPLPNTWIAAPHDFVLQFAAAKSSAEQVQVVKDVFYGEQAQDHEDVAHFLADLLLASPLKHAVRNQLTKLFSDNALAKQNASPHRRHSKEHLLEALQQSLGEMANSLAVITPPVSHERTNDVFVSANACLQNFPFGREALGKQVHRFAPLLTTALERYWADICDPTLELSPTRRNELYLYVQNALRFLVSLLAEWSDKLRLFEDQRFPGTSNAVAQKVARYYDTPWDVRSIAALLIGHLARFSGTFKAYVEDCSRPKAEQDVPIQMAALLVLRIVAVSELKSTVTNLLVFLSKHLFIYSKSLGEMHAHLPDDQKLLYQRILAQLQVFALQNISSDTDSVRHMSSALLHQVLQHAQAAGQEELFQVVYRQFEDRAAYLNASCMALEQLVAVAGVSKSIENCPSLFGVIFPRHLGSMMVSAHKTEPFAEWQSRWFGLLLAAIRVPEKRRQVIEELIAQAVQLEPTRLAQVLLPDDRLPLSCKLAAILGVRQLSARRQNLLRGMKEEVEQALIGLDDHTRLLALRFLVETPRPSELLNADQMGAIELYVRHNANNPSAHLRQLGYGLLQKALKRVHFGLVEYRKSRTPASQEVLQFLIRLIRTLAQNLFPTANYGRRWLSLRLLRDCLELSEMVGITFSELGIELPTEALMACLGDSYEHNKVLAAQLLERFQSHSLFKPDEMIELLLSLRPSDSATGAFQLQVYCKASRVQSEMPTPTHGGTIHEPLTFRALQWCLQHLREGLRLAQLDLGEAAKLNPLYGLLFASRHLLQQLKLKELAKEPQWRQYIDELVTMCLAVSSVVLPVVSSASPEGHLPETCDQETDQPLTNVLDRQLSREELLQVRTTPQMILLCAWRSSKEVCLILGELVQRAPLEEEEDEEQQQQQGDFLLSRAQLEAIGEHFLQLLAETKHRGAFEQAYVGFTMLCRRFWHSESVRLNQLPGQWVDEAMAMVSGQEEWAGKGARLCATRRSAGMPFMLQALVGTELKLGTHATLYRCMNRLLEVCERRTGGAAGITARSHALNIMRALFRSSELAELVTEFMARGIQCALDGLLLAEEWAERNSATLLLAALIVRVFGVERARLETGELHVRNRMTGRIFFTRYPQLFDYFHAALQRESEQMDAGGGGSENASGKRRQAVQLEAMLLMLSRLYPSSLEGAESTLNLSEFVPFLIRICHSHDLMTREMAALVVANFVTQEQALAEIRRIVVELKALQLRLKNTEAANTKLNTNVLHGQLLLLLHLHRLVRWTRPSLTRMQLHTLAELAAPLLQHDACAFSALVAVMVAAMEDAVEPGLLDFQLLEQIGVVYLLNHKEVQSRCQQLGISNRFYQIFGLHLHRLRGISQGIVLHIVEDLAETIWALDELKVELWLYILLQRSLSEQNSLVSEQDIEHFEFSRDIRRYFETLSREQREEVGQELYESPAVRSSVLHMMHMIKSSKNSCWSLQLAGRLAALQTLLRDPGLELNQLVQRCSEEHSTHQEAGLLLGLRRLIGESKMLERKHWLPMLNYAQRLVHPGQPVYLRHQAAELCDSLARNHLRDQLVAGTTDVDIGLVGRFSGLVLLLLHDDAEWVRHRAVQLVCGAGLRTRSGAGQEQEQSAMAPLILPSALIPPFLDTMIGKLTFDDFNMVQRLVDIIAEPFTTADAMELFDKQENNHYCERNHVLTELWDARGRADPRARTPTIPTGYQIFK

SEQ ID NO: 39304 - DNA, 19674 bp, DROSOPHILA
gggcggggcgttttcgtgaaaatctacgcacggacttttcgtagttacccgatagtagcatccatttgttttgttccgattcgcgtttttttttttttctgttctccgccacttgatttggccagcgaacgcactgcccaagtggtgtcctgttcgcattgtgagtgaatcaccgatggccgcgggcaggctgaactgcaccatagtgggatgctggttctggctgtcgatgcaagtggatgtggaagtggatgtagaagtgtaaatgcaaatgcaatcggcgcagttcggctgcaataaatgccaaaagggatactaactgccaaagccagtgcaattggaaggaaaattcaaatttcattgggaattattcgaattggaattgaatttgtaactggagttggagttcagagtacttggtactgggtgtgcgagagcgacagagaggaagagaggcagtgcaagtgtgtgggggtagcagtcacacaggcacacacgaacatactcacaactccagtgcataaaactccaaactgcgttcgcctctctcttttcgtttcgcttgctctctcccctacgttcgcccacgcaacgcctggcgagcgagagagagagcggtatagaagagcaagggagccagagcgagagagcaaggaagtggtttttccaccgaaaatatggacaaaggcaaactgcagagttagctgaaaataaaaaaaaataaaaaaaaggaacaagacacaaacagtgactgaaatagcggttaacagcgctcccttacggcgaatcgttgaaattcaagacggagagctatcgcatttcttcaattatgtctgtttcgcttttcattccgctgcagtaagcgatcgcgcgaaggagcagcaatacagagagcgagatttggagagagagagagagagatagagagtgcgctcccaattgacgactccactccactcccacacacacttaaccccgccccctcgcacccgtaattactatggattgtggtggtattgcggcacatcagcaacaacaactacaacagcaacaactgcacttactccagcaacagctacaacaacaacaccaccagcagcagcggcaacaacaacagcacagcctcgaggaagcagcaacaataacaaatgtaagtatctcccaagtttctccaaatgtgtgtgtgcgtttgtgttgctcgaccatttcctctgtacttcataattcgctcccacacacaaaaaaaaaagaagtcataggacagagtacacaggaagaaactgaactatacctttaaagtacagcttcttcaaattatagtaagaacggtgcaaatggtagactcacatatggttggtaattgtattaactataattctctattagtgttttttttttcgagtgtattcagtatactttactccttggctatgaaaataacctagttatgcagtgctaggtgatcaaaagacttcaaattcggtactccaaagttgagactgcccaactagtatcatggatatagtttcctatagtttgataatatagaaacttaaaactttaccactccccccattcgatgggtcaaaggagaattaataaaagcaaacgcagagagcggaatgattaatctttggaccagctgctggggcaaaaacgaccacaaaaagtgctcaatgctttcaagtccaacagaatgccgacccattaattggtgtactaactttttcgctctctcttgcgcctctttctccgttcttgccccattactttcaccgtgcataaacgctgaaaagagttcccgatcgttgtggttctgtttttcgtttttcgcctctgaggttctcgatttgtttatgcgcgggcggcggaagaaaacccgattccacacgaaaaaagtcaaaggcgatgtgcgataccatgcggcaacagcaacaaacgcgatgttgttgctgcccctttgttttgccgcaacagcgggcgtcgccccgctcccctaagccacttcacttcccagcagtttgtggcacaaccccaaccaggaaggtcgattagtttctggatcagaatggtaacaaacagttaaaacaaaggctccatttggacgagataataatcagatccaacaaaaacattttgtttataagtgaactatatatttaaacaatgtttgaacatcgcttggctggtctcaatagatgtaatttcagttgaagtatatcttacatatattagagatacatttggtacaaaggaaattaacctttaaaattgttatttttaaaaatggtttaacaattggaattcccttaagtccaaatgtttaaaataatagttatccacagtcctccagttttatatatatatatatactttatatctttgcaagtaagccctgtttgttgtcagtcgcggttttgttcactgcacacaaacattttgtatctatgtaaataaatacatacatacacatacatatagtttagagtgaactgtcaggatgccaggacgtgactgcgtgcagctcaaggacgaggacatgggaattggcctcccggtgcgtgtcaaatttgcctaattgcgcgcagaggtcagcaaattctgaaaaactgcgctgcccatttgaccatttctacttggccagcacgcacatttttcatttcccaaaagcaaatattacacctcagcataaaaggttgagtaagcagtttgcttgacagcaggacaatctgttagttggcatttttggattgtttcaaactagtgagtttatacaaaactcattgaaaaatgttgcaaaaatacttgacaacttttttcactccaattccatatcttgtgtgaaacaatttaggaaaaaaaactacttcgatatgtaaattcttttttgatgaagtcattatgcagttatcaaatacatttatctagttttttctttaaattcaagctatcctctggtttccgtgcatataaggcagtttataagaccagggattggatgtacgttttaagaaatatactttcaactgcgttaacaacataatatttaaatttttatttttttatttttaatttcttttaaaaatgtaactcattcagataggtatattcttaatgttaatgtagtgagtcgctttgttcccacaaaaacagagaagattgattaaagccgatactaaatgaaagctggtgggttttaccccatctgcaaaaaatctaaatcccataagtttttataatagactcaaacatcgcatgtgaaagtaaacatcatcaaacatcatattgtggcctgcgtaccgtgtcccttcaatctacctcaagacaattataattcttaagaatgatttgaagaatagcacgggcagcactagttttgctatccccgatttctaaccgtgtacgcacttgcatccgacatccagggctgccaactcgcttgcatctgcagtccagttggcagcgctgtcggcgctctcgctcgcgcctgttgtgtttgagttcgagttgctgcgcttgtgagtttctcagcttgttgtcgccatttgggtttcgaccgacgcgcgcaggagacgtgacatcgcagagcggagcgacacgaacgtaacgtaacggaacggcacgatacgaaacgaagtgctacgcaacgaaaggcgaacagaaaacgaacatcaccatcaacggcggatgcgagtgcgagagtgattggaagtaaaagagcgcgcgcggaattcgaagtgcacaattattcaattttatttttattttttttttttgactttgcgttccgtttcggtccaaatacgtcgccttcttttgttttttctcaatttttctcttgtgcgctgcgcttattaagttcctttaaagtgcctggtccattgtgttgtgattgccgcttttacatacacaaacatcgcaggaagaggaagcagcattacgcggggtaaatgaaacaataattaaaagtgccctttattaatttccaaaaggggctaaagtgatggatggtggggaagaggggtgcaacgaaaaagaatccgacgacttaaagcaaaaccagaacgattgacaatagaatcagtatactttatcatttcctaaccaccgataacctcatttcacggcgacacatgtgcatatctatttgaaaagctcaacagcgaagtgcagatgaacaatgtttgtacagtaaagtgtgttgtggctccaaacaagtggaaaatcaaatattagcaagaaaagtagttcacaatttttgtctaatatttgcaaacgcacttgacggacacttgtaaatatgcattccagaactcaatttgccagttagaaaatgcaatgatctgaggcaatcatcaaattgcccccttgtaattccaccattttaaatagaccttgagttcatttagccattgtttactgtgcccttccatttgttgcgcccccccaaaaccgaacttgcaacgcaagcgtggctggcaaccctggtctggccaccacggctctcccttgtgattttcgccggtttttggctcagtcatatgtgcgtcattccgcttcctcccacatttcctttgcatcctcccccgccatcgccaccccgcagagagtcacccgcattgtcgactccttggccactctactctctgttctcgcccactactccttactccgccttcgccaaattgcttctgcacgttcgtcaaatatttgctcaactctttttaattacattacacacactcacgcatttgccgttgttaccccgtttaccccttttacaccatcgccattacacgtagaaaacagtggcttgcgcagggggggcgttcattaccgacactccccccaccctcccttctggtttcaaacaactaaacttttggctttattgtgcttttaagagtcgtaaaactctaaatgtacacaaatacaaatgggaaacaaacaatgtaagggagtatataagaagcagcccccctttaccattcactgcatacgccactggcacgcacacaacaaacggtttgtaattgcagatctctcgtcgatttgacgagagaatgggaccaaaaagagagctgcatttggaaaagagtgactcacgcggcaattcgtggaaattctgtgattgattttatagattccaagcgagaaaaagacactggaccagttttccgatcatagcaggcccattaattacacatgtacacacacaggcatacgtattttgacttgggcctctttcatttatcgctgtatggggagttgggggtgttgggcattggtgtatgtacctaaaaaagagtccataaaatatcagcatatcctatctagactgtaggatctctggaaccaaaacagctaggaaaaaaactagctacatggtagttagattacaataatcacatagaatatacatttcaagatgattcgatgtagaagaaatcttgacctgattgatttcgggaaacctactgcattacagtgcttactttggtgtaatggtccacttgagtgagggagtgatgcgcaatggaaatgtaccgaggcgattctgttgcgattgcattggccctatttgatggttctgggcttctgttctggcccccagcaacccacacatgttggtttcgtaaattcatgagcaacgcaatcgcagccgtgaaatgggattttcatctaacaaaatatttaaaaattctaaatggattctttgcagcgagatattgacaaactataggatttcttgtgcattgttcggtttaaaaaagagatttttagaagaagtaaattaaaaagtacatacatgtacatgtacagtaaatgcatacatttattagttttcgttacttttgtttctattaattttgaaaaattcattaagttgttcatatccagtcatccagtcaactgtataaactgctcgaaaaattttccaaacacgatatgccattttaaaggtatgcatacatatgtacccattagaaagcctctttatagaaaagtaccataaagtttgtgatcacctcatgttcggaggtacgacactttggctgcatattttgggtgttctgattttacgattctcttgtaacacgcccagctgcctctgatttgctttgcttgtgcttttgcttctttctgctttctgcttttccctttctgctttgcttttgcttttacgtacatacatgccttgccgggtgcgacatcgtctgaatttttatgcggcaactgcgcgacgctgtttatttgttgttgctgtcgctgtaaaaaattttttatcgcttgtttccgtttaggaaccaaaaatggggaaaaataatgtaccgcacacgcaaacacttgcatgcgttttccctgaaagcagtttccatgatggagaccatcgtttagtaaagcacggcagttgaaaatggtagtccacgcattaaattaaacgaaagaaaggtgtcacttgtgggcgaataggtaaagaaaatatttaaagaaaatattaaaaccaaatatagttaaatgcaataagcagtgtttagactaaagtgtgctagtgccattatcaattactttgcggaatttctagataatgtaattatagactgtgctttttgtgtcgccacattcattgcgaaatcgtgattttgtaaatttatgcctctgccctcttattgtttggtgccatttgatggttcttttccttcacccacataatattgtgtgttttctgaccgtctgcatttcgccatcttgaggcaccttgaggcatttggtcatggttggccaatgcgataattcttttgggttttgttgataatagtcacggctaaaccttatagacttcagcatatgtttatgttgctatgttcaagcctctgatattggtaatcccagtattatgctatcagtaagaaaataactcaatgaagtgtatagatgttaccattttgaaaacaacagttctgtgttgcaatagttaatgccctaagattatgttgtgggtcaagtccagttagtgcaatgtaacaatcgtttattgagcaataatgagtacttcaataccagcagtgaataggcgttatgccactgcataatataatcaaaaaaaaaaaaataataattgattggtcttcaggaacttcaaagtgcaattccacatattttatgcacatgagacttagttttttttgtttatctcacagtattatctactgcatatgcccaattagaaaggagtttccccattttgttttccctcctctattgattcccccccactttgccttctccagatgctgctgttgggtctcggggtcgatgggtcgtctcgtcttcatttcaaaataagcggacattttctcgtatatcgtatttttagttgtggttttggttttggcttcggatggggctcccctctgtttttgcctttccccattccttgctttattccccactcatcttccgccatccgcagtgggcgtctgttacagtttgtaaattatatttaaacgcgagctgggcgttcgtcgtctatcgatgcggattcgtacgcgcatttggattccgattccgtttcggattcggatttagtttgcgtcgtcggagcagatcggttaagatcaggaggcaactgcggcgggaaatgggatcgtatgggcaggggtttctgtgcgccaccaagtgggcgtgcagtgggccaatttggctgatagattgtatttcgccacacaggcgacgaaggcgaagaagagagacagaaagagtagagaaagagacacccgagtgcagttgcatgcatgggattatttagcacactgaactctgcgttaaatgggccttcggtcacactgtaaatcagttggcttgctcccaattcaaatgcgactcccattcccattcccgtatccatttccattcgcattcgcattcccatttctattcctattcctattcctattccaattcccattcccaggctcaatgttttcgctaattgacttcgtctaaagtccgcaataaacatttcagcaatttaaagcggactcgcacacacttaaacatctcacacaacacacacacacatgtgcgttgtgtttatatgtgtaagatctagatatagactagatggactgtataatttatagatggtctttagcacattttgaattccgcattccgttcctaattgattccgtttgaagaaacgaaaaagttctgcgtgggctttgcatttagcttccaatttgccgaattagtttctacgatattataatgcacattgatcggaattaaaattggaattggaatcgaagcgcgtccatttgggccaatgatttattgaaaattctgctcttatcaccgtctatataccctttatttattctttcccccgggcgacagcagccacccccccccccccccatccccacggaattgattgggctgcaataaaaaatttgtccgaattaagaaagggtgggtaaatcgaccataaaagcgtgtaatcacacattctgatgatttacaattcagcccacagaagaaaattataacgaatgcgagacctacgaacccccccccccccagtccacgctctactacactgcactttgcagtatcaacaagtgattgatgttgatgtatgtatgtacatatggtagcactggcagtggtactacaagggtacaagggtacgacgggcttgctcctggacgaatggaaaccgattcgatcgcacccggagtggcaggaaaagtggacggacgggggggaggagctcaagtttcaagtattgctcttgttctcggagcactcgaaaaataatatgcgtccatcttgaatgtacatacaaatgtatatcgaaaaacatcaattataacaattgaacatccaatgtaggatacaaaatggcttaaaaatgcgaccagttgtgaagaaaacatacaaaacaatgaaaatctattcgaattactttaaaaaaaactatgtagttctcgaatggacaactttttttttttctttgtttatttccaacttgaccactactttttttcaagtgttctttgcgtacacgccttgaatatgcgcaaatgggatagccaaccaccgctggaggatgtactcgaaaacgcatctgttccaggggactgtggcgacgtctgagacggatactatcttgatctcataatcaacgtagtgcggggtgtagtgtgtgcggctcagttgattcaggggttgaagaaacaggcaagatgagaacaaaacaaaaagaaaaaacatgcttaaataagcggacgaacgtcatcggcattttttttttctttttttttggcctgctcgctctccgtttgccactttgcattgtgtgtttttgagctcagtggcaggtgcaaccttcgtttgtggccattgttatagatgttcccctgcaatatgggcatcgcgatgggtatgggtataggcctgaatgcgtagcagcagttgccccgaaaaaaaaggggcgaaacctcggttccgatttattgttgattatattgtacagacggcggcagctgcatttaaggacacgcgtcacttgccgctccttttgcacgcgccacacaacagcaaaaagaaaggaaattaagaaaaaggagcagagaacggtcttcgttcttcggtcaacagcgcagatttcttcgacttgctgcccatggtcttcattccctgccagcgatttcgaaccgcttctcctcgagtggcatcagatgtttcagatgtttccaaggatcgcgtgcgcttgttgtttagcgagcatgctttctgctccttccgcttcctgaagagtttcggagttttgagtttggtttcttgcaaggggaaatgaaatggggaacgtttgttatgcggataaatgtgaatattgttcagctgtctgtgtcaagtgcttaagaatgtctcaaaaatggtgattattaaagtatttgcccggcatttctgtcagtttgtagggatctagcaataagatgacagaaatcagttatgggaaccaccttcgtgcagcatttccgtttctcgacaattcgggcttgtccttcatggttacttcacttactttagtttactccgttgcatcgccttgccttgaacttcagcgtacagagacagagattcggcatcgattcgccatgtcatcgttttgcaaaggcaattgttgctaatgatttttgacaatgtcaaactgaaatagctgattatttgggcagtttgcggtacgacagattactttgtgaccagtaccaagtcatgttccatgttctttactttccgtgtacgaggggtgggggtggcggggggttgggttcctccaattaggctgcttaacgaaccaaagtcaaagtcaaaccgaaacgaaacgaaacgaaatggcgcaaagttaagcaaagtgtagtaaagtcaactgaactctgaacgcaactcaaattgagtttaaacacaactctgttgcttcttcatgatggcgatgatggtgacgatggtgacgatggttatggtgctgatgatggccaaaatggtggcgcaaattcgagctgtgacattataaattctgcatgccatatatatatatcatatattgtgcgcggtctccgcattttacgagcgacaatttcgccaaaggagcgaaacgcctgctctataaggctgtggctccatgactagccggctttttggctgtgtgtgtgaatggggcccattaaaagttaaatttaatgtattaatttattttctgtttgcccgctagtgttgctttttgtccactcttgtgtgtgttgttttttttcttctttttttttggcaacgcttgtttgttgtttttattaatcgactgcggaagttgctgtaaatgtccacaaacatgagaatattcataatgcgtttggtgaacaaagagccaccgagctcccagtccatctgttgttttcacccacagccgagttttccccaacccccttctaccatcctgtgccattttggggcagctccaatgacgtaagtggtgcgggtagggggggggggttcttagtagggagttgtgagcgactggactctcgcttttagttaattactggcgatattattgtagtgtagaagtaattactttgcagctagctcccgcgggaacgaaatgagccccaaacatgcgactttggttggttgagtaggtcatgatgagtggtaaccaaccacttgttagatgaagttggattggatggtacactttgggtgaggtaggtccatcaaaagagcgcagcgcacaacacctccagcgcttggggcttaagacccctcaaatcggacttgagaccagctgctcagcttcgcggctgtatgtctgtttatacaattatcggatccgctgggttataattggtttatcatggaagtcgggcgggccggtctgtgtgtccaaggtgaacaacagcaaaccgatccgccaagaacattgaactgcagctgaaaatcgtattttatttacttatttccagatcgactgcgactgaaacgcagcgttccacggaaaaaacagcaatccgattggtttattccatttcagattccttcgaatgtaacgattgtaatttaaaacacctttaaacacagacgttttctcaataacgaggcgattttattgctaatgaaataagaaggagaacaaaacacaagtggttggttcagcacaaaacaatcgacgttatcgtgtgtcaaatgtttttatagcaaacaatgtttttatgtgaatcaagttcctactaattcactactaaatgatatggtacaaattatatggtattttcgattaatgcacgtttttgtgccaaaatgctgcataagttgttacgaatcgaaagcaaacttacgtgtataacttatggccagtagcagtcagtgtataattaagtgtttgggtgcaacaggaaattgcaaaacgcctagcttattagttggtaaaatactccatcggattgagcggaatttgttagccactttcatgtggtaaagctgaattcacaatcaacatgctgacaccttctacttttctatttggtcttgaattgaaattattgacacttgtctgcgtaaactgatgatgggtccaccaaacagaaaaatagttgagttaatttgtttagaaaatgttacgtcttattcaatttgtgtttttgtggtcagaaaatcgtgatgaaacaaatagtaatagcatcagagtctccatctaatcaaatttagttgggagtttattataaggtatatataatgaggtataaatggtagaaggtataaaaacgcatagttttttttttggctgcagttcatttgttacattattagaattagaatattcgttgtgattctattatgtgtgcaacagcctccgtttctttcgcgctataattcccaatgggttttcgcgtgatccaattcacaatttaaaaccggttctgatccctatatagatagcaattaaaatctaggctaataaacgaccttactcattaataatcgccatacacatggagcttacgatctaacaaacttgacttcgttcaatagaacgaagtgatgaagtgatgacattatttttttctgtgtgtattagaggagggcattgggagtgcagtggtgaagcgacctatgcaaatatgcaaacaagagtcgtaaactaacagcaacaaatggccggtagatggggattctgtgtggggtctatgccaccacttctgaccctcgtgtccatccataccgcagcaccttcctcaccccttcccgacggattctgttgttgcggctgtcattgaactttgtggacaaccgattgctggtttttgagggaaaagggcagccgtgggggttattagaagccgcctcctctcattctgtgcactccacgttccgttttccgtatgcatttatttatgtacaaacatgcatacagacagacacttatgtccataaatcaacgctaaccaagcggggcgacatgtgcattgttgaatggaactcgaactggaactggaactggaactctctaacctcgtttataaccttccccgtatccatatccattccatgtcatcatcagcagccgctgcccttctcggtgcgttgagcagctgacactgatggcggatcatcacgggtcccgggtggagttcacttgactaaagtgccaattacccaaaaaaaaaaaaaacaaaaaaaactaaaacagaaacataaacagaaacaggaaaaaaacgaaaacaaaaacaagaaaaccttttcgagccacgcaatgactcattcagtggagcgttgaaatggccataaagcaaaggcggcaactccatcggcagaaagtaaccgaaatgaccagtaagacatcggcggttgtcagcgatgtcacatatgtacatcgtatgtatatgtatgtaaatatgtatgtacatatcatgcccagttgctccggatggattggatgaaagacttgaaagtcttgaccgaacattaaaatgagcacaagcaccaggttctagggtaataaatcagtgctttacatcttacatctggcatcgtgatcataagtttatgtatcatacatataaacggtaaagttagtaaataaatcgaacagattttaaagaaaaagcttgccgttttcgaaccattcttgtcgctctttataaactcggttgtaaatatagacttggtggtttcattcaaatctgtctgcaccacaagacgttccacttcttccgtctttccctttctcttacctccccccccgccctatcatttctcttggccaactgccagtcattgtgattgtttttgcctttacccccagctgttaacaaaccccactcttccgttaatacgtgacttatgccctggtaaattacttaacactcgccagtcgccgggcagcttcaactgcattatgtacatacatatatcgacagtgcgaaatcggattcatgagaaacatcaggagtaataactactatatatattgcactatatcgccaatggactgctgctggataaacgccaaaagtactggacttggaccgaggaaaggcggctttgcttttgattgccgagcgtcagcagtattagcaaaatgcacagcaaaaagaaaatagtagctagatatgtatataatgatttggattagcttatagatactgaatacaactagcttagcttattagctcacaactttaaggattaaaatataatatatgcgacaaaatttgttgatctggctcttgactttaaatgttgaagtttatagcatttcttaaaactctttgcgtaaactattgcgtagtgtgtatcttgtggattcgatgtagttcgaacagttcgattcgttcatgcagaaaagttcccaggttcgatttccactgccgttcaaagattttttctttttcaaaacgatatacaaatatcgttttattcatgagcgatatttcgttgcgctggaatcatcagttcgaaactgattatttaaaatcgtggaattgctgtgtgttcagtatcagtttttctccaggtgcgattgctgttgtcggcgggaagtcgttgtcgtccaaagtaaaatgtgtaacgtgtttgaagcgacagagggcggcgacagaagtggaaagaggttgggtcagccagctgcattggcaaccgactacagattcagacttcttctgacttctgacttctgactaccgacaatcgccaatctctaatcggaaaatcgtcgtttgtcagcggacgttccattcggggcacgtttcacacaagctctgccagccacaatgcaaacaagatggtgcgcccagctgataatagttgggcatttctgggtcccgctataaagccatagtttcccaactatgcccgtaatcatcaactgtcgcattttaaattcgagccatgaagactccaagtggcggtgaatcggcgcaggcatcttttacatacgtatttgcttcgtctcaaattaagttagagccaatgtttttgtgtcggatacaagcatatttttagaaacattagacattagattggaatgatcggaaggaattcggattttatattacagaaatttagtagttacatttggctcaagttatggaaaacatctctaatatacgtacaaagatttacctttggaaaaagcatgtttcttacacttttataacttgtaccataatgctaatacagtctgcttctaattttcagatcaacctaaggggcatcttggtcggcggcgctgccagcagcgcaggagtagcaggagcagcggctggtggtgcgacgacgacgacaacgacgacgaccgccgctggcttcgtggctggtggagattgccctgtgatcggcgccggtgctggcgctggcgtcaagctgcgcaggcacagcgatcgtcccctgacgccggaggccaagcagctctctcacacataccgcatctcgatggccaacctggaggattcgcaggaatcggagctggaccagatcctgggcgagctgagtctgctggaggcgcaaattagctacacggaggcctccatgctgcccgccatgtgtgctccaagtgcgggcgctcagatagcaccgccaccgggagtgactcagctgccgggcagtgctccaacgatggtctccatgtcggcatcatcctcgcgttcccattcgcgcaccaatagcaccatctcagcagacgtaagcagctgctcgtcgtcggggatctcggagaatggacacggactgggactggtacttggcgggcccgggtcggctggaatgatggtgcagccaccgccaccgggcggcatgaccatgggaataacgctgggtgttgtcactccccgggaaccgcgcaccgaatcgccagacaatgattccgctttcagcgacacagtttcgctgctgtccagcgagtcgtcggcctcctcgaacacatccctgcaacaacagcagcagcagcagcaacaacagcaccaccagcaccagcagcaccaccagcaccagcagcagcagcagaaaccacagctggctggtgcggagaaactacaccaccacggcgtacatgggcaacacggtggccagcagagtggcgccaacagcatcacgaaggcggacaagatccagttggcactgcataagctggaaagcgcccccatccgtcggctgtttgtcaaggccttcacctccgacggtgcctccaaatcactgctggttgatgagcgaatgggctgtggccatgtaacacgacttttggccgacaagaaccacgtgcaaatgcagtccaactgggcgttggtcgagcacttgggcgatctgcagatgggtgagtgcttttgattggcttttaggagaaaggccctttgatcctgggttaaattaaactgatcgctcttcccacagaacgcctctttgaggaccacgagctgctggtggataacctgatgacgtggcactcagacgccggcaaccgagtgctctttcaacagcgtccggacaaggtgacgctgttcctgcggccggagctctacttacccggaccccagatggcgcccggatgccagcacgacgagcagacgcggcagatgctgctcgacgagttcttcgattcgcacaaccagctgcagatggacggaccgctttacatgaaggcggacccaaagaagggctggaagcgatatcatttcgtgttgcgctcctcgggcctctactacttccccaaggagaagaccaagaacacgcgcgacctggcctgcctgaatctgtttcacggccacaacgtgtacactggattgggatggcgcaagaagtggaagtcgccgactgactacacctttggcttcaaggcggtgggggactcttcgctgggcaagtcgtgtcgctccctcaaaatgctgtgcgccgaagacctgccgacgttggaccgctggctgacggccatccgcgtctgcaagtacggcaagcagttgtgggacagtcacaaatcgctgctcgaggatctctgcctgagccgcgacgatgccgtctcgcagtcgagctttgcagcctccatgcgcagcgagtccatctcgagcatctcctcggcggttccgtcgcagtgcggcagcgtttcctcggccatcagcagcatgtccaactcgactagcggccgcacatcgcgcgcctctagcagcagctccagtggctgcctctcggatgacaacaacgctttcgactccgagttcaccactggcaccattaagcgcaagccctcgatgaagcccaatctcccgctgaccacaatgacacgccagctgaaggaggtgggcgaaatcaccatctgcgagagcgctggtggcgatgccagttccccggagcgcagtggtacactaacgcggcgccatagtcgccgcaagtcgcaggagagcaacggcagcggcacgctaaagcgccgcccgattgccgtgccggtggccactgttgtcaagcagacggagccaatgggcagtgcctcgtcaacgtcgtccagcagcaactctacgcccacgcccacaccgagcatatgcgccaaaccgccgccaggcgattcggcatcgctgatgtgttcgtctaccctgtctttggattcgctgcctccgccccctccgccgcccgctttagatggttcggaggatcaggatgtgtacgggtcacagctgtcgctggcctcactgccaccaccgcctccgcctgaggatgtgctggcaatgaactatgcagaaccctccagtccgtctacgcccacaccaatgagcactccaatgatcatgcccaacagcaacggatcgttgcccccggcagtgccggccaaacccatgaagccagcagtgaagcaggcggcgggcggtctcaaggccgcgccaccatacaaggcgccgccggattacgtgggccctgccctgctgcccgggccgccattgccgccgccgcctcctgcccagaaaaaagtctcgtttgcagactctccggtgctgttgcgtcgcaagatgtgctcaccggaacccgtgctgccccagcgatcgcccagcaccacgctcagctgtcattccagctccagtgcaggatcggcctatcagacctacgcgcccgggcctatgttgccgccgcgtgctgatgtggcgcgcctgtccagcctgagcaacggcagcagcagcgaggtgacctcgcccaagcgcctgcaggagtcggcctcgaatccgccccgcgactttctcaaggatctgcaacgcgtgatgcgcaaaaaatggcaggtggctcaaaagtgcaaggcggagccagcgacgacgcctcatgaggtcctgggcttccgggactttagcaacgaagacctactggctgcccacaacctcaactctggggccaactcctcgcactactaccgcgagacggccaacgtgagccactgggtgaggaagcactacgagtatgcccacaatgcgctctacgagaacgtgcacgcccagtcggcggcggcggcgggagtgcctggtagtggagaagccaccacgcctccgctcccacctccgcctggtaattcagtggcagctaaaaaacgtccgccgccgccgcctccgaagcggagcgacaagacgcacctgaccaaccgggtgtaatggcatcggagaagaagagtaagtcaagcgctgaaatgaatgcacacaatcaccttgactatcagaaattcgcgaaccaagactaattttttttcattttcaggcgaaaccgcttacttactgagatcctcgttctccaaaggaaggattttcgtaccagaatcagaatcagacagttatgcacttgtctgaaagaaagcagagaaaagaatcttacaaattcctatttaagtccaggcgacagcagagcgagatggaaaaccactaattaaaacctacatatatatttcctaagaatatgctatggccacgcccacttctctcacaaaagtattacacatcatagagaatctaactgttgaacttcttcgcagttcgggattaaaccacgtcaaaagtgtcaacaagagagtttttaaatttccaagggcaggcgtccaaaaagaactttttgtatatctaaattaaaaacctcttcttgtatatttttaaaaacctttaattttatgaacgaataccttaacaagtcaatagtttcgagcatctcccattacatatttttgttggcactcttgacttggtttgattcataatctatattttcattttgaaaatcaaaaaacttctgcggtactcgcctgcggaattaaatgcaaaatgcaaaataggaattctggcattagtaaaaatatttaagatacattttagtttgtaaaaaggaaaaatgcattttagaaacgatagtgcattatttaagcaacactaaattatcgctagataagtgtacaatgtttttatatatacatgcactcttttaattgtttagttgctcgtagtattgattttatacattatatcttttttttgcgattatctttgtaacggtagagtgaacgttttgtgagcgcatgaaatgcgctgcgctagcaaaaggaaatgccttataaagcatattaacctaaaaaggggaagccctgcataaacacctaatatacataca

SEQ ID NO: 39305 - DNA, 3489 bp, DROSOPHILA
atggattgtggtggtattgcggcacatcagcaacaacaactacaacagcaacaactgcacttactccagcaacagctacaacaacaacaccaccagcagcagcggcaacaacaacagcacagcctcgaggaagcagcaacaataacaaatatcaacctaaggggcatcttggtcggcggcgctgccagcagcgcaggagtagcaggagcagcggctggtggtgcgacgacgacgacaacgacgacgaccgccgctggcttcgtggctggtggagattgccctgtgatcggcgccggtgctggcgctggcgtcaagctgcgcaggcacagcgatcgtcccctgacgccggaggccaagcagctctctcacacataccgcatctcgatggccaacctggaggattcgcaggaatcggagctggaccagatcctgggcgagctgagtctgctggaggcgcaaattagctacacggaggcctccatgctgcccgccatgtgtgctccaagtgcgggcgctcagatagcaccgccaccgggagtgactcagctgccgggcagtgctccaacgatggtctccatgtcggcatcatcctcgcgttcccattcgcgcaccaatagcaccatctcagcagacgtaagcagctgctcgtcgtcggggatctcggagaatggacacggactgggactggtacttggcgggcccgggtcggctggaatgatggtgcagccaccgccaccgggcggcatgaccatgggaataacgctgggtgttgtcactccccgggaaccgcgcaccgaatcgccagacaatgattccgctttcagcgacacagtttcgctgctgtccagcgagtcgtcggcctcctcgaacacatccctgcaacaacagcagcagcagcagcaacaacagcaccaccagcaccagcagcaccaccagcaccagcagcagcagcagaaaccacagctggctggtgcggagaaactacaccaccacggcgtacatgggcaacacggtggccagcagagtggcgccaacagcatcacgaaggcggacaagatccagttggcactgcataagctggaaagcgcccccatccgtcggctgtttgtcaaggccttcacctccgacggtgcctccaaatcactgctggttgatgagcgaatgggctgtggccatgtaacacgacttttggccgacaagaaccacgtgcaaatgcagtccaactgggcgttggtcgagcacttgggcgatctgcagatggaacgcctctttgaggaccacgagctgctggtggataacctgatgacgtggcactcagacgccggcaaccgagtgctctttcaacagcgtccggacaaggtgacgctgttcctgcggccggagctctacttacccggaccccagatggcgcccggatgccagcacgacgagcagacgcggcagatgctgctcgacgagttcttcgattcgcacaaccagctgcagatggacggaccgctttacatgaaggcggacccaaagaagggctggaagcgatatcatttcgtgttgcgctcctcgggcctctactacttccccaaggagaagaccaagaacacgcgcgacctggcctgcctgaatctgtttcacggccacaacgtgtacactggattgggatggcgcaagaagtggaagtcgccgactgactacacctttggcttcaaggcggtgggggactcttcgctgggcaagtcgtgtcgctccctcaaaatgctgtgcgccgaagacctgccgacgttggaccgctggctgacggccatccgcgtctgcaagtacggcaagcagttgtgggacagtcacaaatcgctgctcgaggatctctgcctgagccgcgacgatgccgtctcgcagtcgagctttgcagcctccatgcgcagcgagtccatctcgagcatctcctcggcggttccgtcgcagtgcggcagcgtttcctcggccatcagcagcatgtccaactcgactagcggccgcacatcgcgcgcctctagcagcagctccagtggctgcctctcggatgacaacaacgctttcgactccgagttcaccactggcaccattaagcgcaagccctcgatgaagcccaatctcccgctgaccacaatgacacgccagctgaaggaggtgggcgaaatcaccatctgcgagagcgctggtggcgatgccagttccccggagcgcagtggtacactaacgcggcgccatagtcgccgcaagtcgcaggagagcaacggcagcggcacgctaaagcgccgcccgattgccgtgccggtggccactgttgtcaagcagacggagccaatgggcagtgcctcgtcaacgtcgtccagcagcaactctacgcccacgcccacaccgagcatatgcgccaaaccgccgccaggcgattcggcatcgctgatgtgttcgtctaccctgtctttggattcgctgcctccgccccctccgccgcccgctttagatggttcggaggatcaggatgtgtacgggtcacagctgtcgctggcctcactgccaccaccgcctccgcctgaggatgtgctggcaatgaactatgcagaaccctccagtccgtctacgcccacaccaatgagcactccaatgatcatgcccaacagcaacggatcgttgcccccggcagtgccggccaaacccatgaagccagcagtgaagcaggcggcgggcggtctcaaggccgcgccaccatacaaggcgccgccggattacgtgggccctgccctgctgcccgggccgccattgccgccgccgcctcctgcccagaaaaaagtctcgtttgcagactctccggtgctgttgcgtcgcaagatgtgctcaccggaacccgtgctgccccagcgatcgcccagcaccacgctcagctgtcattccagctccagtgcaggatcggcctatcagacctacgcgcccgggcctatgttgccgccgcgtgctgatgtggcgcgcctgtccagcctgagcaacggcagcagcagcgaggtgacctcgcccaagcgcctgcaggagtcggcctcgaatccgccccgcgactttctcaaggatctgcaacgcgtgatgcgcaaaaaatggcaggtggctcaaaagtgcaaggcggagccagcgacgacgcctcatgaggtcctgggcttccgggactttagcaacgaagacctactggctgcccacaacctcaactctggggccaactcctcgcactactaccgcgagacggccaacgtgagccactgggtgaggaagcactacgagtatgcccacaatgcgctctacgagaacgtgcacgcccagtcggcggcggcggcgggagtgcctggtagtggagaagccaccacgcctccgctcccacctccgcctggtaattcagtggcagctaaaaaacgtccgccgccgccgcctccgaagcggagcgacaagacgcacctgaccaaccgggtgtaa

SEQ ID NO: 39306 - protein, 1162 aa, DROSOPHILA
MDCGGIAAHQQQQLQQQQLHLLQQQLQQQHHQQQRQQQQHSLEEAATITNINLRGILVGGAASSAGVAGAAAGGATTTTTTTTAAGFVAGGDCPVIGAGAGAGVKLRRHSDRPLTPEAKQLSHTYRISMANLEDSQESELDQILGELSLLEAQISYTEASMLPAMCAPSAGAQIAPPPGVTQLPGSAPTMVSMSASSSRSHSRTNSTISADVSSCSSSGISENGHGLGLVLGGPGSAGMMVQPPPPGGMTMGITLGVVTPREPRTESPDNDSAFSDTVSLLSSESSASSNTSLQQQQQQQQQQHHQHQQHHQHQQQQQKPQLAGAEKLHHHGVHGQHGGQQSGANSITKADKIQLALHKLESAPIRRLFVKAFTSDGASKSLLVDERMGCGHVTRLLADKNHVQMQSNWALVEHLGDLQMERLFEDHELLVDNLMTWHSDAGNRVLFQQRPDKVTLFLRPELYLPGPQMAPGCQHDEQTRQMLLDEFFDSHNQLQMDGPLYMKADPKKGWKRYHFVLRSSGLYYFPKEKTKNTRDLACLNLFHGHNVYTGLGWRKKWKSPTDYTFGFKAVGDSSLGKSCRSLKMLCAEDLPTLDRWLTAIRVCKYGKQLWDSHKSLLEDLCLSRDDAVSQSSFAASMRSESISSISSAVPSQCGSVSSAISSMSNSTSGRTSRASSSSSSGCLSDDNNAFDSEFTTGTIKRKPSMKPNLPLTTMTRQLKEVGEITICESAGGDASSPERSGTLTRRHSRRKSQESNGSGTLKRRPIAVPVATVVKQTEPMGSASSTSSSSNSTPTPTPSICAKPPPGDSASLMCSSTLSLDSLPPPPPPPALDGSEDQDVYGSQLSLASLPPPPPPEDVLAMNYAEPSSPSTPTPMSTPMIMPNSNGSLPPAVPAKPMKPAVKQAAGGLKAAPPYKAPPDYVGPALLPGPPLPPPPPAQKKVSFADSPVLLRRKMCSPEPVLPQRSPSTTLSCHSSSSAGSAYQTYAPGPMLPPRADVARLSSLSNGSSSEVTSPKRLQESASNPPRDFLKDLQRVMRKKWQVAQKCKAEPATTPHEVLGFRDFSNEDLLAAHNLNSGANSSHYYRETANVSHWVRKHYEYAHNALYENVHAQSAAAAGVPGSGEATTPPLPPPPGNSVAAKKRPPPPPPKRSDKTHLTNRV

SEQ ID NO: 39307 - DNA, 14771 bp, DROSOPHILA
cggttataccaaaataaaaaaactatttcaacgactatccgaacactttttagtttaaaaaaaaaaaaaaagttgaaagcttgttcttattcggagagccgcagtgatctctacagagcaaatggatttagttttgaggaaaagacaattaaaatcgcatcaagtcgatttgcagagatttctgtggcacaccaaataactttttggccatcgaaagggtcttagctaatggatgtggttttcggtaggtggttaaaccaattccttgagcgattagagcaaaagcgagcggaaaactgtacacagaatgctgacttactcgatattaatgataataaatacatacaacttaataacaaaaatatccgcatgtgtgtgagggttggcagggggtggggtgtgtagtcagaataaataaattatgtaatacaatgtaaagtatttaatgctttcgcctagcagttgtctcccaacattttccctcttctcctcgcatctctcgaaattctcacgtctaagtgaaaagccttcgcctacattttggtctggtgtatgtttgtgtgtgtgtgtgtgtgtgtgtgtgtcctgggtatacttggggtcccgggtgtatctgtgtgtcccttatcctgccccgacagaggtagtgtacgtgtccgtgtccgcgtcatcgaacgacgggcgcaacaagagcaatcgatatttggttaggaacaactaatgcagatgcacagcccgggggcccatccttgcagatatctcttaacaacaaagacaaaaaatatctttaacaatactgtagactgatcaaaacaatgtaactttctctctatgagtagttccttgtccatcccctctgccagggctttctccatcgccactccgcatatcaatatccaattcccactgcaatctgaatttaagctattgttcctacactccgcagttcatccattgcctgggttgacgggagctcgatcgcaatggctcatgccttgcgctagctggagctgcacacgagcccgttcttatggggcagcttgagcagacgtcgcgtccggaactcataggctcggcggcagaacatcaccagctccggattggtgtgttccggcaccgttcgcactggaaacccgggagcggtggcaatgcttggccgacgcggcacaatgcttacgtcttccacatcctcctcggcggcacgtaggcggcgacgatatctgtggcaattagaatggtcactcgaaacacactcgatggtttcccacggcttccactaacctgcagtactcgctgaaggtgagcacgtagcacttgtcctcgacgcatgccaccgagttgtgatcgcgatggcgggaggcatagacctcgtccggacaatcgttgcgctgccgtccctgatcggtatgctcgggtcggtagtaccacagcagcgacatcatcatctcgcctggataattaatcgagtttagtttacatttcacagtcaagcatttaatctttggacacccaccgtcctcgggattctgccagaggtgcgccactttggccacgtatggcagctcattgtcctcgttggccttgagcagcacacagtccctgatgcggataatgtcgccctccacgtgccgcatggccgggtagcaggtgcgcagcaccagcggatcatcgctctacattgaaatacaacaaacttaaagttatgagtttcccaataatatatgacaatcaagcacttacattgagaaagacagcaccctggaacgccttgccggcccacatccatccattgttccacttgggcaccacattggccttggtggccggcggctgggtcacatccagctcgtagcttacgccgccaggtctgtgtctttggcgctttcgattcccgaacttgcagcgcgatctggtccgctttgtgtgtgtcgcctgaccttgacggctgggcggaggagtggctgctagggcagcggtggcgctggccgtcgctggctgactgggcaccaggaactggtgttgctcgtcggaatgttgctggttctgctgctgtgaggctgtggatgtggatgttgctgttcccgctacttttgcatcagtgacggccggacactcacggaacttttgagcctgcagatctgccgtctgatactcgttgttgttcgtctcctggttggatgcagtgatggcatttacggcctccgtctgagtttcagctgtggacgcaattgttgtcgctgctgctcccgccgttgtcttcttgcccttacccttcaccttgccagcaggctctttgcgcggcttcttgcacggcagacctgactcggaactttcgcccgacggtggcttcttggtctccgacttggagcgcttctcggcagtcgtctgtttgcccctgtgatcggtcgccgtagttagcggcgaggacgcggcatacagcccacccacagctgtcggcgcctgcttgcgactactgtgattcagttccgggtcactgaagtaaccacgactcagcgtcgtatccaagccttcgagcagatgcagagcagcaatctcctgtttccgggggcgtgctcttttcggcgatgcacttggcgtggccgagctgttgggtgcttgatctttaacgatggaaacttctgatcctgcctgctcgatggggtttcctgccagagatggggtgacaacagctcctgcaactacttctgcagccgcttcgcgttgctggcgacgttgctgctgttgctcgcggcgttgcagacgcattcgctgctgctgccgctgcgtcagaatcatctgacgccgtttgacatatttggccggagcacgtccgtgtcgacggatgaacctgcgaccggggcacaggtaactcttgggctccgcctgcttgatcaggctcttgtagctgttgtttgttttcgtctttttgttgccgctggacaaggccagcaggttgaagcgttgcttgctaccgcctggcgtaggctgttgctcctcgtcaaccggcggttcctgttgttcccgctcgacctccacttctggttgcggttccgttttggccacagacggtactgatgccgcttcttgctccagttcctgctctggctccgttttgatggtgggcttcaggtccggcagttggctgatatgtgtgctggcctgcgcctcgccgtcgtgctcgattttgattttggtctctgctttgatttccgctttaagtacgaaaggcatctctggttccgcttctagtttcgcagccgcctcctttggctgcttcaactgcttctccggaagcagctgctgctgggcagcatagaccatttccctggccatgctcttgccaattctcgccttgcgcggcactgctgctgcctggggcacggtgactgggggcggggtgctacaggtgagatcgtacgcctcgatgtgctgctgcccaccgtgactcttctccaggcccaatcccagacgcaggcggagctccagctcggcctcctgctcctggtcatcgagcagcttctcgtcactggcacaatagctttccggcggagtgggcggcggcattacgtgcgcctcgtactgcattttggtaacctgaggattctcgcccttcagctccgtcttcaccagcatctggcactgggtgcctgttgtggcggttgtcgccgtcgtgcttgtcgtgttggttgctgctgttgcccatgaggtcatctcaatcgtctgacagctgctgttactgctgttgttgctgttgttgctgctcctgcaactgttggtgctggtgtggccgctactgttgctgttgttgggggtcacatttttcactgggcctctactggtagtcaacgctgacgctgtagttgttgtcgtagcgctgctgcaggcaggcaaggtggtgctgctgctgctgctgctgctgctgctgctgccgccgccgatgttgctgttgctcgtggcactcagcaacatactgctgctgcagctgctgctctgatcgatgttgctgatgatgttgctaccaatatgaggcccagtatggacgttttttggacacgattgaggcattgggcagggacactgcggtggatattctgcgaagaacaaaattggatcgatattaaaacgtgtgcgcacatactaagaagtgttgccaactagaagtctttgatattatccgaaatctaatcttcagtttaaagttaaaaacaaaaaaaaaaaatgttgttcgtttgagtattgaaaactagaccttaacttattcactctatttctactagtattttacattattaaagactctttaaccattctgtgttgtgtgtgtttcaggataatccagtattgaatttacgtttgatatcctgcattacaatttgcaccgctacagacccatcgcatcttggctagctttgttggcaactcttcgcagtggctgtcatgcatccgggactggaccatacttttccttacccatatacggtccttgcagtccacgcgtgtagcactgaccggcggatgctcctccgccgggactgtatccggcgtagtagctaggcggtcccggatagtgctccaagtgctgctgctggtgctgttgctgatgggccggtaccaactggctgccagatggtgctcccgctgttcctgctccggctgcgccaacagatgctgggctgctagtgggcggctgctgctgcgccggcccggacaccgatccggatgagacgggcggcgggggcggttgctgttcgtagagctcgtgcggcggcggcggacccgcgtgttgatagtaggggtaacggcgataggcgcccggcggcggcggaccctgcggatgagcggcgggatgagcgggatgcgacggctgatagaccttgctcgaaaagtagggcgggtaggtgggcggcgagtagcacatgacctcgcccggatatggagcgtagtagttgggcggatagccggtcgagtagtgcatctgggccgcgtgcatcgagcgggagtagggcacaccctggtgggcggcggctgccgctgctgcggccgccacggcgccggccggatacggctgtggttgcggcggatgctgcgcctgttgcggattgtgggcgtggctatgggcgtgaccgtgcgattggccctgcgactgtgactgggattgggctgccgcctgatcggcggcggcggcggcggcttcagcggccgcctgttgctgttgcagctgcgtgggcgaaccggcggctgaaacgggaccgtcctcctcctgcagcttcttcacttgcgcaggcggcggaggtgcggcgatcacatgcggcgatatcagcggtccagccggctgatagtaacctgcaatggaagtaaaggatagtacgacattagtgaaatggtttaataattttcagtgcaatttacactatcgttatttgcgaactgattagatgaagttttggttattcaaatagtccatgcttttgataattgatttataactattgctggggacgataccaatcacgaatcacgaattagatcaaatttgcgatattaaatagctggattccagtttaacccactaggaatctcccagcataaatgagttaataaggtgtttaggacgatccttttatcgattgcacttcaactggaagccatagaaaatttagggtgcaagaaggatacccccggattgtaaaatactatttgccattcaggatcttttttctgagcggggaggcaggcaagtgcaattcgagccgacgtgaagtgaagtgcggcagcaatgcataaagtgaaagttggcctggccgaaaaaattgaaaataaaaaaagctagcgaaaccagttgagcggctccagtttgctgctgcccacagcagcaggtcgtgcaacgaaacccccctaaaagatacgtgtacatgctgcatcttccccgccttctcccgcccaccagtgacggcagtggtggtggtggtgttggtgactcctttacctcttcccagcatgtgggccgcatacaaaatgtcgcgaaaatgatgcgccgcatgctgctgcaggaacgtgaaagactcggcaatattggccgccagtgcagcggcggcggaggcctcgtcgcccggcgatcccgctacagctccagctggacccagtgcgtcgcccgtcgccccggccaggccgggcataatgccgccaatgccaccgatgccgccggcgggcgaaagcgccgatgagcaggagccggcggactggtaggagcggtcggtttcacaggtgccgctgctgctggtgctgcccacgctggagcagcgttgctggtgttgctgctgttgctgctgctggtgctgcaagtgcagcaagtgctgcagctgatgtggctgatgtggcaaggggtgctgcagcggctgctgctgttgttgctgctgctggtggtgcaactggtgctgaagctgcacggagagcggcaactgatgcagtgacggcgatatgtggagcgtactcagcaaaccgccggagggcggtaccgttttatgactgtgagcggatgttgttgctgatggcgtcgacttttttgtggtctcttttaggcgcattttcgaattgcgattccaagtggttcctcttttcgtcactcgtataaaaaataaatatatttctgacttgtatgctcctgctttccgtgatatttgttttgtggttttgcttcttctctcttagttgttccttttgtatataatattcttgtatatatgtacactgtatatgtttttgtatatatgtatatgtaagtcaacaaggaagttctattgttaaggcaactcttgttttaaatatttctctcgcttggttcagttacagtttgtccaaggcgcccgcttttccaaggcgtttttccctttttacttccgtttttcccttcagttattttattctattcgaattcttcatttgacgggctgcaatcacaaaggtaaatcaagaaaagctattgagcattcgaacacaaacactttttactggcgcactttcatcactttgagtttgtttcacgaatctattgttttttgatcacagttcgttatttatgatcagtgatacgcagtgttggtaaacgcggcaatcggtatttccggacagctatgaaaagctcattttaaacgcgtgcttaactaattctgttggcaacatttttcgaatttcttcattttgcttatttaacatactatgcaaattgttaaagttattacaatagttttgcggtggaagtttgtatttgaactccataactttgttgtccgtttcacttttcaagccgttattatttggatttgtttttattttattttatacattatatccgccgcgatttttttttattattatttttgtttcaagaagtgttacgttaaaatttgttttggtaaacaggggttctaaaaatgtgctgggaaaaaagatctaaggtacaagagtggaggtacatcaggtcgccaaggccaaagttttaatagcgcgtgtgtttcgttaccaaataaaaatgcaactaatgatagcagatacccgctctgtggatcctcccgactcccaagttcctaacgcaatttctcgcaccttcttttcgagaaagccagaaagccaaacgaccagtgacgaacgaacccgaatgcccgagagcagtaaaaacaataacaatagcctccgaagttgaagcgtgtgaaaatcgacgccggcagagacgcaggcagagcgagaaagagagacagggacatcggcacgtagcacgcagcacgtagaacgctgacgtcacgcacaataagttgtgctgagaagctagctagtttatagctagttgtgtcgtacttgtgtcgttaatcattattttcggcattttaatgtgatcctaattcttttaatacgattttcagcaaaaaaaaaaaagaatagtaaaatatgtcattattgtctaagaggtagaacttagaatgaaataagttgtctttgtcgatacctacgtatgccttaataaaaactgaagatacactttaaaagtttaaacgatgccataagcaattttcctatctaatatagtgtcaacactggcctttggaacacgttgatggcaatgtatgagtggttctgctcttcactgtccgttcgaaggggggcagactgtgcagagagcaggcaaatggaaatgggatagatggcgctcgagtgcaggccaggtgctgtcatcattattgttattttatgccatcgcctgtcaaatgcaaacaggattgtgcaagacagcacgcaaacaccgacgacaatttgtcaacgcctgcacttgacctacacacacacacagtcacacgcacacatacacagccagacgaacgacaaagggatacggtgatatacagctattgacagctgattagaacctcgactaatgatatattttaacaattccagtaagatatgcattttgcgtcctatcttatgtgtgactaaacctaagtacaattcaaattaatgttaagctgtacattcgtatttccaattgtctgttgaaattaaatatctgagcatatttattaaatacataatcggcattcaatagctatatgtacatacatatatgtatgtatgtatatccgtgcctcgcttgtgtttttcatgccggtataatggaaaaggtggccgaatgggtggctgcattaaaaggcagttaagtaaaacacgaccaatataaaacaattttgtttccatatttccaatttccataacccctttcagatggcaaatttaatcgagttaagtgtgcccccaatgcaaggacgacatttatagcgcgaaatgcgactgacttttaatgcaatacgaacgaatagcactctaagattctacctcttcagaaaactgaattttttttggtaacactttgccagtggtttctacttttcacacattttcaattaaaagacgccacgaggaaacaaacagtagaaagccgataagcgaaatgaaagcctttcgctggcaccgatttcagattcttctggatcaacggtgcttagtgaaggaaggccttggattcaatgctccacaatgcgggtcaaaagagaatggttatcgcgaacatgacgaagaacagctcgattgcgaattaaatactatacattaatcgactgatttatgtgcttaaaaaaaaacgcattctgttaaatggcagagtaaacatgcgacataattttagttatatttactattataagaaagtagatataaatatatacatatatttttcttgcttctttatctttccacgcggttgcgtcacttagtcaacgctaatcgccgcgcttacaagccacgtgagaattacaagaaaacgcgatgaaggcaaaactttgggcggcaaacacgtgtaggacaccagtttttacaactccccatccgaaaatcaacgcccagccctacatagattttccatcgcccctcaacccccccgccgtcccttcttggctttcgttttgatcgcggctcgtgcaattagcggaaaacgcttgcaattaagggcccacgaacgtcatatttatggctgttgctttttaattttgttcccctccttttcctgctgttgtcataacacactaagtgaataattacgcgtaattaggcgcacgcaacatgtgccacgccccaaaggaaatgcattccgcaacaccacctgccgatcggatttgagtgctcgaaaaaaacatattatcctgaaccagaacttgaaaaaagtgcaactttctcctgcgtcaagcgattttttaacagttttttttttttttttttttttttggggtatcaaaaaaatgaatttttgtgtttcacacaatcgaaagcataatgaatgcatcgcggttcgaaatacttctataactatgatgaaatagaagatgacgacatgaatcaataaaatgattcagccgacaaatgtagcacttgtgaaaaaagcacagtaactaattgaaatagttactataccatttctaatttcaatggaactttccaatataaatgcctcgcccgattgcaaatccattcgatgattgggtttaaactaattaaaacccactagtgcgtaagcaatctaagtgaattctttaaaaataaatcactaccgtttgtgtaaataggggccacccttttcattaatcgattgagtagctaacccacatgtggcaatgccaggatgcacttaaggtgggcaacgataaaaatcgattaagtccgaaagttaaacattaatcatgaagaatgcacacacacacacacagtaagttaaatatctcccccctctctcactctcatatttctgttaattttttttttttttttacctttctcttcattgcttttcttttccaccgggtgcgatgagtcgggattacgagtaaaaagctaagggaaaagcgtcgaaaacaggcgcaacagtgacacaggctggccagcagacaaacaatttataaaaagataaatatacatatatgtatgtatctgtatctgtaactgtatctgtgtacacaggaggaagagctggcagcagttgaagaaccagacgggggcccagtttcttctggacttcccgtttgcttgggcgtgcagtcaagagtaaaagtcaaatattgtaattatgctaaatacataatttactttgaattaacagctgaaaacggcggcgaaacgacggcaggtgagaaggaaggcaccggcgaaaaaaatattgaaattgctgcccagcgataaggaaacacacagtcggacaacaaaaggaacacaagaagaagggaagagatgtgaaaaataaggaacaacaggcggcaaggggcgttaccctaatgccgcacaaaaaaaaaaaaaaaaaaacgaaataaaattcaattaaattgcgctcaactgctggccaacaggtaaagaacacgctggccaaagggaacgccagcagaaagaaacaatattttgcggttttgttttggcacctgccacaaaccacagacggacagacggatagacagacagacagccagccaggtgaggcaaaggcagcaataagactgcaggagtcagctgttcgcttgccactgcgccggcagcatcgatatgcagaacggtgccagtgccgtaagggcatcgaaaacacccggcattgacatcctatccattatccccatgtccctaatcctgcggaaccctcgaaccaaacgaaccgagcccaattgggcgtgtttattcattcgttaaactcgtttgcgaatttaaattatgggctagggaaatatcaattaaaccatcttaagcggatatacattcatgcaagatatttcaagtcagcatatctatcgatcaacttaggttcatttctttgtgaattatatctatctataatatatacatacatatgtacgtatattcataatcagcatcgctagtcaattcaatatagtcatgtccatttcaaatcatagaattctataaaaagttatgagcgacttgtacaaaagccgccaagtggagctcgtgggctttctcggaaacagccgtcttttcctgcgtaatggatatctgatagtcgagccttgtttgtttttttttttgtgcacgcgagaaatcgaaatcacgatcaaattgaaacacacttcttagaaatccagcttggaaagaatcgttaataagaattgtatccacaagatgatggttacacgtttattataacttattttctgaatgcgtagttatggcaacgaaatgtgtgagtgcagttgtggcaatgaaatgtgatattatttgcaatgtcctcgttatggtaacgatatcaaaagtggcatttcgagtaacgaaagtgagtaacaacatcatgattatatgtatgtatatttgattaacgacaacaaatgaaacaacggcaaataacaatcaataacacacagaaacggagaagacgaagaagaccattgaggtcaaaaatactcacacgactgtcttctcgcctaaacattattctcatttttgggatcgtttttgaaaacgcgaccgcgtttcgatttcttatttgtgtttgcctacagttttcggttagtttcatttggtttccataccatttgatggcaaatgtgtatgcgaaaactaagaaataataataaaaatattagccactgccagctcgaagtaaagagcacgcgtttttatcgccacatttgtgtgcgtgttttattatctcgtttaaagtgtcgttgttgttgcattgctgctttttgttttatgattttatatttattcattagctcgctagcctagtttttacgattaacttttgaaaactaaacagaaaccagaaaaaagagcaaaataatagaaaaggccacaagagcaagtaaaaaactgctcgaaaaagaaaaaaaaaacgcagagccgagcgaaaaatcgagtcgtcagttgtcggacctctgccaatcaaattaacacatttaaattagcatttttgcataatgcccggacatttgtacacacatacatatatgtacaaccgtttatacatatgtatttacattcaggcagtcagacacacacatacatacaaacgagcacagacagacggatgaaatctgatttgcaaatttttagtggatcgaaaccgaattggaaatgtttctgccacacaatccggacataatgagatctcctcaattcaagatctcctcggttgttgaaaaataactctcgaaaccactactaattcgcactcttcaccaaactaatagtattgaaattaatattgtttcatggttacgttttagaactaatctacagttttaactttgtaagaaatgtttactttccacaaagctcttatttcatttattttcggttttgttgtcttgttattgttgttcttttgatgtaaagtttcaatttgagaataaaacaaaacataaagagacatcccaacaaaccgattgggaattcatacatacaaacttaaatgccttcctgttgtccttttttttatttttaatttaaatacttttagtttaaaaactatataacccaagtgatgttcgtccatcaaaggaaaagtaacaactgcttgagaaatttaaaagttcagatttcaaaattctgtgaaaacaaattcgcgcactgataagaaatatagcggaaatatacgcaaaggaatttttttggttgacgataaaacaatagtttcttgccaactaatagttaacagaagtgtgttgcttatcatacaatatccatatataagcgataaatttccaaaacctgggatgcttttatcataattaataattaattttaattataattattattagaaaaacgctcctatttattttctagctttctgtccagatttcggcacaaatacataaaaaagcaaagcactatgaaaataataccatataataggcacatggcaaaattgtttcggtgtcttccggttttggagttcggttcgagtgagttcattattcattgtgccgcctgtgctggccatcgaagtaacaacccaacatcaccacatcacttgaaggcgtctccggatttcaatgtttggacaccgagttccggaagaatcggggcgatggacggcggacggtgaacgatgggcgatgggcgaccggcgtcgaattagcatatacattggaactatgcgatatagcgtcgactcggatagccagccagaaatagtagtaataatacttttataataagtgaagctgttccgttgtcgactgacgactgacgacgatgacgatgacgatggcgatggcgatggcgacgctttgctatgcgaaggtcacacaaccagccggagccgcatataaagcaccacagctccatggagtgacgataacgaaagccagacgaaaatcggggggaaatacatagttagtgtgggcgttgtagaagacgagtaggcgctaccagaagaccagaagacgagggagaagaatgcgaagactaatcgcaaaaatgatcgaaagaaatttccatagaataaattaatcaaagtgatccgcaatgcaaaaaaaaaaaatatttatatatatataaaacaaacggaacttatttattcactcgctcaaagcccataaagtcaaagcccatggagcgattgctgcgatagtatttctgaatgcttactaacctaaaaactcgttttgatctcctagccgcatagtcagttatttgtttaaaacattctaggcaaagcaaatggatcgagtttgagcagtttcttcagaaagaacgcttttatgggcccgctaatcatcacatttcatctatgatcgttcgatcgattgtaaaagaacacaacgtaaagttcacatcttaagtgaaattccgagtatatcaacagataacttattacaataattcaagtgaaatagataagggatatgaccgtgtatctaatctaatccgcacatttaaaaccaaacttcctgtcacatattaaaacaagatggtacgaagtcttttttttttttttttttgaaaacaaatttatccgacgtaagaaaataatggtcaatggttcaagcgttggatttgtaagatccgcatggctagttatgatagtatttttatacttttggtgatttttgattgcaaaagcaatgctttcttctggtatcccgctgaatcccaatagtaagattcgaatagataatactgccgtatttgtatctttgccgtgttttatagctatatagagttga

SEQ ID NO: 39308 - DNA, 4099 bp, DROSOPHILA
aacagcttcacttattataaaagtattattactactatttctggctggctatccgagtcgacgctatatcgcatagttccaatgtatatgctaattcgacgccggtcgcccatcgcccatcgttcaccgtccgccgtccatcgccccgattcttccggaactcggtgtccaaacattgaaatccggagacgccttcaagtgatgtggtgatgttgggttgttacttcgatggccagcacaggcggcacaatgaataatgaactcactcgaaccgaactccaaaaccggaagacaccgaaacaattttgccatgtgcctattatatggttactatcagccggctggaccgctgatatcgccgcatgtgatcgccgcacctccgccgcctgcgcaagtgaagaagctgcaggaggaggacggtcccgtttcagccgccggttcgcccacgcagctgcaacagcaacaggcggccgctgaagccgccgccgccgccgccgatcaggcggcagcccaatcccagtcacagtcgcagggccaatcgcacggtcacgcccatagccacgcccacaatccgcaacaggcgcagcatccgccgcaaccacagccgtatccggccggcgccgtggcggccgcagcagcggcagccgccgcccaccagggtgtgccctactcccgctcgatgcacgcggcccagatgcactactcgaccggctatccgcccaactactacgctccatatccgggcgaggtcatgtgctactcgccgcccacctacccgccctacttttcgagcaaggtctatcagccgtcgcatcccgctcatcccgccgctcatccgcagggtccgccgccgccgggcgcctatcgccgttacccctactatcaacacgcgggtccgccgccgccgcacgagctctacgaacagcaaccgcccccgccgcccgtctcatccggatcggtgtccgggccggcgcagcagcagccgcccactagcagcccagcatctgttggcgcagccggagcaggaacagcgggagcaccatctggcagccagttggtaccggcccatcagcaacagcaccagcagcagcacttggagcactatccgggaccgcctagctactacgccggatacagtcccggcggaggagcatccgccggtcagtgctacacgcgtggactgcaaggaccgtatatggaatatccaccgcagtgtccctgcccaatgcctcaatcgtgtccaaaaaacgtccatactgggcctcatattggtagcaacatcatcagcaacatcgatcagagcagcagctgcagcagcagtatgttgctgagtgccacgagcaacagcaacatcggcggcggcagcagcagcagcagcagcagcagcagcagcaccaccttgcctgcctgcagcagcgctacgacaacaactacagcgtcagcgttgactaccagtagaggcccagtgaaaaatgtgacccccaacaacagcaacagtagcggccacaccagcaccaacagttgcaggagcagcaacaacagcaacaacagcagtaacagcagctgtcagacgattgagatgacctcatgggcaacagcagcaaccaacacgacaagcacgacggcgacaaccgccacaacaggcacccagtgccagatgctggtgaagacggagctgaagggcgagaatcctcaggttaccaaaatgcagtacgaggcgcacgtaatgccgccgcccactccgccggaaagctattgtgccagtgacgagaagctgctcgatgaccaggagcaggaggccgagctggagctccgcctgcgtctgggattgggcctggagaagagtcacggtgggcagcagcacatcgaggcgtacgatctcacctgtagcaccccgcccccagtcaccgtgccccaggcagcagcagtgccgcgcaaggcgagaattggcaagagcatggccagggaaatggtctatgctgcccagcagcagctgcttccggagaagcagttgaagcagccaaaggaggcggctgcgaaactagaagcggaaccagagatgcctttcgtacttaaagcggaaatcaaagcagagaccaaaatcaaaatcgagcacgacggcgaggcgcaggccagcacacatatcagccaactgccggacctgaagcccaccatcaaaacggagccagagcaggaactggagcaagaagcggcatcagtaccgtctgtggccaaaacggaaccgcaaccagaagtggaggtcgagcgggaacaacaggaaccgccggttgacgaggagcaacagcctacgccaggcggtagcaagcaacgcttcaacctgctggccttgtccagcggcaacaaaaagacgaaaacaaacaacagctacaagagcctgatcaagcaggcggagcccaagagttacctgtgccccggtcgcaggttcatccgtcgacacggacgtgctccggccaaatatgtcaaacggcgtcagatgattctgacgcagcggcagcagcagcgaatgcgtctgcaacgccgcgagcaacagcagcaacgtcgccagcaacgcgaagcggctgcagaagtagttgcaggagctgttgtcaccccatctctggcaggaaaccccatcgagcaggcaggatcagaagtttccatcgttaaagatcaagcacccaacagctcggccacgccaagtgcatcgccgaaaagagcacgcccccggaaacaggagattgctgctctgcatctgctcgaaggcttggatacgacgctgagtcgtggttacttcagtgacccggaactgaatcacagtagtcgcaagcaggcgccgacagctgtgggtgggctgtatgccgcgtcctcgccgctaactacggcgaccgatcacaggggcaaacagacgactgccgagaagcgctccaagtcggagaccaagaagccaccgtcgggcgaaagttccgagtcaggtctgccgtgcaagaagccgcgcaaagagcctgctggcaaggtgaagggtaagggcaagaagacaacggcgggagcagcagcgacaacaattgcgtccacagctgaaactcagacggaggccgtaaatgccatcactgcatccaaccaggagacgaacaacaacgagtatcagacggcagatctgcaggctcaaaagttccgtgagtgtccggccgtcactgatgcaaaagtagcgggaacagcaacatccacatccacagcctcacagcagcagaaccagcaacattccgacgagcaacaccagttcctggtgcccagtcagccagcgacggccagcgccaccgctgccctagcagccactcctccgcccagccgtcaaggtcaggcgacacacacaaagcggaccagatcgcgctgcaagttcgggaatcgaaagcgccaaagacacagacctggcggcgtaagctacgagctggatgtgacccagccgccggccaccaaggccaatgtggtgcccaagtggaacaatggatggatgtgggccggcaaggcgttccagggtgctgtctttctcaatagcgatgatccgctggtgctgcgcacctgctacccggccatgcggcacgtggagggcgacattatccgcatcagggactgtgtgctgctcaaggccaacgaggacaatgagctgccatacgtggccaaagtggcgcacctctggcagaatcccgaggacggcgagatgatgatgtcgctgctgtggtactaccgacccgagcataccgatcagggacggcagcgcaacgattgtccggacgaggtctatgcctcccgccatcgcgatcacaactcggtggcatgcgtcgaggacaagtgctacgtgctcaccttcagcgagtactgcagatatcgtcgccgcctacgtgccgccgaggaggatgtggaagacgtaagcattgtgccgcgtcggccaagcattgccaccgctcccgggtttccagtgcgaacggtgccggaacacaccaatccggagctggtgatgttctgccgccgagcctatgagttccggacgcgacgtctgctcaagctgccccataagaacgggctcgtgtgcagctccagctag

SEQ ID NO: 39309 - protein, 1262 aa, DROSOPHILA
MCLLYGYYQPAGPLISPHVIAAPPPPAQVKKLQEEDGPVSAAGSPTQLQQQQAAAEAAAAAADQAAAQSQSQSQGQSHGHAHSHAHNPQQAQHPPQPQPYPAGAVAAAAAAAAAHQGVPYSRSMHAAQMHYSTGYPPNYYAPYPGEVMCYSPPTYPPYFSSKVYQPSHPAHPAAHPQGPPPPGAYRRYPYYQHAGPPPPHELYEQQPPPPPVSSGSVSGPAQQQPPTSSPASVGAAGAGTAGAPSGSQLVPAHQQQHQQQHLEHYPGPPSYYAGYSPGGGASAGQCYTRGLQGPYMEYPPQCPCPMPQSCPKNVHTGPHIGSNIISNIDQSSSCSSSMLLSATSNSNIGGGSSSSSSSSSSTTLPACSSATTTTTASALTTSRGPVKNVTPNNSNSSGHTSTNSCRSSNNSNNSSNSSCQTIEMTSWATAATNTTSTTATTATTGTQCQMLVKTELKGENPQVTKMQYEAHVMPPPTPPESYCASDEKLLDDQEQEAELELRLRLGLGLEKSHGGQQHIEAYDLTCSTPPPVTVPQAAAVPRKARIGKSMAREMVYAAQQQLLPEKQLKQPKEAAAKLEAEPEMPFVLKAEIKAETKIKIEHDGEAQASTHISQLPDLKPTIKTEPEQELEQEAASVPSVAKTEPQPEVEVEREQQEPPVDEEQQPTPGGSKQRFNLLALSSGNKKTKTNNSYKSLIKQAEPKSYLCPGRRFIRRHGRAPAKYVKRRQMILTQRQQQRMRLQRREQQQQRRQQREAAAEVVAGAVVTPSLAGNPIEQAGSEVSIVKDQAPNSSATPSASPKRARPRKQEIAALHLLEGLDTTLSRGYFSDPELNHSSRKQAPTAVGGLYAASSPLTTATDHRGKQTTAEKRSKSETKKPPSGESSESGLPCKKPRKEPAGKVKGKGKKTTAGAAATTIASTAETQTEAVNAITASNQETNNNEYQTADLQAQKFRECPAVTDAKVAGTATSTSTASQQQNQQHSDEQHQFLVPSQPATASATAALAATPPPSRQGQATHTKRTRSRCKFGNRKRQRHRPGGVSYELDVTQPPATKANVVPKWNNGWMWAGKAFQGAVFLNSDDPLVLRTCYPAMRHVEGDIIRIRDCVLLKANEDNELPYVAKVAHLWQNPEDGEMMMSLLWYYRPEHTDQGRQRNDCPDEVYASRHRDHNSVACVEDKCYVLTFSEYCRYRRRLRAAEEDVEDVSIVPRRPSIATAPGFPVRTVPEHTNPELVMFCRRAYEFRTRRLLKLPHKNGLVCSSS

SEQ ID NO: 39310 - DNA, 6556 bp, DROSOPHILA
acattcgctggacaaaaagatgaaccactacctaaaattcgtagatcaacaacgactgtatatataaacattattattatacgtaaatgtacttcttataatttttttaatttttttttttagtaagtgacttatccgtacatcataatattatatcttaacatcacagggtggagaaatattcctaagaattaccaaacacttaatcaaaataagtgaagtgaaaaccgtttaagtcgtctcagaggtagagcggggataaggcgacttattataataaaaaatacaattttaaaagcccacaaaagaaacattacacctttttttcccctgtgtaagcaatacatcttgtcgccgaccgccgaaggcgaaaagatgcgcgaaggatataaagcaatggatttgcggaaggaagccaaaggacatcgccaatccgcactcatctgtgcgcctatttaataactaatttcatccacagactgctttcgcaaccccaacgaaacttcctccttcgtcaaaaaaaaaaagcctccgaatatccgaatattgtttgctgctgctaacttttgccggtaagaactagatttttcccccattgttcagcttgaattgaaatcaatgacaattctggaagcttcttggctataacaaattgagttgggcaacgcaaagtctcatcgatttttcgactacaaagttgggggaataattaaaaacaaccagcaaaaagtttcttagatgatgagtatacagatgagtatacttaatccaaactataaatgtaataatactgaattttcattactgataggaaccactgatttcgaataaatacattttgaacttcaatcatgtacctgttgttttttatacccgttactcgtaaagcaaaagggtatactattatagattcgttgaaaagtatgtaacaggcagaaggaagcgtttccgactatataaagtatatatattcttgatcaggatcaatagccgagtcgatctagccatgaccgtctgtccgtatgaacgtcgagatctcaggaactataaaagctagaagatcgagattcagcatacagattctagaaacactttgaaaaatgtgttgacattttttgacatttgtattagtcttgtaaatttctatcgctttgcaaaaaaaatatgtttgccatgcccactataacgccctaaaaccgcacaaacctgccacgcccacatttttgaactgagtaacgggtatctgatagtcgcagcaactcgactatagcattctctcttgttttatctagcaacagcaaacaaaaatatttcaattcgaattattatttatacacaaattattgctaaatgacatgagagtaagaaattaagaaatttcgcttatttccaaaaacaattgtttgaaacccttcctttttggtttgttttactcgaacaaacaaaacagcccaacgattctaagtttacttagaaatatataggatacatacatatgtataagattataaaaccacttaccactgggatcgtgatgcggtggcccaactcctgggcccggctgctggtgctgatgctggtgatggtggagcggactgggggcgcagaaggcgctcgacccgcctcccaaagtgggcggcggcatgccgacactggacggcggcggataggcgctggctcgataggatggcggtggagagccaacatcacagcgctcgggcggcacggtcaccgtattgggcacggccactggcaccggaacaggtgcacccggcggcggtccatagtggccctgcggtggcggaccgccatagtgatgcggtggcggtggtggtccgccgtggtattcggccgcctgctggtagtgatgtgcgtgggccgcgtgggcggcatactggtgctggtggtgcatgtgcagcactccgccgccacctggcgccagctggtgggcgtggtaggcggcggcggccgcggcagctgctgcagcagctgcgtacgagggcggcggcggtccgtggtgatccggcagggcgtgctccgtgtgcaggccgagatcgggggcgtgatacatgccggcgctgaggtgctcgccgggcaataggacatgcggccccgtcggcgctgcatggacaggcagcggcggcgaactgtgggctaatggagcacagggaatatgaggcattaggagtgggtacatatagagggaaggaagtctaaggacatgcaattgattgaaatatgtgaaataataaatttatcacagttttgaagccacaaagattgatataattgtgcgacaatgttttctacttggaattgaagattacttgctcgaaagattacttaaagtattcaacgttagttggacttaccttcgctgagtccggagctggctcccggcggcagcatgctggagagagcgctgagcggcgtgtaggacttgggcggctccacggagcccgggcgcaggacgcgctcctcggtgacgctcgactggacgcggtactgcatcttgcagtaggcctcctgggcggcgccattgctggcgttgacgtagacgccggtgatggtgacgtccgtgtcctggacaatgacgaccgacgaggaggtgggccggctgcaatccttcgcgtccttggtgctggccgccgagtcgcggtagccagtggtggtaatggtggtgtccgtgttggtttccttggtctccttcgagtacttggagtcgttgctctcctcgatgatcgaatggctggacatcttgccgacggtggagtcctttagctcgttatcccgctcacgcctgcgctcgctctccctttcgcgttcccgctcgcgcagagattccttggactctttgggctcctttttgatgtggatcacctcggttttgatagctgccgcagatgtcaccttgctggtggtggttggcatggtgtccagctcgtcgtagctctcgaaactgctgcaatcgctggccaaattcttgtccaagtgacgctccacctcgtaggtggccgccacaatggcgctggcattcaggctggccatgcgctttctggccaggatgcccttgtagtcgccgatcagctcctcggtgaaggccgtcttgcgcttcttgggcagctgcttgggtggcttcggcttctccttctccttttccttctccttggcctcctcatcgtcgctctcctcgacctggaccgacttcttcttccgcttggcgtccgtttcgctggacgcgaccttcttgggcggcgccttcttgggcagcttcttcttcttgactgggggcaaggtctgttggagctgcagttcctcggtctcgctgtcgctgtcgaactcccaatgcttgcccactcccctgcctccgggcacgtagcgcaattccctgcgtggctccgcctccttgggtggagcaatcggcgcggctggaggtgcagccgatgtgtgcggcggactcacggatcccttgtccctgtccgtgtccccgtgacgcggcgagtccttgtggttgtcgtcgtcactcccgtccagcgtgcgaatgcgtggcggctgctgcgtcgccttggacaggcccagctcatgggccgtccgggattcgttctcgtacagacactgcaccttggccagcgcgttgagcgacgccatccggtgtcgcttgggcccactgtaggcactcagctttcgctcgtcctcggaggagctgctctctgcggagctgccgctgggaggaggctccttcgctgcggcggcctttcccttgcccaccgtcttcttcttgcgccccgcactggagggcattggagtggctatcttccgcttggcttgctttttaaccgacgtaatggaggtggtgctggtggtgctagtactggtggtgtgctttgctgctggttcggactgctgtgcgttgcttaaaggatctacgtctttttctttttccttctccttctccttggacttcaccttcacctccttttcggacggtggcttctcctccttcttgaccagtggctgctcctcctcatcctgaacctgaacctttgttttctcagcctgccgctcgaacagctttaatggcttattatcctcatctgagaactcgcgcagctccttgagcgacggcagcaccatcttgatcggctcctcgtcttccgatcccgacttgaagtcgtatatgtccttggctccgctccatgaggcagccggtgccttctggttcagcgcctgttgcatgcgacccttcgatcccgccgatgtcttcgtgtacttcaccttcggtcgctgtttgggtgctccccctggtggtggcggcggtggtgcgggttgccccgctgcaatggcagtggatgagggagtcgaggtgggtgtaggcgtgggcgtgagcgtcggcgtgggagttcttgtccgtgtggccgtgggcgttggcgttagcgtgggcgtggctgtgggtgtcggtgtcgccgtgggcgtggccgaaggcgtcggcgtcaccgtgggcgtactgacaatctcctccagttccatttgcacagattccgtatttgagtcgggcaaacgggcagtgctcttcaccaagttggcttcctttttcggtttgcccattttggccagcttggatagctccttttttggcatctgctctgaatgggctgatttcttgccaggattctttgtcgatgtatgcttggaagtggaagcggagctgggtgctgacgtagctgcggaagttgtcgttaaaactgtcgcctgtactaatgatgactccaccttggccttcttggcctgctgcaccgtcttcttgggcacctttgaggcaggagactcctctggagcgggaggcggcgtgatctgctgctccgccttcggtttctccttatcgagtaccttttctgccggcttctccgcaactttttctctaactggctccggtgagggacgcactcgctttacaggcggcatcttgccgggattcaggctggaaatcaccttgaccgccgctgcgcgcgacttggtcttgacattctccgaaatggaggacttcagcacgccgtcgttgagccgctcttcgccgctaggcagcaggttgtcgaagccgtggatcttgatatccaggctcttaagcatcttgttaatggcccgcgccttgccatcctcgtgtcgttcctccggcgacaatttaaggctgttggaagcagatgcagatgcagatgcggacggggcggttgtcgaggatgtggatgatgtcgtggtggaggtcgtttgttttccgcctccatttccagcaccaccctcagtggtggctgtggacacgcccgatgatcccgttggatccttggccggcttcttggccgccgaatctgttttgctggctgacttcttgtcatccgcctcgtcgccgccgccaccggaggccttcgtctgtttcccgggccgcttcttgccctgcgtcgaggacgccgtcgctgctgcggcagctgctgctgccgccgctgccgcagttgccgtcgaacgctggacacgctcggcggcattggagcgcttcttcgagaccatttcgtggggctgtgcgggaaagaggagcggtaaacgagggaggttaataaatgaagtatttcgagaagagaccaagaaacaagggcctgcctcctacacattcactttcgtttgccccccccccccccatcctttctgctccgtggtacatttcagttcggttccttgtaattcagctgaagtggccgcacgtgacaaacaatgggaacgccagctacgaaatgaaaatggaggcggagtgccagagaatgcatctcaactcgaaactgtcggttggaacatggagtatttagagtacccatcacttgctgttcttattttcaaataaaagaatgaattgttttatatcgatttggatttatttactcgacttaaagataatcggctggacctagaaggttttaactgaaatgcagaacaatttagatttgacctttactaaccttcaaactactaacctatatattgtacatatgtaaacgcatttacaatgtttgaaaagctttcgatacgcaattatgcgacatataatatatataatataatataaaaatataatataaaaatataatataaaaatataatataaaaatataatatatataatataataatatatatatataatcataattacaaaaattactatgcacatcatattgcacatcgcgaaattctattatttaatcaattgttttgaaggagtaataagtatgcaattacaaaaagtatttatttcaaattgttttattttacaggactcataaaaaactcactaaactcattaaaatgcattctccaatttaaatgtttgctatttcttaaaatttgctttatcttaaaatataaataaataaattcgatgcaaagctaaaccaaattatattcttaaggacttaaaagaatgacatactagaaatattcattgaaaaattcgtaacggataaaaggaaagttaaacatttttcattgttccgaagcgtggaattatttaaaaaac

SEQ ID NO: 39311 - DNA, 3870 bp, DROSOPHILA
atggtctcgaagaagcgctccaatgccgccgagcgtgtccagcgttcgacggcaactgcggcagcggcggcagcagcagctgccgcagcagcgacggcgtcctcgacgcagggcaagaagcggcccgggaaacagacgaaggcctccggtggcggcggcgacgaggcggatgacaagaagtcagccagcaaaacagattcggcggccaagaagccggccaaggatccaacgggatcatcgggcgtgtccacagccaccactgagggtggtgctggaaatggaggcggaaaacaaacgacctccaccacgacatcatccacatcctcgacaaccgccccgtccgcatctgcatctgcatctgcttccaacagccttaaattgtcgccggaggaacgacacgaggatggcaaggcgcgggccattaacaagatgcttaagagcctggatatcaagatccacggcttcgacaacctgctgcctagcggcgaagagcggctcaacgacggcgtgctgaagtcctccatttcggagaatgtcaagaccaagtcgcgcgcagcggcggtcaaggtgatttccagcctgaatcccggcaagatgccgcctgtaaagcgagtgcgtccctcaccggagccagttagagaaaaagttgcggagaagccggcagaaaaggtactcgataaggagaaaccgaaggcggagcagcagatcacgccgcctcccgctccagaggagtctcctgcctcaaaggtgcccaagaagacggtgcagcaggccaagaaggccaaggtggagtcatcattagtacaggcgacagttttaacgacaacttccgcagctacgtcagcacccagctccgcttccacttccaagcatacatcgacaaagaatcctggcaagaaatcagcccattcagagcagatgccaaaaaaggagctatccaagctggccaaaatgggcaaaccgaaaaaggaagccaacttggtgaagagcactgcccgtttgcccgactcaaatacggaatctgtgcaaatggaactggaggagattgtcagtacgcccacggtgacgccgacgccttcggccacgcccacggcgacaccgacacccacagccacgcccacgctaacgccaacgcccacggccacacggacaagaactcccacgccgacgctcacgcccacgcctacacccacctcgactccctcatccactgccattgcagcggggcaacccgcaccaccgccgccaccaccagggggagcacccaaacagcgaccgaaggtgaagtacacgaagacatcggcgggatcgaagggtcgcatgcaacaggcgctgaaccagaaggcaccggctgcctcatggagcggagccaaggacatatacgacttcaagtcgggatcggaagacgaggagccgatcaagatggtgctgccgtcgctcaaggagctgcgcgagttctcagatgaggataataagccattaaagctgttcgagcggcaggctgagaaaacaaaggttcaggttcaggatgaggaggagcagccactggtcaagaaggaggagaagccaccgtccgaaaaggaggtgaaggtgaagtccaaggagaaggagaaggaaaaagaaaaagacgtagatcctttaagcaacgcacagcagtccgaaccagcagcaaagcacaccaccagtactagcaccaccagcaccacctccattacgtcggttaaaaagcaagccaagcggaagatagccactccaatgccctccagtgcggggcgcaagaagaagacggtgggcaagggaaaggccgccgcagcgaaggagcctcctcccagcggcagctccgcagagagcagctcctccgaggacgagcgaaagctgagtgcctacagtgggcccaagcgacaccggatggcgtcgctcaacgcgctggccaaggtgcagtgtctgtacgagaacgaatcccggacggcccatgagctgggcctgtccaaggcgacgcagcagccgccacgcattcgcacgctggacgggagtgacgacgacaaccacaaggactcgccgcgtcacggggacacggacagggacaagggatccgtgagtccgccgcacacatcggctgcacctccagccgcgccgattgctccacccaaggaggcggagccacgcagggaattgcgctacgtgcccggaggcaggggagtgggcaagcattgggagttcgacagcgacagcgagaccgaggaactgcagctccaacagaccttgcccccagtcaagaagaagaagctgcccaagaaggcgccgcccaagaaggtcgcgtccagcgaaacggacgccaagcggaagaagaagtcggtccaggtcgaggagagcgacgatgaggaggccaaggagaaggaaaaggagaaggagaagccgaagccacccaagcagctgcccaagaagcgcaagacggccttcaccgaggagctgatcggcgactacaagggcatcctggccagaaagcgcatggccagcctgaatgccagcgccattgtggcggccacctacgaggtggagcgtcacttggacaagaatttggccagcgattgcagcagtttcgagagctacgacgagctggacaccatgccaaccaccaccagcaaggtgacatctgcggcagctatcaaaaccgaggtgatccacatcaaaaaggagcccaaagagtccaaggaatctctgcgcgagcgggaacgcgaaagggagagcgagcgcaggcgtgagcgggataacgagctaaaggactccaccgtcggcaagatgtccagccattcgatcatcgaggagagcaacgactccaagtactcgaaggagaccaaggaaaccaacacggacaccaccattaccaccactggctaccgcgactcggcggccagcaccaaggacgcgaaggattgcagccggcccacctcctcgtcggtcgtcattgtccaggacacggacgtcaccatcaccggcgtctacgtcaacgccagcaatggcgccgcccaggaggcctactgcaagatgcagtaccgcgtccagtcgagcgtcaccgaggagcgcgtcctgcgcccgggctccgtggagccgcccaagtcctacacgccgctcagcgctctctccagcatgctgccgccgggagccagctccggactcagcgaagcccacagttcgccgccgctgcctgtccatgcagcgccgacggggccgcatgtcctattgcccggcgagcacctcagcgccggcatgtatcacgcccccgatctcggcctgcacacggagcacgccctgccggatcaccacggaccgccgccgccctcgtacgcagctgctgcagcagctgccgcggccgccgccgcctaccacgcccaccagctggcgccaggtggcggcggagtgctgcacatgcaccaccagcaccagtatgccgcccacgcggcccacgcacatcactaccagcaggcggccgaataccacggcggaccaccaccgccaccgcatcactatggcggtccgccaccgcagggccactatggaccgccgccgggtgcacctgttccggtgccagtggccgtgcccaatacggtgaccgtgccgcccgagcgctgtgatgttggctctccaccgccatcctatcgagccagcgcctatccgccgccgtccagtgtcggcatgccgccgcccactttgggaggcgggtcgagcgccttctgcgcccccagtccgctccaccatcaccagcatcagcaccagcagccgggcccaggagttgggccaccgcatcacgatcccagtgcttttatagttcctgagatctcgacgttcatacggacagacggtcatggctag

SEQ ID NO: 39312 - protein, 1289 aa, DROSOPHILA
MVSKKRSNAAERVQRSTATAAAAAAAAAAAATASSTQGKKRPGKQTKASGGGGDEADDKKSASKTDSAAKKPAKDPTGSSGVSTATTEGGAGNGGGKQTTSTTTSSTSSTTAPSASASASASNSLKLSPEERHEDGKARAINKMLKSLDIKIHGFDNLLPSGEERLNDGVLKSSISENVKTKSRAAAVKVISSLNPGKMPPVKRVRPSPEPVREKVAEKPAEKVLDKEKPKAEQQITPPPAPEESPASKVPKKTVQQAKKAKVESSLVQATVLTTTSAATSAPSSASTSKHTSTKNPGKKSAHSEQMPKKELSKLAKMGKPKKEANLVKSTARLPDSNTESVQMELEEIVSTPTVTPTPSATPTATPTPTATPTLTPTPTATRTRTPTPTLTPTPTPTSTPSSTAIAAGQPAPPPPPPGGAPKQRPKVKYTKTSAGSKGRMQQALNQKAPAASWSGAKDIYDFKSGSEDEEPIKMVLPSLKELREFSDEDNKPLKLFERQAEKTKVQVQDEEEQPLVKKEEKPPSEKEVKVKSKEKEKEKEKDVDPLSNAQQSEPAAKHTTSTSTTSTTSITSVKKQAKRKIATPMPSSAGRKKKTVGKGKAAAAKEPPPSGSSAESSSSEDERKLSAYSGPKRHRMASLNALAKVQCLYENESRTAHELGLSKATQQPPRIRTLDGSDDDNHKDSPRHGDTDRDKGSVSPPHTSAAPPAAPIAPPKEAEPRRELRYVPGGRGVGKHWEFDSDSETEELQLQQTLPPVKKKKLPKKAPPKKVASSETDAKRKKKSVQVEESDDEEAKEKEKEKEKPKPPKQLPKKRKTAFTEELIGDYKGILARKRMASLNASAIVAATYEVERHLDKNLASDCSSFESYDELDTMPTTTSKVTSAAAIKTEVIHIKKEPKESKESLRERERERESERRRERDNELKDSTVGKMSSHSIIEESNDSKYSKETKETNTDTTITTTGYRDSAASTKDAKDCSRPTSSSVVIVQDTDVTITGVYVNASNGAAQEAYCKMQYRVQSSVTEERVLRPGSVEPPKSYTPLSALSSMLPPGASSGLSEAHSSPPLPVHAAPTGPHVLLPGEHLSAGMYHAPDLGLHTEHALPDHHGPPPPSYAAAAAAAAAAAAYHAHQLAPGGGGVLHMHHQHQYAAHAAHAHHYQQAAEYHGGPPPPPHHYGGPPPQGHYGPPPGAPVPVPVAVPNTVTVPPERCDVGSPPPSYRASAYPPPSSVGMPPPTLGGGSSAFCAPSPLHHHQHQHQQPGPGVGPPHHDPSAFIVPEISTFIRTDGHG

SEQ ID NO: 39313 - DNA, 9087 bp, DROSOPHILA
tggccaaccggtctatcttcgccatcaggctgccgagctgtgcgattcgctggctcgcaatcacctgcgtgatcaactggttgcaggtaccacagatgtggacattgggttggtcggacgctttagtggactggtgctgctgctgctgcacgacgacgcggagtgggtgcgtcatcgggctgtccagctggtgtgcggcgctggactgcggacgaggagtggggctggacaggagcaagagcagtctgccatggcgccactcatcctgcccagtgccttgataccaccattcttggacaccatgatcggtaagctgaccttcgatgacttcaacatggtacagcgcctggttgacatcatcgctgagcccttcactaccgccgatgcaatggagctgttcgacaagcaggagaacaaccattactgcgaaaggaaccacgttttaaccgagctatgggacgctcgtggacgagcagatccacgtgcaagaacaccaacaataccgacggggtatcaaatatttaagtgacgatcgcacatttaaaacatatgtattaaatgtacaaaagtttttaaatcagcaaaatgttttacttttctattggctatgtgatagtcgatcgttttctattctatgatattaagaactctacatgcgcacagatgcaaacattcttgagtatctgatagtctatcattttctattatatttgaagttaagtggatgtgtaaactggctacaattgatgttgtatttatgggtttacttaagatctctccatgcgcacagctacaaactgcctgtggctgcattaatgggtaactgatagtcgagcaaattgtgcattctattgccatattttgtgagtgagtgccgaattagagggagacagactacaatgtcattgcgtttgcaaatgaaaaagcaaccaccaatcgttttagaaaattaacatttttttattgatatataaaactaaacatatcgcttggccaccgcctacgaatcgaagctggaattgacatcgttggcagtgatgggggcgaactggacgagcgccttaatgcgtcgcagcagcgagccattgaagcctttgcacttaatcgagtaatcctcgctggcgttgattagctgcgtgcagaatgtctcgttgaatgtggagatgagcagctgcttgagctgcacgatctcttcctgcgaggcgttcagcacggacatgtcattgtcgtcgtccatgttgctctcgttgatggcgttcctgttttcgttggcgtagtcgatggtgttgcgcagatagaagtccagatggatccacagcagatacagattctgctcggcaatgaagacggcctgcctcagttcgctgcgcttctcgttgtatcgctggctcagttctatgtagctttgtttacctggttgattggtacaaatggatcagccaaatgtggaatgcatcaatgctaaatgctaaatgccaaaatcaaggagaacttaccgttgggcccaaagctgatgttgggcagggaggcgcgttgctggaggagattgtcggcgatcgacttctgcgaaaggtagtagccgatggagcccttcagctgattgaggatggtgtgcatgatggtcgtcagctttttgctggacattttgccagtgcttcaaggagaattaaatcgatgctattaataatcgatggctatacaattaaatataatgggcgatggacttacagcagcgttacatcattgatcacggtggtcagcaagtatttggaggtcatgctgtccttcgaatggctggtgaccacgttgcggcagtagagcgacacgttggctgctatatccagaaaatacttgacacgtagcctcttcgagtcatcggtggggttggtctgctgctcctcatcctgctgcagcatgcgacgaatggtgggctcgcttacgcaaaagcgtccgaacaccacgatcatcagctgctgcacgcggcccaggcgatttcgcaaatccagctgcacgctatcctccagcgcggtcaactcgtgcgtggaggcgcgggcaaacagattgctaatgaccgccacctgctgcaggtggccgaggtccatatacggcgtggccgagcgcaacatggcctcgaccatgtcgatgtgggcgaacagaaagttaagcacctgcacggcggcggagttgttgcgcggacccagcgagttgacaatggcatcgcagaggctcagcgccggcaggaggatcgaccggaagcggtcatcgatggacgggaggaaggtctgcggctcgttacgattcagttcgctggacttcaggtcgggctgctggtcatagaccttcatattcgaaagcacgcccagcgcctgctcggtgaggaggagccgggctcccacattgctgttcgccatgcgcgtgaggaaggccatgcgcgactcgtagacgtagagcggcctcaggtgatccggcacgggctgcagaatcccgcaaagcgccgtactggactgatcaaggctttccagtatgtgcttgaggtagccacgcgatgccacaaagtcgcatagcgtgctcaccgcctgcagctcggagatcatgtccaggcaggccagcgccagcatgcggcacacatcgtggccggtcaccgcatcgtggcagatggtgtcgatcagcttctcgccgaacgtgccaatcacttccgccgccatggccttcagccgcaggcgatcgtcgcgccgctgctccttgttgtacgtgcgtgcactctcctggcgcgaaatcaatctgcaatgaaatagaatgaaagctacaactgcctgctactgctgttgagaaggatacacttacgtctcctggtactccagatgctcgtcggtgcgcagtcgcttcgcgatccgcaggcaattcagcagcgaactgtacagattgatgcgcagcttctgcgacttcacctcactgatcatgatccactggacgaggttcttgagaatgaatcgcagattgctgctgttgccaccggaaccgatatcccgtccacctccactgccgccatccgaaccagttccgattgccctctggcccagacacaatgcgttcacctgcgaatcgttgccgatggcgttgccattgccattgctgagcgaatcctcggcggccagatcctcggggctctggtcctcggcctggtagcagcagtagcgcaaattggcaagcagcagcagcaccgtctcgctcacctgtacggatatctcgatgatgggctgtatgggctgcaccttgatgagtaccttctcgacgatatcgatgatgtgctggcgacgctgcgtcgccggaagcacggcatcgggcatgttgctaaagagcacctgcaccagttgaccccatgctgccatgaaggccagcgtggcgcagcgctgtgtccgcacgcgatttatgttgacggcgtgattgagcagcagcatgatttccgtggaaatggccttccgctggccgctggcaatgatgctctgcaccatgtacagctcgtcggtgagaatgtagtacagtttgcgcacgttgatcaagttggccctggaattggcgccagcttcggcggatgcctcgcagtcgcgcagcagttgagtgatcagatgcccgtcgaagaactccagctgcggctggctcaacgtgcccgcctccaggacgagaatatctagcagtcgggtgacatgcagtccctgcgatgtctcctgcagcagcgatggcttaagtgatttgaccccagtgtttggagctccgagagacgccgaaccagccccatgtgccacggcacttatcgatccaccggccggtagcacatccatggcgaggaaagacgacgacggctgtgaaatcaggctgtggcccaattccatcgacaggccatgggatgaacgctccattccgtttccaattagcaaaatgtcgcacatctggttgaagcgcgtcatctggccatgtttggccgccagtttgacatcgatagagacgcagttgagcaggtggcccatggcgtgcagcacatgatcctcgcgatgctgccggaagggcagcgagcgtaggtgacgcagcaggaagtcgctgcacgttagccggaagtagcgcagtatcgtctccgcggtgcggcgattggcgcagagtccatggaacagatggtaaatgcgctccacgattctcgccgtgtgctcgcagtacttatcgctgtgacgctgtttctgcaatatcagagattgatttgattgttaaaagttggtaagttagttagttagttagttagttagaatagatagtaatggccaatggctttcaactcacatccatgtacttttccagcaacagcactacggagttcacgcacgagctttgcatctcgatggccaggtgctgccgtccgttggccataaattcgcgcagcacatccacgccgagcaggaagtacacaaagttgggcaactgctggctaagattcatctcgaacagcttgataatggcctctttcagttgcagctcaatgctagccggtttgctctccagcgcgccatcccccgcctgcagctccagttgcgattcaatagttgaatattcgcgttccccgctcatctctcgctcattgtccagatcatcgccgaatcccagatacggaacgtgattgttgagggccagttggtccaacaaatcgtcgtcgtgcttgcccacgcacacctccatttccaggcactcgacgaaaccctgacgaatctcgagcttctcattgctgccctgaccgtacatgctgagaatctgggtggagacattcggcagctgggtgaccgaagccagaatcttaatggcggccagggcgtgccgcggcagccagctattataggttacatacttaatgatattcagcacgtgatcgggcttgcgactgcgtggattcagatccaggagcatgcgattcaggcccgacagcaaaatggggcaattggccgccgagtgggcctcaaagaaggcgttctgtttcgccaatgcggcttccaggatcagcagtgcgtacaatgagcactcctcgagtagcttcttgccctgaaagcgattgtagttgtccagccgctcacgcacctcctccacaatgcacagcagcagctgcaacatttcggacttcagctgcagctgcatcataacgtgaaagcccggatagggaggttcatcgactgtctccagaaaatccattgcggacggccgataggtggccagtaggtagtagagcagtttcaggcactgggcgccaacttgccacttctcggagggaaccttgtacgcgcgattgtaaaacttgagcaacaccgaatttatcatggactttagatagccttcgtaggccggtgtccgttgcccggcgcccaaactcttcggcagattggtggtcatcagtgtgtagagcaattggaggatgccgcgcgtcaggttatactgctccgaacggctctcgatttgttccatctcctccaacaaactgcactgggcatagcttctagacacgggcacagtgggtataatctgcgaggcctccaggtggaaccagatgacgcgcgccgtctccttcgatttggccagggcagccagcgtgtgcagaatctccgccttcaaaaaaagcggcgtggcgcacgcaaccaggcccaggagcacctgcggcgtctgccaattgggatggtcacagatcatgatgcgcgagacctcgtcgtgttccgccaccgcctgtatgatgcccattacggccaccagatgctccgcctctcgctgcgtaatggcctttggtgtcgatcgggtgcggtaaatggtctcgccgctcatgccgatgttggtgttaaagtcgttgcgcatcgaactagaagatagtgatcttcagagagatcttcaataccagatttgagtcacacttacgtatagtagttgcccagggtggtgaagaagtgatcccagctaaccgcatacttgccgccggtggccatctggggcaccctaagcatgttgaaggcgcatcgagccgagaaatcggtccgtgtaagtccggatatcatcttgaggtaggccttgaacagcgtctgtggcagcaggtcgctggccaagctaatgaacttgaacagcgacaccgagcgcgaggtgttcttgaatgccgtagagccgttgggatcgccggggccccagtactcgttgcacagcctgatggtgacgcgcggatcgccgtgcatcttggccacgcacagcatgagcagctcaaagttggagtccaagttgggcggcggttccagaccctcgtttaggaagctgatgatcgtgtgtgacgactcgtctgctcggccgcgcagctccgacaccttggagttcatgaagtcgatgaagtccgtgatgagcagatggacgcggcggtagaagaactgcgtgctgtcagcacaaatgatgattagcttgcgaatcggcaattgacacttcagttgtcagtactcacctatagaccagatccttctcgagcagcaagctgtggaagaagacgaatacctgcgctcccagtgcctcgtcgatgagcatctcatcgcgattgatgatcgagatggcggtggcctgaagctgcaaaggtgcatgccgcaggctggccagcgttagtccgaagctgtaggcaatgatggcattcaggcgcggtgcttgccagctgctctgcgcgtacagctcctccaggaagcactcggcgaactcgcgatcgctgaagatcggaagtcgggttgtgtgctcattgggttcctcggtgaccagcagcatggaggtatcgtacgcatacagcagagccatcagcatgatcagggtcacgtcgtccatgttgccgcccgcgtcgtggttctttcggttggccaattggtgcatcagccgaatggcaatgtgtcgcggcaggccgcgttgtgccgaccaattgaacagggccattgccaatgcctgttgaatgtcctcgtataggccgagcacctggttctgatgcttcttggagccaaacgcgcggtttgtggtcagcatagcgcactgcgaacgttggacaacaaatgaataacaatttgcgaaggaagatatgcaatttcagagaatttcagaaacaggcgcatacaaacccacctccttgtcgacatccatctcctcgagcagctgcagcaggcgtcccagtatcccagagccgtcgacaaggctctcggcatagttagtgaccagaccggtgatctgcgtgcgtagaacgataatcagggtcagtgaatctctctttcagcggcactgcgatgcctgcgatgtcgaaatctcgaaacttacctccttgggcagttcggtgttccacgagacgccgctaaccacctggaacatgtcgcgaagcgtgcagctgatggcctttcgtccatcgtagtagagcagcaccgcgacaaggcctctggacaggccgggatgatgcttctgctggcgctgtgcggtgcacagcagctccacggcgaaaccctcgtccagatcgaacatgtcggacagaatgaccgcctcgtcggccaggtcctgtgacatctttgtctttcgcgaatgcccctgcatcgggacgccttcgttgagggcatttcgtaggagattgcggctcttctcgcttctcggctgccgacattttcaataatggattatcaataattagttaaatctacggatctgcaagcgcttgttttgctatacccaccggattgcgcagcaagttgctgaagttgtgcttgtacttcttgaggcactgctccagatccgaggtgaagccactgcgattggacaccgcggtctgaaaagtgttgtacaaatgcttgtacggcgtccacatgtcctcgattacagctgtggacgcatgggtggcattagtgatttggcgacccacgcacatctgctcgttggccaggcactcaccatccatttcacttggttttgcggttcgctcagttcacgcagttcttgctgattcgcagttattgactataaaacgcggcaagattgcttcgctttgcgacaaggcgccggttaccagggctgggtgctgcaaatactggaaaacacagatgttcaccaccgtacgaactcaccacgctcgtacgcgcttcggtgcttgtgcccgctaactgcggttgctgcgctggctaaacggttgattcgaaccaagtcaatcggaaaatcgatgcttatcgaacgataatcgaggcgctgcatcggtgcgttgtcgcaccactaactaacacaacttcagtgcggcgcgggcggggcgttttcgtgaaaatctacgcacggacttttcgtagttacccgatagtagcatccatttgttttgttccgattcgcgtttttttttttttctgttctccgccacttgatttggccagcgaacgcactgcccaagtggtgtcctgttcgcattgtgagtgaatcaccgatggccgcgggcaggctgaactgcaccatagtgggatgctggttctggctgtcgatgcaagtggatgtggaagtggatgtagaagtgtaaatgcaaatgcaatcggcgcagttcggctgcaataaatgccaaaagggatactaactgccaaagccagtgcaattggaaggaaaattcaaatttcattgggaattattcgaattggaattgaatttgtaactggagttggagttcagagtacttggtactgggtgtgcgagagcgacagagaggaagagaggcagtgcaagtgtgtgggggtagcagtcacacaggcacacacgaacatactcacaactccagtgcataaaactccaaactgcgttcgcctctctcttttcgtttcgcttgctctctcccctacgttcgcccacgcaacgcctggcgagcgagagagagagcggtatagaagagcaagggagccagagcgagagagcaaggaagtggtttttccaccgaaaatatggacaaaggcaaactgcagagttagctgaaaataaaaaaaaataaaaaaaaggaacaagacacaaacagtgactgaaatagcggttaacagcgctcccttacgg

SEQ ID NO: 39314 - DNA, 6308 bp, DROSOPHILA
cccagccctggtaaccggcgccttgtcgcaaagcgaagcaatcttgccgcgttttatagtcaataactgcgaatcagcaagaactgcgtgaactgagcgaaccgcaaaaccaagtgaaatggatgatgtggacgccgtacaagcatttgtacaacacttttcagaccgcggtgtccaatcgcagtggcttcacctcggatctggagcagtgcctcaagaagtacaagcacaacttcagcaacttgctgcgcaatccgccgagaagcgagaagagccgcaatctcctacgaaatgccctcaacgaaggcgtcccgatgcaggggcattcgcgaaagacaaagatgtcacaggacctggccgacgaggcggtcattctgtccgacatgttcgatctggacgagggtttcgccgtggagctgctgtgcaccgcacagcgccagcagaagcatcatcccggcctgtccagaggccttgtcgcggtgctgctctactacgatggacgaaaggccatcagctgcacgcttcgcgacatgttccaggtggttagcggcgtctcgtggaacaccgaactgcccaaggagatcaccggtctggtcactaactatgccgagagccttgtcgacggctctgggatactgggacgcctgctgcagctgctcgaggagatggatgtcgacaaggagtgcgctatgctgaccacaaaccgcgcgtttggctccaagaagcatcagaaccaggtgctcggcctatacgaggacattcaacaggcattggcaatggccctgttcaattggtcggcacaacgcggcctgccgcgacacattgccattcggctgatgcaccaattggccaaccgaaagaaccacgacgcgggcggcaacatggacgacgtgaccctgatcatgctgatggctctgctgtatgcgtacgatacctccatgctgctggtcaccgaggaacccaatgagcacacaacccgacttccgatcttcagcgatcgcgagttcgccgagtgcttcctggaggagctgtacgcgcagagcagctggcaagcaccgcgcctgaatgccatcattgcctacagcttcggactaacgctggccagcctgcggcatgcacctttgcagcttcaggccaccgccatctcgatcatcaatcgcgatgagatgctcatcgacgaggcactgggagcgcaggtattcgtcttcttccacagcttgctgctcgagaaggatctggtctatagcacgcagttcttctaccgccgcgtccatctgctcatcacggacttcatcgacttcatgaactccaaggtgtcggagctgcgcggccgagcagacgagtcgtcacacacgatcatcagcttcctaaacgagggtctggaaccgccgcccaacttggactccaactttgagctgctcatgctgtgcgtggccaagatgcacggcgatccgcgcgtcaccatcaggctgtgcaacgagtactggggccccggcgatcccaacggctctacggcattcaagaacacctcgcgctcggtgtcgctgttcaagttcattagcttggccagcgacctgctgccacagacgctgttcaaggcctacctcaagatgatatccggacttacacggaccgatttctcggctcgatgcgccttcaacatgcttagggtgccccagatggccaccggcggcaagtatgcggttagctgggatcacttcttcaccaccctgggcaactactatacttcgatgcgcaacgactttaacaccaacatcggcatgagcggcgagaccatttaccgcacccgatcgacaccaaaggccattacgcagcgagaggcggagcatctggtggccgtaatgggcatcatacaggcggtggcggaacacgacgaggtctcgcgcatcatgatctgtgaccatcccaattggcagacgccgcaggtgctcctgggcctggttgcgtgcgccacgccgctttttttgaaggcggagattctgcacacgctggctgccctggccaaatcgaaggagacggcgcgcgtcatctggttccacctggaggcctcgcagattatacccactgtgcccgtgtctagaagctatgcccagtgcagtttgttggaggagatggaacaaatcgagagccgttcggagcagtataacctgacgcgcggcatcctccaattgctctacacactgatgaccaccaatctgccgaagagtttgggcgccgggcaacggacaccggcctacgaaggctatctaaagtccatgataaattcggtgttgctcaagttttacaatcgcgcgtacaaggttccctccgagaagtggcaagttggcgcccagtgcctgaaactgctctactacctactggccacctatcggccgtccgcaatggattttctggagacagtcgatgaacctccctatccgggctttcacgttatgatgcagctgcagctgaagtccgaaatgttgcagctgctgctgtgcattgtggaggaggtgcgtgagcggctggacaactacaatcgctttcagggcaagaagctactcgaggagtgctcattgtacgcactgctgatcctggaagccgcattggcgaaacagaacgccttctttgaggcccactcggcggccaattgccccattttgctgtcgggcctgaatcgcatgctcctggatctgaatccacgcagtcgcaagcccgatcacgtgctgaatatcattaagtatgtaacctataatagctggctgccgcggcacgccctggccgccattaagattctggcttcggtcacccagctgccgaatgtctccacccagattctcagcatgtacggtcagggcagcaatgagaagctcgagattcgtcagggtttcgtcgagtgcctggaaatggaggtgtgcgtgggcaagcacgacgacgatttgttggaccaactggccctcaacaatcacgttccgtatctgggattcggcgatgatctggacaatgagcgagagatgagcggggaacgcgaatattcaactattgaatcgcaactggagctgcaggcgggggatggcgcgctggagagcaaaccggctagcattgagctgcaactgaaagaggccattatcaagctgttcgagatgaatcttagccagcagttgcccaactttgtgtacttcctgctcggcgtggatgtgctgcgcgaatttatggccaacggacggcagcacctggccatcgagatgcaaagctcgtgcgtgaactccgtagtgctgttgctggaaaagtacatggataaacagcgtcacagcgataagtactgcgagcacacggcgagaatcgtggagcgcatttaccatctgttccatggactctgcgccaatcgccgcaccgcggagacgatactgcgctacttccggctaacgtgcagcgacttcctgctgcgtcacctacgctcgctgcccttccggcagcatcgcgaggatcatgtgctgcacgccatgggccacctgctcaactgcgtctctatcgatgtcaaactggcggccaaacatggccagatgacgcgcttcaaccagatgtgcgacattttgctaattggaaacggaatggagcgttcatcccatggcctgtcgatggaattgggccacagcctgatttcacagccgtcgtcgtctttcctcgccatggatgtgctaccggccggtggatcgataagtgccgtggcacatggggctggttcggcgtctctcggagctccaaacactggggtcaaatcacttaagccatcgctgctgcaggagacatcgcagggactgcatgtcacccgactgctagatattctcgtcctggaggcgggcacgttgagccagccgcagctggagttcttcgacgggcatctgatcactcaactgctgcgcgactgcgaggcatccgccgaagctggcgccaattccagggccaacttgatcaacgtgcgcaaactgtactacattctcaccgacgagctgtacatggtgcagagcatcattgccagcggccagcggaaggccatttccacggaaatcatgctgctgctcaatcacgccgtcaacataaatcgcgtgcggacacagcgctgcgccacgctggccttcatggcagcatggggtcaactggtgcaggtgctctttagcaacatgcccgatgccgtgcttccggcgacgcagcgtcgccagcacatcatcgatatcgtcgagaaggtactcatcaaggtgcagcccatacagcccatcatcgagatatccgtacaggtgagcgagacggtgctgctgctgcttgccaatttgcgctactgctgctaccaggccgaggaccagagccccgaggatctggccgccgaggattcgctcagcaatggcaatggcaacgccatcggcaacgattcgcaggtgaacgcattgtgtctgggccagagggcaatcggaactggttcggatggcggcagtggaggtggacgggatatcggttccggtggcaacagcagcaatctgcgattcattctcaagaacctcgtccagtggatcatgatcagtgaggtgaagtcgcagaagctgcgcatcaatctgtacagttcgctgctgaattgcctgcggatcgcgaagcgactgcgcaccgacgagcatctggagtaccaggagacattgatttcgcgccaggagagtgcacgcacgtacaacaaggagcagcggcgcgacgatcgcctgcggctgaaggccatggcggcggaagtgattggcacgttcggcgagaagctgatcgacaccatctgccacgatgcggtgaccggccacgatgtgtgccgcatgctggcgctggcctgcctggacatgatctccgagctgcaggcggtgagcacgctatgcgactttgtggcatcgcgtggctacctcaagcacatactggaaagccttgatcagtccagtacggcgctttgcgggattctgcagcccgtgccggatcacctgaggccgctctacgtctacgagtcgcgcatggccttcctcacgcgcatggcgaacagcaatgtgggagcccggctcctcctcaccgagcaggcgctgggcgtgctttcgaatatgaaggtctatgaccagcagcccgacctgaagtccagcgaactgaatcgtaacgagccgcagaccttcctcccgtccatcgatgaccgcttccggtcgatcctcctgccggcgctgagcctctgcgatgccattgtcaactcgctgggtccgcgcaacaactccgccgccgtgcaggtgcttaactttctgttcgcccacatcgacatggtcgaggccatgttgcgctcggccacgccgtatatggacctcggccacctgcagcaggtggcggtcattagcaatctgtttgcccgcgcctccacgcacgagttgaccgcgctggaggatagcgtgcagctggatttgcgaaatcgcctgggccgcgtgcagcagctgatgatcgtggtgttcggacgcttttgcgtaagcgagcccaccattcgtcgcatgctgcagcaggatgaggagcagcagaccaaccccaccgatgactcgaagaggctacgtgtcaagtattttctggatatagcagccaacgtgtcgctctactgccgcaacgtggtcaccagccattcgaaggacagcatgacctccaaatacttgctgaccaccgtgatcaatgatgtaacgctgctcactggcaaaatgtccagcaaaaagctgacgaccatcatgcacaccatcctcaatcagctgaagggctccatcggctactacctttcgcagaagtcgatcgccgacaatctcctccagcaacgcgcctccctgcccaacatcagctttgggcccaacggtaaacaaagctacatagaactgagccagcgatacaacgagaagcgcagcgaactgaggcaggccgtcttcattgccgagcagaatctgtatctgctgtggatccatctggacttctatctgcgcaacaccatcgactacgccaacgaaaacaggaacgccatcaacgagagcaacatggacgacgacaatgacatgtccgtgctgaacgcctcgcaggaagagatcgtgcagctcaagcagctgctcatctccacattcaacgagacattctgcacgcagctaatcaacgccagcgaggattactcgattaagtgcaaaggcttcaatggctcgctgctgcgacgcattaaggcgctcgtccagttcgcccccatcactgccaacgatgtcaattccagcttcgattcgtag

SEQ ID NO: 39315 - protein, 2060 aa, DROSOPHILA
MWTPYKHLYNTFQTAVSNRSGFTSDLEQCLKKYKHNFSNLLRNPPRSEKSRNLLRNALNEGVPMQGHSRKTKMSQDLADEAVILSDMFDLDEGFAVELLCTAQRQQKHHPGLSRGLVAVLLYYDGRKAISCTLRDMFQVVSGVSWNTELPKEITGLVTNYAESLVDGSGILGRLLQLLEEMDVDKECAMLTTNRAFGSKKHQNQVLGLYEDIQQALAMALFNWSAQRGLPRHIAIRLMHQLANRKNHDAGGNMDDVTLIMLMALLYAYDTSMLLVTEEPNEHTTRLPIFSDREFAECFLEELYAQSSWQAPRLNAIIAYSFGLTLASLRHAPLQLQATAISIINRDEMLIDEALGAQVFVFFHSLLLEKDLVYSTQFFYRRVHLLITDFIDFMNSKVSELRGRADESSHTIISFLNEGLEPPPNLDSNFELLMLCVAKMHGDPRVTIRLCNEYWGPGDPNGSTAFKNTSRSVSLFKFISLASDLLPQTLFKAYLKMISGLTRTDFSARCAFNMLRVPQMATGGKYAVSWDHFFTTLGNYYTSMRNDFNTNIGMSGETIYRTRSTPKAITQREAEHLVAVMGIIQAVAEHDEVSRIMICDHPNWQTPQVLLGLVACATPLFLKAEILHTLAALAKSKETARVIWFHLEASQIIPTVPVSRSYAQCSLLEEMEQIESRSEQYNLTRGILQLLYTLMTTNLPKSLGAGQRTPAYEGYLKSMINSVLLKFYNRAYKVPSEKWQVGAQCLKLLYYLLATYRPSAMDFLETVDEPPYPGFHVMMQLQLKSEMLQLLLCIVEEVRERLDNYNRFQGKKLLEECSLYALLILEAALAKQNAFFEAHSAANCPILLSGLNRMLLDLNPRSRKPDHVLNIIKYVTYNSWLPRHALAAIKILASVTQLPNVSTQILSMYGQGSNEKLEIRQGFVECLEMEVCVGKHDDDLLDQLALNNHVPYLGFGDDLDNEREMSGEREYSTIESQLELQAGDGALESKPASIELQLKEAIIKLFEMNLSQQLPNFVYFLLGVDVLREFMANGRQHLAIEMQSSCVNSVVLLLEKYMDKQRHSDKYCEHTARIVERIYHLFHGLCANRRTAETILRYFRLTCSDFLLRHLRSLPFRQHREDHVLHAMGHLLNCVSIDVKLAAKHGQMTRFNQMCDILLIGNGMERSSHGLSMELGHSLISQPSSSFLAMDVLPAGGSISAVAHGAGSASLGAPNTGVKSLKPSLLQETSQGLHVTRLLDILVLEAGTLSQPQLEFFDGHLITQLLRDCEASAEAGANSRANLINVRKLYYILTDELYMVQSIIASGQRKAISTEIMLLLNHAVNINRVRTQRCATLAFMAAWGQLVQVLFSNMPDAVLPATQRRQHIIDIVEKVLIKVQPIQPIIEISVQVSETVLLLLANLRYCCYQAEDQSPEDLAAEDSLSNGNGNAIGNDSQVNALCLGQRAIGTGSDGGSGGGRDIGSGGNSSNLRFILKNLVQWIMISEVKSQKLRINLYSSLLNCLRIAKRLRTDEHLEYQETLISRQESARTYNKEQRRDDRLRLKAMAAEVIGTFGEKLIDTICHDAVTGHDVCRMLALACLDMISELQAVSTLCDFVASRGYLKHILESLDQSSTALCGILQPVPDHLRPLYVYESRMAFLTRMANSNVGARLLLTEQALGVLSNMKVYDQQPDLKSSELNRNEPQTFLPSIDDRFRSILLPALSLCDAIVNSLGPRNNSAAVQVLNFLFAHIDMVEAMLRSATPYMDLGHLQQVAVISNLFARASTHELTALEDSVQLDLRNRLGRVQQLMIVVFGRFCVSEPTIRRMLQQDEEQQTNPTDDSKRLRVKYFLDIAANVSLYCRNVVTSHSKDSMTSKYLLTTVINDVTLLTGKMSSKKLTTIMHTILNQLKGSIGYYLSQKSIADNLLQQRASLPNISFGPNGKQSYIELSQRYNEKRSELRQAVFIAEQNLYLLWIHLDFYLRNTIDYANENRNAINESNMDDDNDMSVLNASQEEIVQLKQLLISTFNETFCTQLINASEDYSIKCKGFNGSLLRRIKALVQFAPITANDVNSSFDS

SEQ ID NO: 39316 - DNA, 2597 bp, DROSOPHILA
aagtgtgcttctaatgatgctcccttgctgttttgaaaccttgccgccgttttgctgctccattgaattgtcgaaatcgcactccatgtatttgacattttcccgcagcaatgaaacattgtcaaaaatccttgaaaaagaagggaataaataaataaaaacctaaattatatgttacgaatctgtgcactacgtggcatcctcctggtcctcctgcgcataaccgcagctactaacggcgaatccatgccattcatccccttatccctcgtcgttgatgaccatatccgcggtgattctgctttagcaagtggtaattttcgtgcactccataatcgtccttctgcccaaaatgactcctccaggtgcatccaaatgcgtctcaacaaggcctatgattgcccatttcttggcactccttgattgtcgaacgccgtcttcatgccgcagtcatcgttggtcttcgaggatcaccggcgcaccggtctgctgctcgccaaaatgcagaaattctttggccacagacctccatggtggtagcggtaagtaatctccataatacgcaaagaatacactcctttaccaacaacacacatccggaatcaagtcgatgaaagaccaagaaatgcacaattaattaataaccattttgaatctatctatcttatacatacatacaaacgaatgtggctcctaaaagttgctcaatctgaattactttcgcaaagtctcagcttccctgaattcacattatggcctgtggcaaacaacacagactacttactgcacataagttagtacatacgtatgtacacacatatgcattgatgtacaaagttgccagccaaaatatcactcttaatgtcgaagaaaccaactatttaacgtatgcacatttaagcacgacgatgccatttgctacacttacatacaaatgttgtgtgaacagagaaaacaaaaatggtaccttctccaacactggcggcagtatatatttaggttaactcaaaatgttcttattcttaactaagtaaaaaatttcttcttcatttgcaggtgtccaaactaaaatacggtcaacagtcccagcggctcagaaatccatgggccacaaaaacaggtctttccatctcaactccccgtccacggatggcgagacgtcttccggaatgttgaagatgaagcggatctcctcgggagtcttgcccctaatcatattggccaccacattgtaggtgagttccagtaggcccttgatctgcagttgtttggcggccagtatgatttcgagcaaggtggttgaattgaccatcaagaagatggcgtcccatggggagatggcatatgggcgacgtggcttcagctcctcaccctccgttgactgatcatcatcgtccttgtggtgattggcccaggctagaatcttgcccagggtgaacgtgctcaccgagtgcaggggcacgatggcattctcgtcgttctgcacggcaaagtgatccaacatggtcttgatggtttcggagaccatggcgactcggacttccgtcggaaagatcaccccttccgaggactcaagcttgatggtgggagtaaccattttcagtttgcgttgcctctcaatttgccaaactactttaaaaaagagagtcagaagatgcgataatgaaagaccacgtggcgcctagacgattcgaaagttcaacgaaaaaggaataaagaatagagtgaccagatgggatcaccgcggaaacaccgtcgtcaagtgtgtacacactagaaattcgaagtcttaacattaagaactgtagattcgctttagctttcttattgcgtgccttgtgttacttattctgagtagtagccgtttatagctgttttacaaattataatatccatatgaatcaatcaaaaagttcactttaacagagagaactgctttatcacgcaggaattgaactgcttaaaagaaaaagacgaacgggcataaccagatcgacgtgttacataatgttccttgaatgtaatatagcttggagtaactggaactgattagcgtgataaaagttggaaaacgttcgctttttatttgattttacttatgtatgtacatatatttctagggggcattatcaggtcttagcaacggctaattacaatgcatgcccaatgcctggtcctaatagttgtggaaggtgtgaatatccctttctcaaggacataaacccagttgaactccattactcgcatcccgtcataaacttgcagcctgcgttttttggcacaactcatttccggacgagccagataagcccgtgattcgtggtctgtggcgcgtgggttttccggaaaagcgggaccgttgcatgccaaccagccaagcaccaggacacttggcactgccccccattccaggacaatctgtccaccttatcatggtaataagtgtaagcacgtaagcctggccgaagggggtgatttcgtatttttctttacatttctttgcccgcctattttttttttttttttttattctgccgacgcattttttggtaaccctttcgggcactttcacccacctccgtcgcggcgcttttctt

SEQ ID NO: 39317 - DNA, 597 bp, DROSOPHILA
atggttactcccaccatcaagcttgagtcctcggaaggggtgatctttccgacggaagtccgagtcgccatggtctccgaaaccatcaagaccatgttggatcactttgccgtgcagaacgacgagaatgccatcgtgcccctgcactcggtgagcacgttcaccctgggcaagattctagcctgggccaatcaccacaaggacgatgatgatcagtcaacggagggtgaggagctgaagccacgtcgcccatatgccatctccccatgggacgccatcttcttgatggtcaattcaaccaccttgctcgaaatcatactggccgccaaacaactgcagatcaagggcctactggaactcacctacaatgtggtggccaatatgattaggggcaagactcccgaggagatccgcttcatcttcaacattccggaagacgtctcgccatccgtggacggggagttgagatggaaagacctgtttttgtggcccatggatttctgagccgctgggactgttgaccgtattttagtttggacacctgcaaatgaagaagaaattttttacttagttaagaataagaacattttgagttaa

SEQ ID NO: 39318 - protein, 167 aa, DROSOPHILA
MVTPTIKLESSEGVIFPTEVRVAMVSETIKTMLDHFAVQNDENAIVPLHSVSTFTLGKILAWANHHKDDDDQSTEGEELKPRRPYAISPWDAIFLMVNSTTLLEIILAAKQLQIKGLLELTYNVVANMIRGKTPEEIRFIFNIPEDVSPSVDGELRWKDLFLWPMDF

SEQ ID NO: 39319 - DNA, 2143 bp, DROSOPHILA
aaatacagttttacggtaactgaaaattttgattctgttaagtgtatatattttatggaaagcaagttacacataattggagtgtttcataaaacaataataatacagtaaaagggaatgttagaatcgctaatgagtatgtaacaggtagaaagtgccttctgtccgtctgtttttcaaatgaaaaaatatatatttaatttaaagtttttttgaaaaattagagcaagtaatgtaagcccacgtgctattttccagttccctctgttaaaaatattttttacggggttctttccggaactattattttgaaattttttgattgagcacttacccaacattcatataggttttaaaattcatattacacttttttttattacacttttaaggtctgatatgataaataaaacacgattcgcgattctcaataaaaaagctaaagcgaatctacagttcttaatgttaagacttccaatttctagtgtgtacacacttgacgacagtgattccgcagtgatcacatctggtcactctgttctctattcttttttctttgaactttcgaatcgtccagttggcacgtgctctatcaatcatcccatcttgttcttctgaatctctttgaacgtagtttggcaaatagaaaggcaaggcaaaccgaaaatggatgctcccaccatcaagcttgagtcctcggatgggatgatcttttcaacggaagtccgagccgccaagctctccgaaaccatcaagaccatgttggaggtctctgccgtggagaacgacgagaatgccattgtgccgctgcccaaggtgaacgcgttcatcctatccaagattctgacctggatctatcaccacaaggacgatgatgcccatggagcggagggcgtggagttgagcccgcaaagcccacatgacatctcagcctgggacgccaactttattaacgtcgatcaacccaccttgttcgaaatcatactggccgccaactatctggagatcaagggcctagtggatctctgttgcaagacggtggccaatatgattaggggaaagactcccgaggagatccgccacacgttcaacatcccggacgaaataccgagcaggacggcccagttgggcgaagacctgtgaggcacagtctctttcggagcaaatccggttgggacacctggaaccttcctttgttgagaacttatttgtttcaccagaataaatatgatattacgagtatttttgaaagcatatctattgtattttatcaacatattcagtttacagtttactttggcaacaagaacacataaaacataactttttaaatcgtttcatgttcgcttgggctaaaggagtgctctggctctattcccagttgattgccaccaagccgcccggggatacaagcacacaccacacaccacaccacacaccgacccactccactccatagcaccccaatcccggaatcctggtgctccttaagccggttcctgatttggcagccacgctaatttccaaaagccttggccgttggcgcttatgagctctgcatccatgaagttcgcattacgtatgtaaaatagtgcagaaaacccccaaatgaacccaagcccagggtcccaatcctcgtattccaaacccttggacacaacttacgcactttacataccgttgcggggtggggaggcgggtggtgggtggcaggaggctgggcaatgtcctttattgtaagttaagttgctgcccacacatctgtgtgtgaatgtgggagggggcggcctacggcttgccactcgcctttcttcgtccgtttcatgtgtgcttgaaatttaaaatgctctgtggaaattggtttagtcatgtatgtatgtatgtatgtatgtatgtgcccagtgtgcgtttgtttgtgtgtgtgcttagggggtgaaagcatacacatacaagaatgtcaggtgggcgtatgtgtgtgcgtgtatatgtggccattggttttcctgcataaacataacaaaaatatagccaaatgtgccacactcgacttaagattctcaattgtaaagtacgcaatgtatgtacatatgtatacatatatttatggaaatataaaaatattaatatcaaaatttatttacct

SEQ ID NO: 39320 - DNA, 438 bp, DROSOPHILA
atgatcttttcaacggaagtccgagccgccaagctctccgaaaccatcaagaccatgttggaggtctctgccgtggagaacgacgagaatgccattgtgccgctgcccaaggtgaacgcgttcatcctatccaagattctgacctggatctatcaccacaaggacgatgatgcccatggagcggagggcgtggagttgagcccgcaaagcccacatgacatctcagcctgggacgccaactttattaacgtcgatcaacccaccttgttcgaaatcatactggccgccaactatctggagatcaagggcctagtggatctctgttgcaagacggtggccaatatgattaggggaaagactcccgaggagatccgccacacgttcaacatcccggacgaaataccgagcaggacggcccagttgggcgaagacctgtga

SEQ ID NO: 39321 - protein, 145 aa, DROSOPHILA
MIFSTEVRAAKLSETIKTMLEVSAVENDENAIVPLPKVNAFILSKILTWIYHHKDDDAHGAEGVELSPQSPHDISAWDANFINVDQPTLFEIILAANYLEIKGLVDLCCKTVANMIRGKTPEEIRHTFNIPDEIPSRTAQLGEDL

SEQ ID NO: 39322 - DNA, 1484 bp, DROSOPHILA
acacgtccccgtcagtcacaagtcattggatgtccttcgtccttcgcagccggcagctgctggcaattcccggccaatacagccagacatctacgcttcaaatttcaatatattgaataatacagagatcaaagttctggccatgcacccgtcgattttgaaggacgaaggacgatgggcggagaaaacttggaatacatttgggaaattgaaaacatttgcggatgccagcgttttgagctcaagcgatttgatcggacttcaaaaacaggccaaaaagtgctcctctgggagtcgtgtggtgccagagtccttcatcctgttctactcaatcataaggtgtagctattggctatccaaaactgacacttttttggccgaattgcatccgcattcagttaagtttatatattgtagcgaaagcaagttacacataattggagtatttcgaattttggtaactgatttcatgttatacagtgaaagggaatgttagattcgcaaatgagtatgtagcaggtagaaagaagcaggtatgcccacgtcctatctcttaagcagttcaactcctgcttgctaaagcagttccctctgttaaagatattttgtacgtggttctattcggaactattattttgaaattttttaattgagcacttacccaacattcatatatgttttaaaattcatattacacttttttttattacactttttaggtctgctataatgaataacacaagattcgcgattcttaataagaaagctaaagcgatcctacagttcttgatgttcatttctactgtgtaaacatttgacaacggtgtttccgcagtgatcccacctggtcactctgttctcacattctttcatatccttttttttttaactttcgaatcgtccagttggctcgtgctctatcaatcatcccatctcgtacttctctctgaatcactcgtttgtagtagtttggcaaatagaaaggcaaggcaaaccgaaaatggatgctcccaccatcaagcttgagtcctcggatggggtgatcttttcaacggaagtcaaagccgccaagctctccgaaaccatcaagaccatgttggaggtctctgccgtggagaacgacgagaatgccgttgtgccgctgcccaaggtgaacgcgttcatcctaaacaagattctgacctgggcctatcaccacaaggacgatgatgaccaggcagcggagggcgaggagttgaccccgcaaagcccacatgacatctcaccctgggacgccaactttattaacgtcgatcaacccatcttgttcgaaattacagtggccgccaactatctggagattaagggcctagaggatctctgttgcaagacgttggccaatatgattaggggaaagactcccgaggagatccgccagacgttcaacatcgaagacgatttaccgatcgataccgccgagttgggcgaagacctgtgaggcacag

SEQ ID NO: 39323 - DNA, 477 bp, DROSOPHILA
atggatgctcccaccatcaagcttgagtcctcggatggggtgatcttttcaacggaagtcaaagccgccaagctctccgaaaccatcaagaccatgttggaggtctctgccgtggagaacgacgagaatgccgttgtgccgctgcccaaggtgaacgcgttcatcctaaacaagattctgacctgggcctatcaccacaaggacgatgatgaccaggcagcggagggcgaggagttgaccccgcaaagcccacatgacatctcaccctgggacgccaactttattaacgtcgatcaacccatcttgttcgaaattacagtggccgccaactatctggagattaagggcctagaggatctctgttgcaagacgttggccaatatgattaggggaaagactcccgaggagatccgccagacgttcaacatcgaagacgatttaccgatcgataccgccgagttgggcgaagacctgtga

SEQ ID NO: 39324 - protein, 158 aa, DROSOPHILA
MDAPTIKLESSDGVIFSTEVKAAKLSETIKTMLEVSAVENDENAVVPLPKVNAFILNKILTWAYHHKDDDDQAAEGEELTPQSPHDISPWDANFINVDQPILFEITVAANYLEIKGLEDLCCKTLANMIRGKTPEEIRQTFNIEDDLPIDTAELGEDL

SEQ ID NO: 39325 - DNA, 7101 bp, DROSOPHILA
gcagaacgggtagaacgaatgtgccgcatgcacggcggtgtatttgtcggtcatttgtatttggaacgccgtagcagacagaaggacacgggtgaaaaagcgacgaagcgtgcgaacggagtggagcggctacttttagcgcccttttttgtttcattttccccactcacaaaacgcaacatttttggcaacaacttttcggcaaaccaattgaaaaacaaactaaacgaactaatcgcggctcgggaatcaacaacaaatttaattccgatgcaatacttgtgttcgtaaacaatttttttctgttcgatccgatccccgataaacgataaacgcgaattccagtgatcttttggaaaagggcgaagcgaaaagcgaacccaaaccgaaaaactctaaatcaccggtaaaaaaaaaagtggcgagagagagcaagaaagagagagagagagagatagggagagtgtgatcacatcgcatcgccattctcgcttccctcgcaattcgcaaaaacaaaattcgaaattcaaaattgaccagcattcgttgcggttccgatattggtttcttcagttcagttcagttcagtttcgtattatttatcgagtctgctgttgtgtgtctttcgtttcgccgaagaggagcggtgaaagagaagaaggaggaggagcggagcagaagaagaaggagcgaagcagaagtccaagtccaacgaagaagtgcccaaagcgaggcgcagataagtaagaaaagcaaaagagaacggaaaagggatcttcatcgaggatccttcatgtatatatttttttcgagtgtgtgtgttagtgtgcgtcgtgagcgtccatgtgtgctctccacaaacaattgcagttgacattacgttcgcaagtaaaagctattgtatttccaccatacaaatcaaattacaaaagtgcctgcaatttcgcatcgaagtgaaatggacaccaagaaccgttagacaccaaaagctttgaaaacacagtgtgcatgtgtttgttttttttccgtttgcaactcaagtaacttcaaactaataatggcttaaacaataattggcttattttcagtacaaatacaaagcacaaaaaaacaaaaaatcacaaaaaaataaaacgaaacgagagcatataacataaaaacccaaaacaaaaacgatcggctcagcagagccaacgaaaagcaagcagcgtagcagcaggagcagaggatgcaccactgatcccggagagctcgagacatgagaagcgaaacaccgagcagccaccaagcatcgacttatgtagcggtccatgacgagcattaagaccgagatgccgcccctgcacgcggcagaggcgctcgcctccagcagtgctacagacagtggtgggggaggagcaggaggaggaggaggaggaggtggaggaggatcgggcggaccaggagcgggaggaacgggaggcgtaggcagtgcgcccgccacacccaatgccacaattagcgccgccgccgactccagtgataatcaacccggcacgccgcagcccacgcaacagcagcaatcgacgcagcaacagttgcagcagccacaatcgcaacagcagcagcagcaggccatgggtggaggagatccccagcagcagcaacagcagcagcaggtaacgggtatcacccaccagccgtacgccacccaccacatgtactccgcatctggcggacagcagcaacaacagcagcagatctacggcggactctacggcggggacatgcagcagcagcagggttacgccagcagctacatcaacagctacgagcagttctaccagcagcaacagcagcagcagcagggcactgattacgcctttggcaccgtgggcgttgactatggcaagagcgccggtgttcgctatcatccctacctgcagacgccaacctccggactgggaggcattccaacggccagctcggcacaggaggaggcgggcagtgcgcccagcgcggtcagcaccaccacagcggtggccatgagtccgcgtgtggttagcagcagcagtccaacgtcgacgtcctcgcacctgcagctgggcagctccagtggccagacaccaggctcaccaggcggagccgccggaagtgccggatgcaagttgcagtgcaagaagtgcggcatcctcaccaccaacgagtcggagctacaggagcacatcgccaacgtgcacggagagtcgccgtacggcagcagcggttacgccagttcaccgtacatcaaggaggagatgcccacaccacagccacccggcgttggatccgcaacggccaatcccggcgaattactcgacctagattcccagaagatggtctatcaccagcagctgctccagcagcaacaacagcaacacgacgtggtcgctggactgccgctgggcgctctgccggatccgctgcactcgatgcaatctatgcagcagcgcgcactccacagctgggagcagcagccacagcagacggtggcctccgtggagggcctgccaccctacatgcagcagggattgggcgtggggctgggagtcggtgtggacaagtcgccctactactcaccaaagcagtcaccctatcatcagtcaaccggcgttggcggagccacgctgatcaagcaggagtacggcggccacggactgatcaagtccgagtatcccgattcgcagcattacgtggacaagtccttcgatcccacagctggcggagctggtggcgcggaactgtgcgccagcgtggccaccagtccggcggagttccccagcaccactacgggcggaccagggcaggagggagcggcgggtgcggcgccaggaggtggataccgcggtttcgagccacccagctcgagctccgtgctgccggccaacagcctgacggccaaggcggccacctggaagtcgaacgaggcgcgccgtccgaaaacgtacaactgcacggcctgcaacaagtggttcaccagctcgggccatcttaagcgccactacaatacgacgctgcacaagaatgcggttaagtcgagcggccagccggatccagccaccctgcccatctcggcgcaccaccatcccgcccgcgacccggtgacgaagcccagtcgcaggggcaatgccgcagccgctgcggccgccgctgcagctgccgcctcggccagcggtcagggtcagcagcaacagccgccgataccgccgccgccggccaatgtgccacccccggagccgcctagaagtccgcccgattatggcggaggaggcggcttgggcgtgggagcgatgggcggcgctgccatgtcccagtactcggcctcaccctcgcccacacagcagcagcagcaccacctcaaccaccatcagcagcaggccaacggctatgctaatggcaccgccaacggctatggctacatgcagcaacaagtgcaatccacgacaaacgcttcaccacagcacgcttccaacaacaacagcaacaaccagcagcagcagcaacaacagcagcagcaccatcagcagcagatgccgcagcaccacaactccgttttgaacggtcacccaaacgggctagcaggtccctccgccccacacaacaacaacaccacccaaatgccgtcctcccaaatgaggggcctgctgaacgaaacaacaaccacgccgccaccaacaacaacaacccgagcaccacaaatcacaacaacagcaacaacaacaacaacggcggccaccacggtagctataaagagcgagcaaatggaggacagcaaccacactcacacccacacacacacgcatcccaatcacagtcacagccaggacaggagccacagcagcagcagcagcagctcaatggccacggaggaggcggaggagcaggagctgcgggatcaggagcaggcggacgatcacctgcatcagcatcaacaggcgtcgcagcagtatctgctgtcggcgcgtcattaccacagcagcacgcccaacacgctcagcagcagcaacaccaatcccagcacgcccagcagcaactcgccccatactatctaccggcaggagcagcagggaacggatttctcgcgcaccaccccgccgccgcagccgctgccgcctatgggaatgctgccgcctatggcaatggactacaacatgctggctttggatatgcccatgcccatgcccacgctcatgcacagcaatatgctgcagtgcagcagcaccagcaccacgccgctagctactaccatcaccaccagtatgccggacactatgcagccgccgcagcagcagctggtgcaccactaccaggcggtgctccacccgctccatcagcagctgggggagcagcaccagcgccaggaggcggatcatcatcagcagcagcgggagcttcaccaactggatcagcagcagcagcagcagcaggcgttaatcctggcggacagtttgccgcacagcagcagttcgcccaccagcagctccccaccgcccaccatgcccatgccgctcaccaccatcacagcgccgcagctgctgccgctgcagccgccgccgccgcacatcaccagcaccatgcccatgccgcccaccatgcacatgcccatcatgccgccgccgccgcaatgctaccagcagctgcagccgctggaccccacaatgagctatcacactattattggtagtggcccggaggcgcataccggaacggccggcggtggctatagcaatcagatcaccaccagcgatggccagatcctgcagctgatgccaacatccctgttcgcgccatatgcaccgctctcgccgtactcggtggccgcccagcgatcgccgcaggagggcgatctgccgccggttcacacactcacgacggccctgcatgcccatcagcagggcgggcagcaggaggcgcagacgccaacgctgactgtgctctccacgccctactcgcccacagtgagcagctcgcgggcgactcccgcactggagatggatatggccacgctgatgcagcaccatcaggactatgagatggagcagtaccagatgcagcaccagcagttggatcagatgcagcagcaccagcagcaactggaccaccagcagcagcaacagatcctggcggatcagacccagacgatggcccaacagccgctggccaagaagcggcgtggcggcaacgcaacaccatcgacgacgaagcgacggcggaacagcagcgtcggatcgacgtcgccgcactcgaccaccctgccatcgggacggatcaagtgtctggagtgcgacaaggagttcaccaagaactgctacctcacgcagcacaacaagagcttccactccggtgagtacccatttcgctgccagaagtgcggcaagcgctttcagagcgaggatgtctacaccacgcacctgggtcgccaccgcacccaggacaagccgcataagtgcgagctgtgccccaagcagttccatcacaagacggatctgcgccgacacgtggaggccatccatacggggctgaagcagcacatgtgcgacatctgtgagaagggcttctgtcgcaaggatcatctgcgcaagcacctcgagacgcacaatcggccgcgggtggtgggcaagaagtccgccgcggcagcagccgccgccgcagcagcagcagcagtcactgccacggcgggattgggaggtgcaccagccgccggttccattaaggcggcatttgcccgctcgctaacggtgacggctgtgagcagtgagccaggcgcaggagttgcaataccctcagctcctgccactgccacatgtgctcctgtatctgtatcagcgtcagctcttgtccaggccgtcaatcccagtctgacttccggcctcagtctgaagcggcacatcgacgatgtggccgttgacgatgacagcctgttggaggaggacgaggatgagatggagatggagatggagatggatatgttggaggaggaagatgaggaggaggaggagctgggcgatcaccacatgataatcaagagcgagtacgtgcaggaggagtttcagatgatcgagaagagcatagagctctactgaatgagtgggcaggccactgggttctgggttttgaaatgctcctaggctttgagcttgtctgggggatctggggaacggaggatcagcggtttagcggtttagcggatcacgggattatcggcgggcaactgagcgcggcttgggctgcgggcgcagctggagcggctctgcagttgagtgtcctgttcgggtcagcttggggttgttccgattcagttttaacgagtttcgcccgtgctcgttaagaaaaacacactttgttgcttggcaggcaataattcgctgtttttgccgtttcccttgttaaatttatttgtttttttttttgtatttttttttttattgtattctctggggggggataaacacaaaagtacttagaattgatcgcaaagccgcagcatttcaataacttagacagcaggccggccactccttgtctcgtatcatcatatcatccatcgtatcattgtaagatcgcaacgaaatgccgaactgccaatgtgccacccaccgcgccacaatcccaattaatccattcattcctgtaatttgtagtgagtttgccatatgtatgtgtgaaacgattgaaagacagccagaattcctaattgttgtagcagcaaattatttaattttatttgtatgttaaaattgtattattattatttgtactatttgcgcataacgctccttatttgtaaggccttatgattacgtgtaaacctaaaccatcaagtatacctcagcaaacagcagtccacgaaacgctttaaatcagggcgcatatgattatacatatatagagatatatagatatttatacatattccattttacatgtgtaaacactagttttagcacatttttttttgctgtattttaatttgtaacctgttttaactattatttgattattgattatgttttgtaatcgggaggaacgaacaacacacgaatgccatatacacgatatgtaaactaacaatcagcaactata

SEQ ID NO: 39326 - DNA, 5101 bp, DROSOPHILA
cagtgtgcatgtgtttgttttttttccgtttgcaactcaagtaacttcaaactaataatggcttaaacaataattggcttattttcagtacaaatacaaagcacaaaaaaacaaaaaatcacaaaaaaataaaacgaaacgagagcatataacataaaaacccaaaacaaaaacgatcggctcagcagagccaacgaaaagcaagcagcgtagcagcaggagcagaggatgcaccactgatcccggagagctcgagacatgagaagcgaaacaccgagcagccaccaagcatcgacttatgtagcggtccatgacgagcattaagaccgagatgccgcccctgcacgcggcagaggcgctcgcctccagcagtgctacagacagtggtgggggaggagcaggaggaggaggaggaggaggtggaggaggatcgggcggaccaggagcgggaggaacgggaggcgtaggcagtgcgcccgccacacccaatgccacaattagcgccgccgccgactccagtgataatcaacccggcacgccgcagcccacgcaacagcagcaatcgacgcagcaacagttgcagcagccacaatcgcaacagcagcagcagcaggccatgggtggaggagatccccagcagcagcaacagcagcagcaggtaacgggtatcacccaccagccgtacgccacccaccacatgtactccgcatctggcggacagcagcaacaacagcagcagatctacggcggactctacggcggggacatgcagcagcagcagggttacgccagcagctacatcaacagctacgagcagttctaccagcagcaacagcagcagcagcagggcactgattacgcctttggcaccgtgggcgttgactatggcaagagcgccggtgttcgctatcatccctacctgcagacgccaacctccggactgggaggcattccaacggccagctcggcacaggaggaggcgggcagtgcgcccagcgcggtcagcaccaccacagcggtggccatgagtccgcgtgtggttagcagcagcagtccaacgtcgacgtcctcgcacctgcagctgggcagctccagtggccagacaccaggctcaccaggcggagccgccggaagtgccggatgcaagttgcagtgcaagaagtgcggcatcctcaccaccaacgagtcggagctacaggagcacatcgccaacgtgcacggagagtcgccgtacggcagcagcggttacgccagttcaccgtacatcaaggaggagatgcccacaccacagccacccggcgttggatccgcaacggccaatcccggcgaattactcgacctagattcccagaagatggtctatcaccagcagctgctccagcagcaacaacagcaacacgacgtggtcgctggactgccgctgggcgctctgccggatccgctgcactcgatgcaatctatgcagcagcgcgcactccacagctgggagcagcagccacagcagacggtggcctccgtggagggcctgccaccctacatgcagcagggattgggcgtggggctgggagtcggtgtggacaagtcgccctactactcaccaaagcagtcaccctatcatcagtcaaccggcgttggcggagccacgctgatcaagcaggagtacggcggccacggactgatcaagtccgagtatcccgattcgcagcattacgtggacaagtccttcgatcccacagctggcggagctggtggcgcggaactgtgcgccagcgtggccaccagtccggcggagttccccagcaccactacgggcggaccagggcaggagggagcggcgggtgcggcgccaggaggtggataccgcggtttcgagccacccagctcgagctccgtgctgccggccaacagcctgacggccaaggcggccacctggaagtcgaacgaggcgcgccgtccgaaaacgtacaactgcacggcctgcaacaagtggttcaccagctcgggccatcttaagcgccactacaatacgacgctgcacaagaatgcggttaagtcgagcggccagccggatccagccaccctgcccatctcggcgcaccaccatcccgcccgcgacccggtgacgaagcccagtcgcaggggcaatgccgcagccgctgcggccgccgctgcagctgccgcctcggccagcggtcagggtcagcagcaacagccgccgataccgccgccgccggccaatgtgccacccccggagccgcctagaagtccgcccgattatggcggaggaggcggcttgggcgtgggagcgatgggcggcgctgccatgtcccagtactcggcctcaccctcgcccacacagcagcagcagcaccacctcaaccaccatcagcagcaggccaacggctatgctaatggcaccgccaacggctatggctacatgcagcaacaagtgcaatccacgacaaacgcttcaccacagcacgcttccaacaacaacagcaacaaccagcagcagcagcaacaacagcagcagcaccatcagcagcagatgccgcagcaccacaactccgttttgaacggtcacccaaacgggctagcaggtccctccgccccacacaacaacaacaccacccaaatgccgtcctcccaaatgaggggcctgctgaacgaaacaacaaccacgccgccaccaacaacaacaacccgagcaccacaaatcacaacaacagcaacaacaacaacaacggcggccaccacggtagctataaagagcgagcaaatggaggacagcaaccacactcacacccacacacacacgcatcccaatcacagtcacagccaggacaggagccacagcagcagcagcagcagctcaatggccacggaggaggcggaggagcaggagctgcgggatcaggagcaggcggacgatcacctgcatcagcatcaacaggcgtcgcagcagtatctgctgtcggcgcgtcattaccacagcagcacgcccaacacgctcagcagcagcaacaccaatcccagcacgcccagcagcaactcgccccatactatctaccggcaggagcagcagggaacggatttctcgcgcaccaccccgccgccgcagccgctgccgcctatgggaatgctgccgcctatggcaatggactacaacatgctggctttggatatgcccatgcccatgcccacgctcatgcacagcaatatgctgcagtgcagcagcaccagcaccacgccgctagctactaccatcaccaccagtatgccggacactatgcagccgccgcagcagcagctggtgcaccactaccaggcggtgctccacccgctccatcagcagctgggggagcagcaccagcgccaggaggcggatcatcatcagcagcagcgggagcttcaccaactggatcagcagcagcagcagcagcaggcgttaatcctggcggacagtttgccgcacagcagcagttcgcccaccagcagctccccaccgcccaccatgcccatgccgctcaccaccatcacagcgccgcagctgctgccgctgcagccgccgccgccgcacatcaccagcaccatgcccatgccgcccaccatgcacatgcccatcatgccgccgccgccgcaatgctaccagcagctgcagccgctggaccccacaatgagctatcacactattattggtagtggcccggaggcgcataccggaacggccggcggtggctatagcaatcagatcaccaccagcgatggccagatcctgcagctgatgccaacatccctgttcgcgccatatgcaccgctctcgccgtactcggtggccgcccagcgatcgccgcaggagggcgatctgccgccggttcacacactcacgacggccctgcatgcccatcagcagggcgggcagcaggaggcgcagacgccaacgctgactgtgctctccacgccctactcgcccacagtgagcagctcgcgggcgactcccgcactggagatggatatggccacgctgatgcagcaccatcaggactatgagatggagcagtaccagatgcagcaccagcagttggatcagatgcagcagcaccagcagcaactggaccaccagcagcagcaacagatcctggcggatcagacccagacgatggcccaacagccgctggccaagaagcggcgtggcggcaacgcaacaccatcgacgacgaagcgacggcggaacagcagcgtcggatcgacgtcgccgcactcgaccaccctgccatcgggacggatcaagtgtctggagtgcgacaaggagttcaccaagaactgctacctcacgcagcacaacaagagcttccactccggtgagtacccatttcgctgccagaagtgcggcaagcgctttcagagcgaggatgtctacaccacgcacctgggtcgccaccgcacccaggacaagccgcataagtgcgagctgtgccccaagcagttccatcacaagacggatctgcgccgacacgtggaggccatccatacggggctgaagcagcacatgtgcgacatctgtgagaagggcttctgtcgcaaggatcatctgcgcaagcacctcgagacgcacaatcggccgcgggtggtgggcaagaagtccgccgcggcagcagccgccgccgcagcagcagcagcagtcactgccacggcgggattgggaggtgcaccagccgccggttccattaaggcggcatttgcccgctcgctaacggtgacggctgtgagcagtgagccaggcgcaggagttgcaataccctcagctcctgccactgccacatgtgctcctgtatctgtatcagcgtcagctcttgtccaggccgtcaatcccagtctgacttccggcctcagtctgaagcggcacatcgacgatgtggccgttgacgatgacagcctgttggaggaggacgaggatgagatggagatggagatggagatggatatgttggaggaggaagatgaggaggaggaggagctgggcgatcaccacatgataatcaagagcgagtacgtgcaggaggagtttcagatgatcgagaagagcatagagctctactga

SEQ ID NO: 39327 - protein, 1596 aa, DROSOPHILA
MTSIKTEMPPLHAAEALASSSATDSGGGGAGGGGGGGGGGSGGPGAGGTGGVGSAPATPNATISAAADSSDNQPGTPQPTQQQQSTQQQLQQPQSQQQQQQAMGGGDPQQQQQQQQVTGITHQPYATHHMYSASGGQQQQQQQIYGGLYGGDMQQQQGYASSYINSYEQFYQQQQQQQQGTDYAFGTVGVDYGKSAGVRYHPYLQTPTSGLGGIPTASSAQEEAGSAPSAVSTTTAVAMSPRVVSSSSPTSTSSHLQLGSSSGQTPGSPGGAAGSAGCKLQCKKCGILTTNESELQEHIANVHGESPYGSSGYASSPYIKEEMPTPQPPGVGSATANPGELLDLDSQKMVYHQQLLQQQQQQHDVVAGLPLGALPDPLHSMQSMQQRALHSWEQQPQQTVASVEGLPPYMQQGLGVGLGVGVDKSPYYSPKQSPYHQSTGVGGATLIKQEYGGHGLIKSEYPDSQHYVDKSFDPTAGGAGGAELCASVATSPAEFPSTTTGGPGQEGAAGAAPGGGYRGFEPPSSSSVLPANSLTAKAATWKSNEARRPKTYNCTACNKWFTSSGHLKRHYNTTLHKNAVKSSGQPDPATLPISAHHHPARDPVTKPSRRGNAAAAAAAAAAAASASGQGQQQQPPIPPPPANVPPPEPPRSPPDYGGGGGLGVGAMGGAAMSQYSASPSPTQQQQHHLNHHQQQANGYANGTANGYGYMQQQVQSTTNASPQHASNNNSNNQQQQQQQQQHHQQQMPQHHNSVLNGHPNGLAGPSAPHNNNTTQMPSSQMRGLLNETTTTPPPTTTTRAPQITTTATTTTTAATTVAIKSEQMEDSNHTHTHTHTHPNHSHSQDRSHSSSSSSSMATEEAEEQELRDQEQADDHLHQHQQASQQYLLSARHYHSSTPNTLSSSNTNPSTPSSNSPHTIYRQEQQGTDFSRTTPPPQPLPPMGMLPPMAMDYNMLALDMPMPMPTLMHSNMLQCSSTSTTPLATTITTSMPDTMQPPQQQLVHHYQAVLHPLHQQLGEQHQRQEADHHQQQRELHQLDQQQQQQQALILADSLPHSSSSPTSSSPPPTMPMPLTTITAPQLLPLQPPPPHITSTMPMPPTMHMPIMPPPPQCYQQLQPLDPTMSYHTIIGSGPEAHTGTAGGGYSNQITTSDGQILQLMPTSLFAPYAPLSPYSVAAQRSPQEGDLPPVHTLTTALHAHQQGGQQEAQTPTLTVLSTPYSPTVSSSRATPALEMDMATLMQHHQDYEMEQYQMQHQQLDQMQQHQQQLDHQQQQQILADQTQTMAQQPLAKKRRGGNATPSTTKRRRNSSVGSTSPHSTTLPSGRIKCLECDKEFTKNCYLTQHNKSFHSGEYPFRCQKCGKRFQSEDVYTTHLGRHRTQDKPHKCELCPKQFHHKTDLRRHVEAIHTGLKQHMCDICEKGFCRKDHLRKHLETHNRPRVVGKKSAAAAAAAAAAAAVTATAGLGGAPAAGSIKAAFARSLTVTAVSSEPGAGVAIPSAPATATCAPVSVSASALVQAVNPSLTSGLSLKRHIDDVAVDDDSLLEEDEDEMEMEMEMDMLEEEDEEEEELGDHHMIIKSEYVQEEFQMIEKSIELY

SEQ ID NO: 39328 - DNA, 4863 bp, DROSOPHILA
ggggctaggatgtgggtgctggctgctccaatgcggtgccacatgtgcgttgctcaacccctcggaattacgcatgcctttagctctaggcattgttgttggcgattgggcggcggtgggtggacacactgggcttgtggccaaatgtgcagaaagcataagccaaagcttttttatcgctccgaaaatgaggctaactcgctggctcacaaaaaaagtgaaagtagttcgaacgcactcgaaggaacttcgctttaagacgattctgaaaagtgtgttttaaagtatttgcagttgacttttactcattccccctttctcacttccattttaactagaaaacaaatcagcctggctaagatttttaagttgtataatatttattctatatattacaaattctgataagtacatacatatacaaacatctctaccacatcaaatatatagtaagattaaaaattacagaaaatattttacaacttttatttatttatttatttatttgttgcagctataaccttcactgagtgatataaagaccactctgaatattggttttaatcagcataattaacgtttttatcagtgtcagcgagttttaatttaaaacttgtaaaacaactacaactcaacttactctacaaagagtctacaaagtgcttagagaaggtagtaaagttgggcgttcgtcttcaattcagcttacaaatggcttactttcttgtaaacagaaatgaaacaaaatattttaagcatttagtaacatgttttaacgtttgttttcaaataaatatttaaattccgttgggcgttttgcagtactagaaaaaagtttacgaattgaccagggctgcatcgacgagctgtcgatcgataggtccgcgctttatcgatccatcgagcggcaagatatcgagaattttcgaaattattttcagtttgacgcttgttgttttttttttctcttgaaagtcaagttcgaacggatacgaaccgaatggctacgctacggaaccacctatcggcgggcggggggttgaaccacagcggcccggactcgccacaggagccgcaggacgcgggcgccacgctggccatcggctatgtgcgggagttcaggatgcgcgtggcctgcttccaggtgcagcgctccgaggaatcgctggtgtacgtgcagcgcagcgttgcgctgctaggcaccaaggtgctgccggcgcactttgcccccacgccaggcaacctggagctggcccgcttctatgtggatctctacgcgctgatgggcgcgctgaagaacgagggtgccgagggcgatgtgctgtgggcctgcgttggactggtgcagcactgctcacggaatctggaggcccgccaggcggtcgtcgagcatttctgctttgtgccgctgctgggagtgctcataaggcataccaaacgaacggaacgggtgcaccggctgctggtgctgctgcaggaccttacatacggcataaaaatcgcctgggaggagcccttcctggctgcgctgatcgagcatctggtggggatcgtactgtgtacggaagacgtctcctgcactgcgagtggtgggtccgttcgcgacgacgacgacgaaaatacaatgctcgccctctccgtgctggtgaacctttgctacaagaacttcgccgtgctgttcctctttctgcgcagcgtcaacatatccgccttttgccggcgcatccagaactacggcctgctggcgtacaaaatgctaatcatcctctcggaggacgtctactccttccagcagtccgagctgtgcaccttcctgcgcctgtcgttcgccggcatcgaggactgcctgaagcactggaacgtcgcccagctgcggcatatcgttgacttcctcttggactcgcagagccaccccggcctgcatagggcgatgttgtcgcacggccatttctgtgaggatttcgagaagctgctggacgtgagtagcgctggatatccagctggacgcacttctaacagcttttacccttttcagcaaatcgacactagcaacggcatggacgtttcgcaggaggagacgagcaagcaccaacaaatttcgctcggactggtcttccgcctcgtcagctacattctgcagatgtccgaggaagccaacagctgcatcagcttggacgccatcacgccgcgcttgtatgagatggtcagcgactggatgagctccgatcaatgcggcgcggcggctattgagctgatctgcaccctgttgcgcctgggcaaacgtgcggcggtggccgagatgatcgccaacgatccctctcacgtggccaagttggtggccagcgccgagcgaccggacacggatgccggtcaagtgttagccactctgcgcctgctgatcgccctgcttcaggagacgaagaccaataaagtggtgctgtccaagatctccgagtcgtacttcgataagatcctggctgctccgctcgccctcgttccccagtttctcagcacacagagcctggcgcagtgcgaggtggagaaagcttgcttttgcctgctgctgctcgtcaatgtcgccggcatcgccaagaaggcctatctggacaagtgctgcacactgctggagcagccgcagctgcagtactgcttagcccgcggtatggtcagcaaaaacgaggcattggtggctgccgttctacaaattgctcagttcgagcattttcccaaggcatctgtagcaaaggtatatctgtaaatatatatctataaataagttctataacctcttactccctctaaagcatgtgtctgctatcacctctagtccaggtggaatgatgacaaaggcttcagctgtcggcagcgaccaggtcgagcagttgcgcaatctaagctcgatcttcaaggccaatcgcattttcaccgacaaagacatggtccagcgggttaacgcacttctggacaacatcggcggcattgtgagccgcaacgaactggcatcggcacccacctcgcaggtgatcgagctgtacaaccaccgcatcgagagcctgaacggcaccgtggcgagccttcagcagcgcctggagcaggctggcgagcagctgactattggtacacagcaggcccacgtgcagagcgccgagctcgaacgctttcagtctagcaacttccagctgcttattagccaagaacggtaggtgaagagtaaatcccattgcgatctaactcgctcatgatcttcattatcctcattatccttaggctgcagacccggtgcaaggatctcaaacagcagaaggtcgaactgaagagcaatatgacaatcctgctcaagcaattgtccgagaactccgtccaattgcaggccaacgaacggcgattaaccgtgaaaaagtcggagattgccgatcttcaaaaggactgcgagaatctgcgatcgaaactgagtgccaaaagcgaggagctcactaagctggaggctcacaacaaggagaacgtaagagccttagcgtaggaccattagatcgccagagcacccatgccattcggcgctctctttgcagatctctcgtatcgacaaactcaagaagtccatggcggcctacgagcaggacatgacggagaagctgcgcaccatcggtgagcgggatcgggagctggccaagacgcaaaaggctctcgaggagcagcgggaggcctgcaagaagtccgaggacctgatttccgtgctggagacgcagctgcaggagcgcaaggctcagatcgagagcctcgagatggaacagaaggagacggaggacttgcggaagacgatcatgagtctgatggagagcaaaaagccgaagcggaaggcttgatactcaactgcaactcatttttaatatagcttagactagtagcatctatcgatgaactccactccgccggcatcaaaacgttatttttttcatatttatatacatttattgcgtcttgcactgtataatgcaatacattattgccgtgcaaggttccattccaattccaattcaaccaaaaatacaaaacatttgaataagccaagcgtattttacaaattactataagttctctatgcgcgatttgggacttgtgcggtatgcaggtctactacaggtatgggtgtgttattcactaaaagcttttctaaacgctcatccatcgcttgtggctgtgcgccgactactttacgcttacatcactaacaccagctcgattctcagagttacacatcttaaatcccagcgagggaattatataaaacggaatatagtgtggaatagcgtacaaaagaaacaatcacaatcgaaacaaggaagcatttccaacttgcaatatatacaatctcggtatatacagtgcaccgcatggaggaggaggaggaggaggaggagaagccagagcggtatgatcatcatcgggcttgggcttgaagaatggaaattgctagttttaggaaccgaagtggtccttatcctgatcgatggtcgcaaactcgtagctgccccggccatcgaactggaggtagtagtcgtggtgcgcccacagcgacttgcggtgcgagaccgtaaacagcgtgatgcccacctcgcggcaatagctgtacatcttgccctccacatcaacggagacggcactggtgcactcgtccaaaatggcgaactgcggcttgtgatagaatagcctagccatcgcaatgcgctgcttctcgccgccggacagcacgtcgatccagtcctcaatggagtccaggccgttctcgcgctgctccaggtaggtcagctgcacaatgtccaggtagtgcatgagatcctcgtcgctatgtcccaggcgacgcat

SEQ ID NO: 39329 - DNA, 2613 bp, DROSOPHILA
atggctacgctacggaaccacctatcggcgggcggggggttgaaccacagcggcccggactcgccacaggagccgcaggacgcgggcgccacgctggccatcggctatgtgcgggagttcaggatgcgcgtggcctgcttccaggtgcagcgctccgaggaatcgctggtgtacgtgcagcgcagcgttgcgctgctaggcaccaaggtgctgccggcgcactttgcccccacgccaggcaacctggagctggcccgcttctatgtggatctctacgcgctgatgggcgcgctgaagaacgagggtgccgagggcgatgtgctgtgggcctgcgttggactggtgcagcactgctcacggaatctggaggcccgccaggcggtcgtcgagcatttctgctttgtgccgctgctgggagtgctcataaggcataccaaacgaacggaacgggtgcaccggctgctggtgctgctgcaggaccttacatacggcataaaaatcgcctgggaggagcccttcctggctgcgctgatcgagcatctggtggggatcgtactgtgtacggaagacgtctcctgcactgcgagtggtgggtccgttcgcgacgacgacgacgaaaatacaatgctcgccctctccgtgctggtgaacctttgctacaagaacttcgccgtgctgttcctctttctgcgcagcgtcaacatatccgccttttgccggcgcatccagaactacggcctgctggcgtacaaaatgctaatcatcctctcggaggacgtctactccttccagcagtccgagctgtgcaccttcctgcgcctgtcgttcgccggcatcgaggactgcctgaagcactggaacgtcgcccagctgcggcatatcgttgacttcctcttggactcgcagagccaccccggcctgcatagggcgatgttgtcgcacggccatttctgtgaggatttcgagaagctgctggaccaaatcgacactagcaacggcatggacgtttcgcaggaggagacgagcaagcaccaacaaatttcgctcggactggtcttccgcctcgtcagctacattctgcagatgtccgaggaagccaacagctgcatcagcttggacgccatcacgccgcgcttgtatgagatggtcagcgactggatgagctccgatcaatgcggcgcggcggctattgagctgatctgcaccctgttgcgcctgggcaaacgtgcggcggtggccgagatgatcgccaacgatccctctcacgtggccaagttggtggccagcgccgagcgaccggacacggatgccggtcaagtgttagccactctgcgcctgctgatcgccctgcttcaggagacgaagaccaataaagtggtgctgtccaagatctccgagtcgtacttcgataagatcctggctgctccgctcgccctcgttccccagtttctcagcacacagagcctggcgcagtgcgaggtggagaaagcttgcttttgcctgctgctgctcgtcaatgtcgccggcatcgccaagaaggcctatctggacaagtgctgcacactgctggagcagccgcagctgcagtactgcttagcccgcggtatggtcagcaaaaacgaggcattggtggctgccgttctacaaattgctcagttcgagcattttcccaaggcatctgtagcaaagcatgtgtctgctatcacctctagtccaggtggaatgatgacaaaggcttcagctgtcggcagcgaccaggtcgagcagttgcgcaatctaagctcgatcttcaaggccaatcgcattttcaccgacaaagacatggtccagcgggttaacgcacttctggacaacatcggcggcattgtgagccgcaacgaactggcatcggcacccacctcgcaggtgatcgagctgtacaaccaccgcatcgagagcctgaacggcaccgtggcgagccttcagcagcgcctggagcaggctggcgagcagctgactattggtacacagcaggcccacgtgcagagcgccgagctcgaacgctttcagtctagcaacttccagctgcttattagccaagaacggctgcagacccggtgcaaggatctcaaacagcagaaggtcgaactgaagagcaatatgacaatcctgctcaagcaattgtccgagaactccgtccaattgcaggccaacgaacggcgattaaccgtgaaaaagtcggagattgccgatcttcaaaaggactgcgagaatctgcgatcgaaactgagtgccaaaagcgaggagctcactaagctggaggctcacaacaaggagaacatctctcgtatcgacaaactcaagaagtccatggcggcctacgagcaggacatgacggagaagctgcgcaccatcggtgagcgggatcgggagctggccaagacgcaaaaggctctcgaggagcagcgggaggcctgcaagaagtccgaggacctgatttccgtgctggagacgcagctgcaggagcgcaaggctcagatcgagagcctcgagatggaacagaaggagacggaggacttgcggaagacgatcatgagtctgatggagagcaaaaagccgaagcggaaggcttga

SEQ ID NO: 39330 - protein, 870 aa, DROSOPHILA
MATLRNHLSAGGGLNHSGPDSPQEPQDAGATLAIGYVREFRMRVACFQVQRSEESLVYVQRSVALLGTKVLPAHFAPTPGNLELARFYVDLYALMGALKNEGAEGDVLWACVGLVQHCSRNLEARQAVVEHFCFVPLLGVLIRHTKRTERVHRLLVLLQDLTYGIKIAWEEPFLAALIEHLVGIVLCTEDVSCTASGGSVRDDDDENTMLALSVLVNLCYKNFAVLFLFLRSVNISAFCRRIQNYGLLAYKMLIILSEDVYSFQQSELCTFLRLSFAGIEDCLKHWNVAQLRHIVDFLLDSQSHPGLHRAMLSHGHFCEDFEKLLDQIDTSNGMDVSQEETSKHQQISLGLVFRLVSYILQMSEEANSCISLDAITPRLYEMVSDWMSSDQCGAAAIELICTLLRLGKRAAVAEMIANDPSHVAKLVASAERPDTDAGQVLATLRLLIALLQETKTNKVVLSKISESYFDKILAAPLALVPQFLSTQSLAQCEVEKACFCLLLLVNVAGIAKKAYLDKCCTLLEQPQLQYCLARGMVSKNEALVAAVLQIAQFEHFPKASVAKHVSAITSSPGGMMTKASAVGSDQVEQLRNLSSIFKANRIFTDKDMVQRVNALLDNIGGIVSRNELASAPTSQVIELYNHRIESLNGTVASLQQRLEQAGEQLTIGTQQAHVQSAELERFQSSNFQLLISQERLQTRCKDLKQQKVELKSNMTILLKQLSENSVQLQANERRLTVKKSEIADLQKDCENLRSKLSAKSEELTKLEAHNKENISRIDKLKKSMAAYEQDMTEKLRTIGERDRELAKTQKALEEQREACKKSEDLISVLETQLQERKAQIESLEMEQKETEDLRKTIMSLMESKKPKRKA

SEQ ID NO: 39331 - DNA, 4850 bp, DROSOPHILA
agctggaggctcacaacaaggagaacgtaagagccttagcgtaggaccattagatcgccagagcacccatgccattcggcgctctctttgcagatctctcgtatcgacaaactcaagaagtccatggcggcctacgagcaggacatgacggagaagctgcgcaccatcggtgagcgggatcgggagctggccaagacgcaaaaggctctcgaggagcagcgggaggcctgcaagaagtccgaggacctgatttccgtgctggagacgcagctgcaggagcgcaaggctcagatcgagagcctcgagatggaacagaaggagacggaggacttgcggaagacgatcatgagtctgatggagagcaaaaagccgaagcggaaggcttgatactcaactgcaactcatttttaatatagcttagactagtagcatctatcgatgaactccactccgccggcatcaaaacgttatttttttcatatttatatacatttattgcgtcttgcactgtataatgcaatacattattgccgtgcaaggttccattccaattccaattcaaccaaaaatacaaaacatttgaataagccaagcgtattttacaaattactataagttctctatgcgcgatttgggacttgtgcggtatgcaggtctactacaggtatgggtgtgttattcactaaaagcttttctaaacgctcatccatcgcttgtggctgtgcgccgactactttacgcttacatcactaacaccagctcgattctcagagttacacatcttaaatcccagcgagggaattatataaaacggaatatagtgtggaatagcgtacaaaagaaacaatcacaatcgaaacaaggaagcatttccaacttgcaatatatacaatctcggtatatacagtgcaccgcatggaggaggaggaggaggaggaggagaagccagagcggtatgatcatcatcgggcttgggcttgaagaatggaaattgctagttttaggaaccgaagtggtccttatcctgatcgatggtcgcaaactcgtagctgccccggccatcgaactggaggtagtagtcgtggtgcgcccacagcgacttgcggtgcgagaccgtaaacagcgtgatgcccacctcgcggcaatagctgtacatcttgccctccacatcaacggagacggcactggtgcactcgtccaaaatggcgaactgcggcttgtgatagaatagcctagccatcgcaatgcgctgcttctcgccgccggacagcacgtcgatccagtcctcaatggagtccaggccgttctcgcgctgctccaggtaggtcagctgcacaatgtccaggtagtgcatgagatcctcgtcgctatgtcccaggcgacgcatgtcatcgcgcgtgtgtggataaatgatctgtcgatggcagcagacgatgttatagttaaagtccataaactcctgctattaaatcgcttctcacctggtcacgcagtgttcccagcgtcatgtagggcctctgaggtacgtagaaaagcttgccgcgcgacggtttcgtcactttgccgccccacgtcggccacagctcaccgaggatgcgaaacagggaggacttgccacagccgttgggaccgcagaccaggacgtttgtgccagacctgcaatgatcgaaatcaatgagcattaatcaatcaatcagtttcttcgttagcagtaatgtaatgtaatcttgatcgccatatatatatatatatatgcttacttcacttcaaaagacagctcctgcagcagtacatcgccgttgggcgtcaccagtggcaccttttcgaagcggataatgttgtcctcgaagcacatgatgcccttgtttggtccaaagttgcttgacgccgatccgacggcgttttgcgcaaggttgttgccgttcaccatggtgcgttcgtaggtgcccttgttgaggtcgctcagaaccttaattagctcggtcatgcgggcggtgaagccggccaggcgggacatctcacgtccagcgagcaccaggcgtccgatggcctccgccagcttgaccagcatgcgtccgtaggtgtagtaggcctgcaggcgctggccgctattctcaccggacagcagcggatggttttcggagaagaagggaatggagacggcgtagaagcccacaatggaggcgaaatctgtgggcgaaagttgaaaatgttggaatcaggtgcactcgaatgtagatagttgcagatgcattcgtacatttgccgataatgttgtcgatgatgcccatgctgacgcggaactcgaggaacttgcgcagatgcgaacgcagcttggagtagctggccagcagggtgagcttctcgcgcacattgccctggtagaaggccacctcctccgagttggtgatcagtcggctgttcacatagcggaactcgccctccagcttctgctcctcgacggtcaggcgaccagttggggcggcgcaggcgtgtcaggaagacgccggcgaagagcaggtagagcatcaggatcgaatggtgtcttgccgcccaggttcaccgtcaggcggtacacgtagatgaagatgtccagcacgggcttgctgatgttggagtagaggtccgtggcgctctcgcagaacttgtcgatgtccgtggtcagcagctggtcggcgttggctatcctattgtccagattggacattttgtagtacgtgtagccgctgcaatcgaacgagtctggttaatatctgcccgactggctgagcaatctgtccatggcactcactttaggtactgactgtacaggtggtgtgtgaggttggtgcggaacctcagcttcaactcacccaagctccacttgaggacgttggtcacaacggagatctgcaagaaacagcaacgcgaagctagaactattcgttgtgtgggtaaatcgcattagtatcccataccgctggcagagctgtcaggtatttgagcagcgccgtcttgaacttggtgcgattcatgtgtatgatggtgctctccaccaccgtcgcgttctggatcatccagatgtcgctcaccgagcggccaatcagtgcggcggccaccaggaagagcagtccggtctccacgctccagaagccgggaatgaggatggctgcaagggaagggaaggttgcacgtgatccgagagactgctaaaggatctctatgaggatctacttacggagtagctggcggagctgtttgaagaatactgagttaacgtgcgcctttcccgccttcttatccttcttctcggcaattgtgtactggatcttgtcctcatagccgggttttctgcaatgaagatagcatattaaaagtgtttgtaactaagctatatgtcgtttgaagcaataaaatatgagagaaattaataactctattagttggccgtatttacaaaggttctttctgtttgccctctatagatatatagatataataatacatatgtttgatctttgtggatggcagacaattggactgctcaaaatctccattgagtgctaatggatttgggttatggctcaataaacttaataataaattaaaactcgtacagcagttatgaaaaatgttgataagaggagtggtcttatcattccaaaactgtttttagccaacgatgttgtgcagtttcgatcattggccaggcaaatgtgcaacgttgatggcaaatttatgaaataaatcacaataattaaactccctgtttggatagccaatttgaatagcaacctttgcctttttatagcaagtcgcgctatcatcggcgccgcaaataaagaacgaacttcgtgtttagtgtctccataaagtcgcttatttgcaatgaaggtgtgcgattaaatccaacaattaagacgccgggatgagccatgacttttcacaccaccgcacttcattaggttggttaatgacaaatagataaatacaaaaaaataaaaaaacgactcgatcatcgttcgtactttttacaatccggtaaattattcacatgaagcctgctaaattttgcgtgcgttaacaaatcgtcactctaaatattcgattcgtttgataaacaaacatttagcccgtctatgcagcaatactgcaagcgaagtcgctgtgagcaaagtactcaatattgtgcagatatatgtagaaacttttccaaacaagatgccatggaatcgatcaataaatcagttggctaactttttaagtccaccatttaacgtgcgtaattcacaaaatgtttcgactaattagccgatcgataagttttatcaattaaaacgattataatttccaaaaaaaaaaaaaaacataaaatatttattttagattgcatggaaattcggctaaatagtttaactatctcaaacattactcacaagctatgggctttcgttatcacttttgcttgagcgtacattaaaaaaaaagcacatttccccaaatttgctacatgaaatgcttccgagataatttgtttgaattcttttcagctgctaatcgttgtgggatcaaggtccggatgaaaaccggtgcccagagctgaccagctcaacacaagccactgggcccattggctaaccggcattggatcgccaatcggatcggatcggatcggatcggatcggtatcgtatcgaatcggatggagtccaaaatcgccacctgcccagggttcgaagtctatgggataatgtgggtgatgagatgtgaggtgctggtgttgctggtgctggtgctggtgctggtgctggtgctactggtatgttaggccaaacaaagtacaaagctcgcgccttggttatctgcaggctg

SEQ ID NO: 39332 - DNA, 1857 bp, DROSOPHILA
atggagacactaaacacgaaaaaacccggctatgaggacaagatccagtacacaattgccgagaagaaggataagaaggcgggaaaggcgcacgttaactcagtattcttcaaacagctccgccagctactccccatcctcattcccggcttctggagcgtggagaccggactgctcttcctggtggccgccgcactgattggccgctcggtgagcgacatctggatgatccagaacgcgacggtggtggagagcaccatcatacacatgaatcgcaccaagttcaagacggcgctgctcaaatacctgacagctctgccagcgatctccgttgtgaccaacgtcctcaagtggagcttgggtgagttgaagctgaggttccgcaccaacctcacacaccacctgtacagtcagtacctaaacggctacacgtactacaaaatgtccaatctggacaataggatagccaacgccgaccagctgctgaccacggacatcgacaagttctgcgagagcgccacggacctctactccaacatcagcaagcccgtgctggacatcttcatctacgtgtaccgcctgacggtgaacctgggcggcaagacaccattcgatcctgatgctctacctgctcttcgccggcgtcagaagctggagggcgagttccgctatgtgaacagccgactgatcaccaactcggaggaggtggccttctaccagggcaatgtgcgcgagaagctcaccctgctggccagctactccaagctgcgttcgcatctgcgcaagttcctcgagttccgcgtcagcatgggcatcatcgacaacattatcggcaaatatttcgcctccattgtgggcttctacgccgtctccattcccttcttctccgaaaaccatccgctgctgtccggtgagaatagcggccagcgcctgcaggcctactacacctacggacgcatgctggtcaagctggcggaggccatcggacgcctggtgctcgctggacgtgagatgtcccgcctggccggcttcaccgcccgcatgaccgagctaattaaggttctgagcgacctcaacaagggcacctacgaacgcaccatggtgaacggcaacaaccttgcgcaaaacgccgtcggatcggcgtcaagcaactttggaccaaacaagggcatcatgtgcttcgaggacaacattatccgcttcgaaaaggtgccactggtgacgcccaacggcgatgtactgctgcaggagctgtcttttgaagtgaagtctggcacaaacgtcctggtctgcggtcccaacggctgtggcaagtcctccctgtttcgcatcctcggtgagctgtggccgacgtggggcggcaaagtgacgaaaccgtcgcgcggcaagcttttctacgtacctcagaggccctacatgacgctgggaacactgcgtgaccagatcatttatccacacacgcgcgatgacatgcgtcgcctgggacatagcgacgaggatctcatgcactacctggacattgtgcagctgacctacctggagcagcgcgagaacggcctggactccattgaggactggatcgacgtgctgtccggcggcgagaagcagcgcattgcgatggctaggctattctatcacaagccgcagttcgccattttggacgagtgcaccagtgccgtctccgttgatgtggagggcaagatgtacagctattgccgcgaggtgggcatcacgctgtttacggtctcgcaccgcaagtcgctgtgggcgcaccacgactactacctccagttcgatggccggggcagctacgagtttgcgaccatcgatcaggataaggaccacttcggttcctaa

SEQ ID NO: 39333 - protein, 618 aa, DROSOPHILA
METLNTKKPGYEDKIQYTIAEKKDKKAGKAHVNSVFFKQLRQLLPILIPGFWSVETGLLFLVAAALIGRSVSDIWMIQNATVVESTIIHMNRTKFKTALLKYLTALPAISVVTNVLKWSLGELKLRFRTNLTHHLYSQYLNGYTYYKMSNLDNRIANADQLLTTDIDKFCESATDLYSNISKPVLDIFIYVYRLTVNLGGKTPFDPDALPALRRRQKLEGEFRYVNSRLITNSEEVAFYQGNVREKLTLLASYSKLRSHLRKFLEFRVSMGIIDNIIGKYFASIVGFYAVSIPFFSENHPLLSGENSGQRLQAYYTYGRMLVKLAEAIGRLVLAGREMSRLAGFTARMTELIKVLSDLNKGTYERTMVNGNNLAQNAVGSASSNFGPNKGIMCFEDNIIRFEKVPLVTPNGDVLLQELSFEVKSGTNVLVCGPNGCGKSSLFRILGELWPTWGGKVTKPSRGKLFYVPQRPYMTLGTLRDQIIYPHTRDDMRRLGHSDEDLMHYLDIVQLTYLEQRENGLDSIEDWIDVLSGGEKQRIAMARLFYHKPQFAILDECTSAVSVDVEGKMYSYCREVGITLFTVSHRKSLWAHHDYYLQFDGRGSYEFATIDQDKDHFGS

SEQ ID NO: 39334 - DNA, 3506 bp, DROSOPHILA
gccttcggtgaatcctacacaagcgaactggactgtaaggacaccccacgtttcgtccttttttgcatagggactagggaaaaccctaatgtttccggtcaacttgccctgagggtcgtcccctctattgccatcgccctcatgctgcttgctgggaaatggccaaataaaatgacgatcaataatttcctttgttggccaacttatcgggggattaaatttgcagggagaatccttttcgtgccgatgccctttttcttgtccactcaactgttcccgtccatgttaacttcaaatgtgcttgtcatttatttatgtggctccggtcgccattgattttcttcggttgccgaattgtctcagcccttaaaaggttttcaattagccgaacaaacagttttaacaagtttcggctgttcgaagggaaattggatatcgaatgtcggttgtcattggtgaatctgaagcaaaagagtgcttgggatgccttcggtaaacttggtccctaatcaatcttttctaacaacttcagcagcttcattaggattcacgtttccgtttggctaatccgtatgttcgcagaacccgaaaactaagctttctccatactaattagccgtcagcgtggggtattatgtaaatggagtccgttagtcagtcgcccgctctcacttttcctttccattttccgtttccctaaccaccagctaattgcttaacccgcttactcgaataacacgcatacgccgtgtgttcccattccattcaagcattaagcagtattttctttagctgcctctgtttcctttgtctctctaatgataagaacttaataaggccacaatagctctgataaagccctaagcgcagcgcacagggagaagctatacgatatataaaataaagaaatttcttcaatatttttccaatttactatataataataaaaaaaaaaaaaaaaaattccaacgttaaagtttactgttaaataaatataacattaaatgacttgtaatcccgcactaaggctcatgaatcgttttatgagtgaactcaccacaatgggcagcagcagctcgtgagtctcgttgccgcgccacagatgcgagtcctgcggcacattgggaatctcgcactcgagcgaattgattttctcctgcaggcgactcaggatgcgcggcctggcgattggctttgaagcggtcttagtgggattagctgcggacggacgagtcctggcggtggccagcagagtggccatcgttgtggtggtgctggtgctagtgctggtggtcgatgatggggatgccgtcgacttgtcaaccgactttggcggtgtcaaggccttgagcaataatttggcacgcttaagctccttctgatattttccagttgttgttgccgggagtctggttgttgttgctgccgtggtagttgactcagcagttgttgttgcggtgcttcctgccgctgtagttgtggttgggccaaaagttttcccttctggcgtcacgttcgagcttgtggcccgagtcgtatcctccgctgactttatcggactgccttcagccttggctgccttcattaacttgcgcttattgtggagcagcatttcgttgtacagctccttgctgttgtaaaactttgtggtggagaattcgggatgcgaggctggaggattgggcgcgtcggcatccgtttggaacttggtgttggcaaagtcaatgtgcggcatggccatcacatcgctggcccgatgctgcatgggaaactcgaagctcttcttgacccggcgatcaataaaggtattgcccggatgctgcacggtcgtaactctgggcctcaaagttgtcgtttcatgcagctggaacttgctctcgatttcggtaatcaaatcatcctgatcggccagcagtttgcccgtgaaatcggctgtggttccctggtgcggtctgctcgttgtgggcttcactgtggtcgagctgccgaacttttcctgatttatttgaatcttgtccttcatctcaatcacctctttgtcgaccatcatctccacttcgttgggcatcagattctgcttgtattcctcggcattttcatgctgggtgaacacggttctctgcttaatcaactcgtcattatcgttccggataattggctgaatgtcctcgattttcagtggatataggtccactatattcagtttgctggccgtgggctgctgggccaacatggcgtcgtatctagcccgttcctcctcgttcaagtcggccaacgtttcggctacttgatatgaggcagcagcctgcatctgaatctgcagcggggaaattgtgggggttacatcctgctcatcctgctcatcctgatccatggcttctggttgctcagtggtggttgtcgctccatccactggcttttcgctcagtttaatccgatgcagtgcatccttgatgctgcctatttcacccaaattggcttgaaccatcttttgggtggttgtcattagcctgactgtagttggtgtgggtgtggaagtttcctccatttcatcctccgccacggttgttgccctggtcgttgttgtgctagttgtggccgtcgtggtgggcgtggccgttgaggttgacccgcccagagctgaaatttccctcgattcctccgtggaagttttcaaaagcgttctgttgcttttcgcagtcaagtcatttgttatggtttcactagttgttgctgccaccaccgcaattaccaatgttaaaacgtagattttccacatttttctggctttgaaattccctttggggattcttcctcgtttgaaaaaattctggtactattccaatttttataaatatccgctcatggcgactgcaaatctgtgaatagaaaaatagattgtattagtgcaacaaagttttggtttccctttcctgcgaccacaaccatttatttgttaaacaaaaaacggtcatattttatggataaatccatggccggctgactttctgttgtttggcttttctggcaaatatatttgcatttaatcgtatttattttccatcgagtttcgctttacagcattggtttggctgtttgaaaatctgacggcacaaatagaatttataatgccaggcaacatattaattaaaattccctccaccctccaagctcattgtttgcagaaatgccacgcgcacttgaaattttccaatacaacaataaactggtaaatacacttgttcaacgaatttctggcacttcaaaaagagttttcactcgatgagttgttcgagagtaagcaacaaatttacgcactcaacacttaaaagtttttactaaatgcagtatgaatgtttttgtcagctaatcgaatgatttcccttatgcgggtcaagccattcataatccattggtcaaattgaatacatgccaaagttaaataacttacacatgcaattgaatttgatggcccgataaaaggaagaaaactggaattacataat

SEQ ID NO: 39335 - DNA, 1506 bp, DROSOPHILA
atgacaaccacccaaaagatggttcaagccaatttgggtgaaataggcagcatcaaggatgcactgcatcggattaaactgagcgaaaagccagtggatggagcgacaaccaccactgagcaaccagaagccatggatcaggatgagcaggatgagcaggatgtaacccccacaatttccccgctgcagattcagatgcaggctgctgcctcatatcaagtagccgaaacgttggccgacttgaacgaggaggaacgggctagatacgacgccatgttggcccagcagcccacggccagcaaactgaatatagtggacctatatccactgaaaatcgaggacattcagccaattatccggaacgataatgacgagttgattaagcagagaaccgtgttcacccagcatgaaaatgccgaggaatacaagcagaatctgatgcccaacgaagtggagatgatggtcgacaaagaggtgattgagatgaaggacaagattcaaataaatcaggaaaagttcggcagctcgaccacagtgaagcccacaacgagcagaccgcaccagggaaccacagccgatttcacgggcaaactgctggccgatcaggatgatttgattaccgaaatcgagagcaagttccagctgcatgaaacgacaactttgaggcccagagttacgaccgtgcagcatccgggcaatacctttattgatcgccgggtcaagaagagcttcgagtttcccatgcagcatcgggccagcgatgtgatggccatgccgcacattgactttgccaacaccaagttccaaacggatgccgacgcgcccaatcctccagcctcgcatcccgaattctccaccacaaagttttacaacagcaaggagctgtacaacgaaatgctgctccacaataagcgcaagttaatgaaggcagccaaggctgaaggcagtccgataaagtcagcggaggatacgactcgggccacaagctcgaacgtgacgccagaagggaaaacttttggcccaaccacaactacagcggcaggaagcaccgcaacaacaactgctgagtcaactaccacggcagcaacaacaaccagactcccggcaacaacaactggaaaatatcagaaggagcttaagcgtgccaaattattgctcaaggccttgacaccgccaaagtcggttgacaagtcgacggcatccccatcatcgaccaccagcactagcaccagcaccaccacaacgatggccactctgctggccaccgccaggactcgtccgtccgcagctaatcccactaagaccgcttcaaagccaatcgccaggccgcgcatcctgagtcgcctgcaggagaaaatcaattcgctcgagtgcgagattcccaatgtgccgcaggactcgcatctgtggcgcggcaacgagactcacgagctgctgctgcccattgtggtgagttcactcataaaacgattcatgagccttagtgcgggattacaagtcatttaa

SEQ ID NO: 39336 - protein, 501 aa, DROSOPHILA
MTTTQKMVQANLGEIGSIKDALHRIKLSEKPVDGATTTTEQPEAMDQDEQDEQDVTPTISPLQIQMQAAASYQVAETLADLNEEERARYDAMLAQQPTASKLNIVDLYPLKIEDIQPIIRNDNDELIKQRTVFTQHENAEEYKQNLMPNEVEMMVDKEVIEMKDKIQINQEKFGSSTTVKPTTSRPHQGTTADFTGKLLADQDDLITEIESKFQLHETTTLRPRVTTVQHPGNTFIDRRVKKSFEFPMQHRASDVMAMPHIDFANTKFQTDADAPNPPASHPEFSTTKFYNSKELYNEMLLHNKRKLMKAAKAEGSPIKSAEDTTRATSSNVTPEGKTFGPTTTTAAGSTATTTAESTTTAATTTRLPATTTGKYQKELKRAKLLLKALTPPKSVDKSTASPSSTTSTSTSTTTTMATLLATARTRPSAANPTKTASKPIARPRILSRLQEKINSLECEIPNVPQDSHLWRGNETHELLLPIVVSSLIKRFMSLSAGLQVI

SEQ ID NO: 39337 - DNA, 8472 bp, DROSOPHILA
acagcaatatgctaaatgtggccagcacctggacacatacacaccacacattcaaatatggaaataatttcaaaataaatattatttatgcacagaaaacatattaacttttgtggctacgattttaatttatgctaattatttttcactaacaactttcgactgcggtcgaacattcgaagccaggagcagcaataatctatgatatctgccttgaccgaattcaatttaaaccaccctccgatttgcgcaatttattggtgggcgaaattaattaaaactaaactaaacagaattccctgaaattagttgatataattcaagtatttgggacacattcgcgggaaattgatttcatcgcaaccaaaacgcaacacaattgaatctgcattcgctttattattatttaactaattgcaaacatttgcaaatgaaaatgcggtgaaaaccaggctttattaaaagctatcaaattctattgtatgtctgtttctcattagagtgtcatattttcggactggcaaatataattagtttggatctcttttatgtttcgtgaaaggccttgagtttcccaggcacatctcaaactaattacattgacggagatatcttttcgccctgggccaggaaaatcattttatctctttgaaagtccatatgcaaatgcacacctataaagtttaatttgggactgggcatttgcatagcaaatttatgaagattttatggccacaattagccgaaatggtctgccgtgtctggcgtgtgtgctcctttaggccagccctaatacgatttcacatgagaaaacaacataaatttaggttttctcggacaaataagctttggcagtccgggcaactgaagaaggcttaatgcaagcatattaaacatttacataatgccagatgatctcccttccaacgtggtattttataatcaaacattatcctttctgtgtcagtgtgcttgtgtgtgcttagccaaaataaaccttgataaacaagtttgctaagcctatgtatgaatgccagagattcatgtattactcatacatatttgtgtttgcattagccggaatcgtaatcattaaattaattcacacacctctttagtttattattatcgaatactgttcaatatttggaatattcatcgagtagcatcaaagataattacacaatcacccgaacccaacccactcactcccctttgcgtggggtgaatttgaccagccatccgccgcgctcgtccaagtctcactgtatcaacggcgagtgctgtgagttctcgctaaagtccaccgtgtagtacatgtcgttctccagattcattgccaggtgccgcagaaaaggtcgctcctgcagctggccacccagtgtggtctgcgtctgaggctgtccaggcagatgtcgggttacctgctgcggccctgctgctcctccggccctcggtccacccgggggcgccacaatattggtgctgctggtcgcggtggcccccttgccacttagccagtgtttgttcagtttgccctgcactttcgggcggcgactgaagcccagtatgggtataaacgaggtggaacgtgtggagaattttcgataagtctgattgaccttgcagtgacaaatggtgacctgcaacggagagaaatgtgcacgaggggttaggaaaatggttatggattgccgcctaatggtaatggaagtggagcaccgggcggtagttgccaaaaaggttatttagtcagtagctttacgtaaggctaaagtaatttttaaaatccatcttaaattaaattaaaataactacgccaaaatcattaagaaccgacctaactttgcaccataaataatccaacttaaactttcgacattaacctgtcctatgcaggactttttaagtttgcattaattcaacaagggacacatactaaatcgccttcagctaccaataaattggcatggatgcgactctccacttgaaggagcacacattgtgaacggacaccaattgtataaatttgcatctactttaagcccggcgtccaggcgattgagcaacttttggttaaagcctcggctgcagctcgaaccattttgccgacatcgaaatgaatatgcaatgccatttcgcgcactttgcataaccgcagagtacaatttcccccggtcggttatgggagcttgttcgaggttcgagcagaccaggactcccgggaaggacgagggatgggggacgagggtatgagggtatgagaggaacttaccacaacggcaacgatgaaaattgcggctgccaggactccggccgcaaaatatgcattatgcaattcaatgggactcttaagcacaaccgatgaaccgaaagttttgtcattaaaatttctggcgttcgcatcgtccacaataaattcgctggaactaacgaccgtctccaccacgaactcatctgcggaaaggccggaaagaaatcgccggaaaaagttagatagccgccgggggagacatattttctacgggccacgctgatgtccctaatcaagttaatgacttttgggcaacggaaacacaacgccccgggcaactcaccttcgcacatggttcctgtgtagccgggacgacaggcgcagtagaagctatcgccgctggaccaacaagtgccgccatgggtgcacggattcacgttgcattgctggaagtactgaaagttatgaacgcattggagggggattgcgaaatggagtgcaacgggaattgccccgcaatcagtgcacaatcagggaacattaaagctaattgaccagtactttggctaaccttattttaaaaatgtgaaataacctttcagatataggtaataagcattcaatggtttatatattcggaattctctattttcccaaaaagtaaacaacggtttcgcttcataatttcgctcgtattgtttttatagcacactttcgagctcccaaaagtgagaacaacaattttcgtattatatccttgccctcatggcgctcgtatcctctagccatgcccactagcaattagaatggaggcgccgccgccattcttcccattttctgtgtgtgcctggcatgtagaatgtaattaatttagctgccttccccaacaggagccaccagccaccagcagccgcaacttcgagccgcggtctgcccagccccaacccctgctcctgccacgccccttttccacccagtataatgacagtgttctgcggatccttgggccctcggagcagtcgcggttagtcagcgtgtccatcattttcacaaagctttaattatggcgccttgacgcttaatttatgtacattttgttaagttttattctagcaccacaaattatcaagtccattgagcgtttattaaattctttctgagttggttcaacgccgtttgggggctaactcaatttatgaaccaagttggcttgaatgggaatcgatttgcaagtccaagcaggcgggaaacttctacacggaatatcaatttcgatgagcggcctgcgcaaaccgaagtcgtaaatcagtttaaaaatgcacagcagccgcacaaacaattctgcatgcaattgggccagcaaaattggctacaattatgccactgccaacaatttgtggcaggaatcctggctggcaagactggcaggacttgcacgacttggagggcaggcagaaggaagctcccgaaaaagcggggccaaagcgaaactgcataaatcatgacttaccgttcgtggcatttgattacaatccggtccgttgcgacctcctgggcattcgcagctgaaatcatttccatgatcaatacagcgatgtccttcggggcagggcttgttggcgcagaaatcaacctagaaaacacacaacagagaaacgggcacaaatcaaagcatattgtggcggcagagatctgtagcttcattacgtattcaaaaatgtttttgcccagtattcgtatctgaaggatacactcccacacacacacacacacacacacaaccatccaatgccatttcctatgcctgtacgcgatgctcgggtcggagcaaattaaatcaatacccattcaggacgcgcagacaactgccggctggctggagtccttccactttctcatcggggaattgtcgcgggatttgttttcaatacaaaatattgattatcctggggagctagaaccaactgatgggcactcttggggctcaattttcatcgcagcttcacaagtcatgttttcgcgcatctcggattgcttcgtaaattttcaagtttacttacaagctaaggcttaagataaattacaaacaatatatcttctgcactgtgaaggcgaagtgcttgaagttattacaattcttgcaatttagatggaattatctgatgattcagatattgatttcttgtattttgtattaaacgtatgcgacactgttcactcaccttaatttggcagcggttgccgctgaatcccttcgtgcagcgacactcgtagctgccaatgtgatcgatgcactcgccgccattctgacacggattcgattcgcattcattatactcgaagttgcacagctcgccggcgaatcctgcgagacaggattcgaagaaatgaaataaaaggtgagaaggtgccagggcgggtggtgtgagagaagggttcagttgaaaagcttgcgggtaatgtaaatgtgcaaagtaaatgaaatggaaatttcaatgggaaatgggaaatgctctggctgggcgacagactactgtctcgtcttcccggaattgccctcgtctctgtctcagtgattttttatacatttactttcattgtgattgagtgcgatttatgcaaattgtgtttgtgccaatgaaataatttatgagctccgatgtagattttttgatttgcgctgatttcaattcgatttcaaaagcgaaatttgattgccttaaagtatgtggatttacccagaacccagtttaagctactacaagtttaagctagatataagttagtttcttctttctgctgcaaaacaaatatcattcatgacaaagctggcactagctttgcccctgcaacgcagcccaaaaatccaatatataatagatcccagccaaagccaacaagggatgtgtgaaatttcgacgatgataactcacaaaatattggcattatgggagcgatttcgccaacgaatcaacaaaagaatgaaggcaatttgcgtttatttggctggaactgttggtcccatttactcacctggctggcagaagcagcggaatccgtcctcctggtcgacgcagatgccgtgaacacacggcgaggactcgcactcattcaggctgtgctggcaaagaggtcctgtgaacccgggagcacagtcgcagctgcggggcgagacaaagaggggttaatactcgtacagtggggagtcgcagaaataaaacaaaaaaagaaggggaggtagggtgagtgagaggcggaggtggaacaactggggatttttgaacatgcgacaaaagtcaacatttatgagcaaacacagacggcggcggctagacagaaccgcaaaacaatggccaggataattgaatgaaggctgctcctgctgctggagaatgtgctccgccagctgaatgtgtaccctgcactcggagcaaaaaacgatggcttcattcagaaatttgcagtttaaatgatttaaaaataaacttatttgcataaattatcgcataaattggagcaaataaatgttagttactcaagaatcattaattatagttcttggtaatttctgtatgcagtgccggagtttgtttttcaaagtgcagctcagcaactcatctttcagccattcttgccttcttttcgtctattgtttgcctgggactcaccgaaagtgcgtcgagttgcccacacagctgccgccattcatgcactcggcgggattgcagggatccgactcgtattgacagttcttgcccgcgtatcctgcgaagacaaagtgcagtggatggatattaatagcattatcgctggacaccggcattcactaatgaggctccaagctaatgacctaccgtacggacacaggcactggtacgagttgccctcgtggccctgcgagaggtccacgcagatgccgttgttggtgcaaggactcggattgcaggcgtctatctcctcgcagtgtggtcctgcgaatccgctgcagcactggcactcgtactcctccattccggagttggagtagcacactcccttgccggaacaatcggcgttctcgccgcaattgtcggttttggtggtcaccttcaggcgtacacactgcgcgccccacaactcggacaccactggagggcagaaggagatgcgaaaaagggtttcatattaattaaggctacacgaaggctccgaacggaggacaaaaaaaaggcatataataggccaaacgggaaccacaaacagggaaaaaacggctcccccaaggcagcttcctctggcacgagttggacatgacaccgcatagatgaagatggaataccctagctggccaactgggaggcctattccgaggtgctgatggctctttgggttaaatatttgagttaaatattcaacagaaaaattaaattcttcaacctacttcaacttataacttaagagctgttctgttgtaaacttttatttgcaattaagactctcctctttgacaggataacctaatttcaagccacgaattcggcgcaccccgcaaaagtgagtactcaccaattagcaggttaactccctcggtgaggtccttatcgtacagagtaaccagcttcctgccgtcgaccaccagcggcgtgatatccagcaggacgccctcggtcacatcgcagtgttcgtggccggaacgagttacctgatacacctgtgtggcgtgaacggcgctgcttatggatgacgtttattgggacagaaaccagaggccagagttccaggatccagaatccaggtgtgggtggtgcggcaaaatagacacagacatccaatgagtggagctcaaaggtggcagccaagttaaatggcttatgtttgcttgcttaagttataaatatgaccgaagacgtcctagtcgctattgcttctgtcttccctgtgtatgtgcttaattaattgaaatttatttataagctgttgctcccccgcttctcctgcttcagcggaaattaaatagcacaaaagcggaaatgaaattagtcgaggagggcggctgcctcggaacgaagggtttattccgaggattctcgggccgcagggtttccttctaatttccccgttgctaggcggttattgtggttactttttgcggtagctttcagtttataagcagatattaatggagtgcaaattggtgagtcctaggattatgtgtgtacacttgctttaactttttcattatcgagtctgattcattctacctgttttataatttttgacaataattatactactataactttggttgaaagggacagatatttaacttctttgattcagtatgaactcttgaagcctttaagttttctgaattctaaaagaactgcactcgtgttcattcgaagccatcttgctcgactttgcagctcttctgagaagccttttctctacttgcactactttcctcgaaaacatagatacaaacagagggagacaccttgtatagtatccaagttagcagtttttcaacaacacgtagtcgaggaaaaaagggaaaagttgctggaaaactgcgagaccagaaagttagtggctccacctccagcttcgccaatctatttgctacccactcgcttttccttgggctcgcagcagcattattatttgttgctattgcatttgttaacttggcgggagtcgacgcacacatacacatattaaatcgataataaaaacttttttgacatctcattttcatagttggcgggaacttttctctgcggcccctgcgctcaattgtgcgctatacctcgcatcactttcactcctcaactaactcgattgtttgcggtcttattttgccccaggaaagttacaaaatcggaacttatgccaggcatttcgagttgccagagttgccgcgggccggatagggaaaaagaaaagcggaaatatagggaaaagcggaaaatttccagcgcggtcgcgtttgatgtctggcccaaagttcgacaaatgaattttaatttttcttgcgcttctcttcggggtgaaaaactttgtgatggctggcggctgcggcatctatcaagtgataagataagaaccagccgagccgagctaaattaaaaagggcaaaaagtgtggccagcaaccgggccgaaaatgatagcaaagccgagagaaacgtgataattgccatggcaaaaagggtcagccagctgtggagtgtgtgtatg

SEQ ID NO: 39338 - DNA, 1852 bp, DROSOPHILA
atgaaaaagttaaagcaagtgtatcaggtaactcgttccggccacgaacactgcgatgtgaccgagggcgtcctgctggatatcacgccgctggtggtcgacggcaggaagctggttactctgtacgataaggacctcaccgagggagttaacctgctaattgtggtgtccgagttgtggggcgcgcagtgtgtacgcctgaaggtgaccaccaaaaccgacaattgcggcgagaacgccgattgttccggcaagggagtgtgctactccaactccggaatggaggagtacgagtgccagtgctgcagcggattcgcaggaccacactgcgaggagatagacgcctgcaatccgagtccttgcaccaacaacggcatctgcgtggacctctcgcagggccacgagggcaactcgtaccagtgcctgtgtccgtacggatacgcgggcaagaactgtcaatacgagtcggatccctgcaatcccgccgagtgcatgaatggcggcagctgtgtgggcaactcgacgcactttcgctgcgactgtgctcccgggttcacaggacctctttgccagcacagcctgaatgagtgcgagtcctcgccgtgtgttcacggcatctgcgtcgaccaggaggacggattccgctgcttctgccagccaggattcgccggcgagctgtgcaacttcgagtataatgaatgcgaatcgaatccgtgtcagaatggcggcgagtgcatcgatcacattggcagctacgagtgtcgctgcacgaagggattcagcggcaaccgctgccaaattaaggttgatttctgcgccaacaagccctgccccgaaggacatcgctgtattgatcatggaaatgatttcagctgcgaatgcccaggaggtcgcaacggaccggattgtaatcaatacttccagcaatgcaacgtgaatccgtgcacccatggcggcacttgttggtccagcggcgatagcttctactgcgcctgtcgtcccggctacacaggaaccatgtgcgaagatgagttcgtggtggagacggtcgttagttccagcgaatttattgtggacgatgcgaacgccagaaattttaatgacaaaactttcggttcatcggttgtgcttaagagtcccattgaattgcataatgcatattttgcggccggagtcctggcagccgcaattttcatcgttgccgttgtggtcaccatttgtcactgcaaggtcaatcagacttatcgaaaattctccacacgttccacctcgtttatacccatactgggcttcagtcgccgcccgaaagtgcagggcaaactgaacaaacactggctaagtggcaagggggccaccgcgaccagcagcaccaatattgtggcgcccccgggtggaccgagggccggaggagcagcagggccgcagcaggtaacccgacatctgcctggacagcctcagacgcagaccacactgggtggccagctgcaggagcgaccttttctgcggcacctggcaatgaatctggagaacgacatgtactacacggtggactttagcgagaactcacagcactcgccgttgatacagtgagacttggacgagcgcggcggatggctggtcaaattcaccccacgcaaaggggagtgagtgggttgggttcgggtgattgtgtaattatctttgatgctactcgatgaatattccaaatattgaacagtattcgataataataaactaaagaggtgtgtgaattaatttaatgattacgattccggctaatgcaaacacaaatatgtatgagtaatacatgaatctctggcattcatacataggcttagcaaacttgtttatc

SEQ ID NO: 39339 - protein, 529 aa, DROSOPHILA
MKKLKQVYQVTRSGHEHCDVTEGVLLDITPLVVDGRKLVTLYDKDLTEGVNLLIVVSELWGAQCVRLKVTTKTDNCGENADCSGKGVCYSNSGMEEYECQCCSGFAGPHCEEIDACNPSPCTNNGICVDLSQGHEGNSYQCLCPYGYAGKNCQYESDPCNPAECMNGGSCVGNSTHFRCDCAPGFTGPLCQHSLNECESSPCVHGICVDQEDGFRCFCQPGFAGELCNFEYNECESNPCQNGGECIDHIGSYECRCTKGFSGNRCQIKVDFCANKPCPEGHRCIDHGNDFSCECPGGRNGPDCNQYFQQCNVNPCTHGGTCWSSGDSFYCACRPGYTGTMCEDEFVVETVVSSSEFIVDDANARNFNDKTFGSSVVLKSPIELHNAYFAAGVLAAAIFIVAVVVTICHCKVNQTYRKFSTRSTSFIPILGFSRRPKVQGKLNKHWLSGKGATATSSTNIVAPPGGPRAGGAAGPQQVTRHLPGQPQTQTTLGGQLQERPFLRHLAMNLENDMYYTVDFSENSQHSPLIQ

SEQ ID NO: 39340 - DNA, 6786 bp, DROSOPHILA
ttggccagctgctgataaattggtttcatctcaaagtttggaccagtccatccagtccagtccatctgtatcgcaactgaaatccgctcgtcgttcgcttagtttcgtcgtaatttacttaccagagggcaaaagccaagaccagatgtttgactctacactttaaccaaaatgttttgccgcactgcggcgaacaataacagcaacagaccaaagctaaaatatgcaaacaaatggcttaaactgtttttaacccccgggctgacaacgaaaattgcagaatttactgactatgactgcgttcacgtcactaaagctatccaaatgttagtttgcagtgcgagtttggtataatgctcaataaaagcagcaagatttctgttcccattgggaatgctttagaatttaagagtattttttagctattcgattcatctttataatgaaacaattgataacccagaagggcagtagccaaatctggcagataagagccgcagaacttataatacagctgtaaacccaacaactatttagtttattgaaagcatcggaacgagaagcttcgaccgaactaatgaatacgagatgtacacttttattcactctggccacgcttttggcctttgggaaacccgcacatgcctacaaaacgtattatttaatgggcgaagaagacaagatccatttggacaaaatatttaaggaaatagataaattgaatgatgtaagtcagctaaaagttcatctgttcgtaatattaatcttacatcaatcctagcacacacatattcctgcctattccattggatcaaacaactatgtaaacgaaagtgtcgtcggtgtttctgatctattagaaatgttctatacatttagttggatttcgaagcattacaagaaaatgagaaaattcgagtcagctgagtgggaaaatgtcacacaactgaacttggccgaggcgcaggtatttactggagacgaagggaaccttcagtctatggagaaaatttacttgaaattctttgaaaaggatgatctcatcagtcgaatggccttgttcaatcaggtaataatataacactttgtctctgcccttaaaggaatgagaaaccacctttagcttctattcgctaaatattttttgaaagcagtttcacctctacacctgcaagacgccgcaatcgccgcagcaatttctttaccacttttatgtgaagtacatcattcaagaactgaaggctcacgcgttagtagagtggtcctggctgttgctcaggaagtttgggcgagggggatccatcgaggaggagcaggcaagccgggcagcttacaagcgacggacagagggcacactaccgaagatcaaagtcctgatgagccaagcagatcgctccgtgtggcgctgtgatccccaggaacaccagtcaggggtcacccatgaggaggtcacccgccttctgcagggttacgtggagaatgaggtggaccttaacagcgatggagcgtgcaatcaggaatgtggttactacaaattagccaaaaacgagggttgcttcgataataagttctgttccgagcagccaaaatgtacgggcggagttcatgattgtcgctttgtggagtcgaacatgaagatttgtcaggcggaaaagaactctagcaggcggtacgagttcataaagtacgaaagtggccttgttcatggcaatgagaaaccttgtgccacgtggttgaacagtgcaaagagttggaatcggtggcttttcatggaatgcagctactgcctttgcttgtgcgatgatcagagtcctcaatcggatcggtacttcaatctgcgtcctgtgatcgccgatgttaaaaataacaggttagtataatgcttatgtatatactgggtatatccaatttgctccttacagggtcgtggtggggctccgatttgtgaagaggaatcgcatttttcacctgcaagtccaagaaggtgaacttctgccacttggagacatcaacgggacaactcttcggtggaagcccgtggattcgtactccatatccgacaaggatgtgtctgaaaacgttgactaccatacactaacctacgaaaagcgatcaattgatctgggtgatctgaatgcgaaaataaattctgtggttaccggcctgcgcttccgagtgtttggagcccatcttcaactggaggcccagttcaccgcggttgagtttgaaagcggaaagctcatcgatccgaagaagaccagccactggatctccatgggcaccgatcagccgaggtaagtatctacaacaattgggaaatatatgtgattcataggttccatcactgtcttgtgcttcagggagagactgccactgatggacgcccaggtatccactaaatcctcagtgctctcgataccttaccctagtgacaaccagttcatcgaattcaccaacacgggcttcgtccaggatgccgcccaaagaacggtgcccttcatcgatattcaggacgttgtatcggacccaccagttccactgtccggaatcggaatttactataagggtcaagatggctacggtggttttttggcgccacgaatcattacctacgatttcacctcatatgttcagatcccaacatgggaataaacacatttcaaggatactgaatgatttctttcaatcaatgtgtacggcattataatcatgtgtcttatcagttggtgcggcctaacgtttcatttcctagtaaatggttaaatacatttaatatatagcttatcgcattgttttgtattttctatgttgtacttattttttaatgattcacaaatagaattctaatcaaatgatattcatatattgtacttccaagttatttaaagcgaagattactacaacataaaacttgctacgtggtttaaaatatgatattgttggatgcacctcattattcatttagctttcgttcaccaaaaataatatgacaatgccgccagcaggttcgactttagtctgacccctgggaagtcagctctgtgaaccttaaccctcgtcggcctcattcccttaaccccctgaggcagcagcagttggccagaagctgtggcaaaactcaggatctgaatcaaaggacgaagaggagaacatacttttttgtcgcatgctccgcgagtatttcgactgcataaaatatggaattaaattgctagccaacaaaatggcgcctgggaaaatgacaaaaatatgagacaggagcgcaggatctccatcctttcccgccattttccccccaaagctcttttggcactttgttgcgaattctcttggcgctgtcgagttgatgacttgcagctgtcgcatttcttttcagactttagcaactgcagtggaaccaaacgaaacggctgttggcacctggttagccaccaggtggatgtgaatgtggacgaggatgtggatgcgagaaatggcattttatttgacggcaaacattgcggcaccttgtgggaagttaccatcgcacactctgcgaaacttgaagtttttcataaaggtacttggttatacatgaaggatttgtatacccttaacttgtgttaacagttttcacactgtcaatactaaaagcccttgcgcgaattctactcactactgggcaaagttcttccaatcgtagtgagcattgacattcccatcctaataacttttctaaaattaaacatcggttatccctagttggtatcctatactgcctaaatatgggcgaaaggagctttcgaaaactggtattaggagttatcctgacgaccatcattctctatgctctgctttttttggacacgcagtgctacgagactggcggaaaaatacataatgcattctttgtgaacaccgacggatgtcgcattatagccatggatgtgatgaacccgaccattgccaagtacaccgactgggagtggaaggacaagaggttctacctgaagtgcccccatcagacctggttccgaacggaggtggcgaacggggattggtaccttaagctgacccgcgacatcgacagaatcttgcaggaaagcgatctgacccacgactggcagataaagtgctattggttccggattaaaataaaggggcgttggcgggccaagatctacggtccaaccatgttccctctggagtacccgtatgccctgaaagtccccaaaggactgaggcacatgcgagtcaagtgcctgaatactttcacaaacaaaaccttgcacgatgatgcccatttcttcattcaaccaccacctgagaagttgttgaagaaacctccggcgaccttgaagtactgggatggggagaaacactcgagtggtgcgacttcacccatttctgtgatgattttgggtctggactccgtttcgcatctcaatttgctgcgccagatgccgcggaccgtgcgctatatgcgccagaacatgtcgcaggtggagttctggggcttcaacaagatcggcaccaatacgtatccaaacttgatagctttgctgacgggcctcagtgcggcagagtcggaggcttattgggtgcggcagaaatgtatggataacctgcctctgatttggaaggagttcaagagggccggttataataccagtttcgccgaggacatggccatatattccatgttctatttcggcaagcccggcttcaagcgtccgaccacggataacaatttgcacgacttcatggtggatctctatatcaataggcaggccagttccgtatcagatacacattgcatgggcgaaagggccttcatggatatcctcttggagatgaacgataggctgctgccccacacgcaacgctatccctttttctccttctattggtgggccaatggcttccacgagttcttcaactccccccgcctggcggatggaagattcgagcgattgctgaggagcctcgacgacgccggcataaccaacaacaccataatattcttcatgtcggaccacggcttgagatggggtctttttcgcagtagtttccagggtatgatagaggacagccagccgtttctgtccgttttgtatccgaagtggatgagattaaagtaccccatggccattaaaagcctagttggcaatgcccacagcctggtaaccacctacgaccttcatgagaccttgaagcatatcttggaaccgagttccttggaggatacgtccatcacgcagaagactgaagaattgtggaagctgaagggttcccaaacccccagggccgttagcctcttcttacccattccgccctggaggaactgcaacacttcccacatcccgagtaagttctgtctgtgccacaagcagattcccattcccgagagcaaccgagtggtgacgaaatcggccagcattatcatcgattacgtaaatcagttgatggtggaataccccgtttgcataccccttcagttggactcgatcgaaagtgcctatttcgcggctccccagagggacgatgacttctacatcgagaaggggcacaagaacgtgtaccccgaaaaaggacccttctggaagaagcaaaagtacgaggacagggatatcgtggtgcgattgaaaactaagccgggcaacgcctacttcgagggaatgacccgcaggcagggcagcaaactctctctcgtcggggaagtggtccgcgtggggggtgaaggcaacaggaacaacgactgcatcgataatcctctgctggaaccgttctgtcattgtgcactataggtttttaaattcacaaaaaaaaataaataaacattgcttattctttactaagaatattagttgctactcctagaattaaagacttaagcatttagaagcttagcgaacatcccacccacagcccaccgttacccttcagctgcatccaaactagctccaagccaatccttcggggctcatcctaaacgaagaagtgccgtcaataagttctggatgtggcagtagctccaccaattatctgtgagttataacttttgattttgcacgtcgaagttctgccaattagtggccactgccgccgggcaagtctttaaaagtttgccgcatgacttggcagatgccaatggagtggaccacctgcgggcggaactttgagggatatataggatgggtggacggtatgcaggtggtccaactgcgattccgaactaatggcataagccgcttatgtaccatgtactcgcactcgcagtttgctcttacttttaacccactcaccagcaaaacttttttaggattatggcagacttacgcagagcacacttatggagacggcgaaagagacagatagagggtgcgagacagagaggggacgagagagcaagaagcgaacgctttatagtttcaatatttgctttgtcctgttcgggaaaaatcccctgggcacatagggcagcaagagctgcacggatttataaatggactggcaaacatttggccaaaactttaagcggagaggagagtgcgagtcaaatgtttgcttcgttttaaaggagttgagttttattgtttttggccaattagtcttgctctccaacccgtctcggcaatcgtcttgaatctctccccaaggtgtccttagccaacgaaatttatatacccttgctccgggtcatccttggaatcatttggctttgaaacagccggagaagtgttaaatatgttttatgggagccataaggcttgaagtggaatagttgcgactgctaattctgtgaat

SEQ ID NO: 39341 - DNA, 3606 bp, DROSOPHILA
atggagaaaatttacttgaaattctttgaaaaggatgatctcatcagtcgaatggccttgttcaatcagtttcacctctacacctgcaagacgccgcaatcgccgcagcaatttctttaccacttttatgtgaagtacatcattcaagaactgaaggctcacgcgttagtagagtggtcctggctgttgctcaggaagtttgggcgagggggatccatcgaggaggagcaggcaagccgggcagcttacaagcgacggacagagggcacactaccgaagatcaaagtcctgatgagccaagcagatcgctccgtgtggcgctgtgatccccaggaacaccagtcaggggtcacccatgaggaggtcacccgccttctgcagggttacgtggagaatgaggtggaccttaacagcgatggagcgtgcaatcaggaatgtggttactacaaattagccaaaaacgagggttgcttcgataataagttctgttccgagcagccaaaatgtacgggcggagttcatgattgtcgctttgtggagtcgaacatgaagatttgtcaggcggaaaagaactctagcaggcggtacgagttcataaagtacgaaagtggccttgttcatggcaatgagaaaccttgtgccacgtggttgaacagtgcaaagagttggaatcggtggcttttcatggaatgcagctactgcctttgcttgtgcgatgatcagagtcctcaatcggatcggtacttcaatctgcgtcctgtgatcgccgatgttaaaaataacagggtcgtggtggggctccgatttgtgaagaggaatcgcatttttcacctgcaagtccaagaaggtgaacttctgccacttggagacatcaacgggacaactcttcggtggaagcccgtggattcgtactccatatccgacaaggatgtgtctgaaaacgttgactaccatacactaacctacgaaaagcgatcaattgatctgggtgatctgaatgcgaaaataaattctgtggttaccggcctgcgcttccgagtgtttggagcccatcttcaactggaggcccagttcaccgcggttgagtttgaaagcggaaagctcatcgatccgaagaagaccagccactggatctccatgggcaccgatcagccgagggagagactgccactgatggacgcccaggtatccactaaatcctcagtgctctcgataccttaccctagtgacaaccagttcatcgaattcaccaacacgggcttcgtccaggatgccgcccaaagaacggtgcccttcatcgatattcaggacgttgtatcggacccaccagttccactgtccggaatcggaatttactataagggtcaagatggctacgactttagcaactgcagtggaaccaaacgaaacggctgttggcacctggttagccaccaggtggatgtgaatgtggacgaggatgtggatgcgagaaatggcattttatttgacggcaaacattgcggcaccttgtgggaagttaccatcgcacactctgcgaaacttgaagtttttcataaagttggtatcctatactgcctaaatatgggcgaaaggagctttcgaaaactggtattaggagttatcctgacgaccatcattctctatgctctgctttttttggacacgcagtgctacgagactggcggaaaaatacataatgcattctttgtgaacaccgacggatgtcgcattatagccatggatgtgatgaacccgaccattgccaagtacaccgactgggagtggaaggacaagaggttctacctgaagtgcccccatcagacctggttccgaacggaggtggcgaacggggattggtaccttaagctgacccgcgacatcgacagaatcttgcaggaaagcgatctgacccacgactggcagataaagtgctattggttccggattaaaataaaggggcgttggcgggccaagatctacggtccaaccatgttccctctggagtacccgtatgccctgaaagtccccaaaggactgaggcacatgcgagtcaagtgcctgaatactttcacaaacaaaaccttgcacgatgatgcccatttcttcattcaaccaccacctgagaagttgttgaagaaacctccggcgaccttgaagtactgggatggggagaaacactcgagtggtgcgacttcacccatttctgtgatgattttgggtctggactccgtttcgcatctcaatttgctgcgccagatgccgcggaccgtgcgctatatgcgccagaacatgtcgcaggtggagttctggggcttcaacaagatcggcaccaatacgtatccaaacttgatagctttgctgacgggcctcagtgcggcagagtcggaggcttattgggtgcggcagaaatgtatggataacctgcctctgatttggaaggagttcaagagggccggttataataccagtttcgccgaggacatggccatatattccatgttctatttcggcaagcccggcttcaagcgtccgaccacggataacaatttgcacgacttcatggtggatctctatatcaataggcaggccagttccgtatcagatacacattgcatgggcgaaagggccttcatggatatcctcttggagatgaacgataggctgctgccccacacgcaacgctatccctttttctccttctattggtgggccaatggcttccacgagttcttcaactccccccgcctggcggatggaagattcgagcgattgctgaggagcctcgacgacgccggcataaccaacaacaccataatattcttcatgtcggaccacggcttgagatggggtctttttcgcagtagtttccagggtatgatagaggacagccagccgtttctgtccgttttgtatccgaagtggatgagattaaagtaccccatggccattaaaagcctagttggcaatgcccacagcctggtaaccacctacgaccttcatgagaccttgaagcatatcttggaaccgagttccttggaggatacgtccatcacgcagaagactgaagaattgtggaagctgaagggttcccaaacccccagggccgttagcctcttcttacccattccgccctggaggaactgcaacacttcccacatcccgagtaagttctgtctgtgccacaagcagattcccattcccgagagcaaccgagtggtgacgaaatcggccagcattatcatcgattacgtaaatcagttgatggtggaataccccgtttgcataccccttcagttggactcgatcgaaagtgcctatttcgcggctccccagagggacgatgacttctacatcgagaaggggcacaagaacgtgtaccccgaaaaaggacccttctggaagaagcaaaagtacgaggacagggatatcgtggtgcgattgaaaactaagccgggcaacgcctacttcgagggaatgacccgcaggcagggcagcaaactctctctcgtcggggaagtggtccgcgtggggggtgaaggcaacaggaacaacgactgcatcgataatcctctgctggaaccgttctgtcattgtgcactatag

SEQ ID NO: 39342 - protein, 1201 aa, DROSOPHILA
MEKIYLKFFEKDDLISRMALFNQFHLYTCKTPQSPQQFLYHFYVKYIIQELKAHALVEWSWLLLRKFGRGGSIEEEQASRAAYKRRTEGTLPKIKVLMSQADRSVWRCDPQEHQSGVTHEEVTRLLQGYVENEVDLNSDGACNQECGYYKLAKNEGCFDNKFCSEQPKCTGGVHDCRFVESNMKICQAEKNSSRRYEFIKYESGLVHGNEKPCATWLNSAKSWNRWLFMECSYCLCLCDDQSPQSDRYFNLRPVIADVKNNRVVVGLRFVKRNRIFHLQVQEGELLPLGDINGTTLRWKPVDSYSISDKDVSENVDYHTLTYEKRSIDLGDLNAKINSVVTGLRFRVFGAHLQLEAQFTAVEFESGKLIDPKKTSHWISMGTDQPRERLPLMDAQVSTKSSVLSIPYPSDNQFIEFTNTGFVQDAAQRTVPFIDIQDVVSDPPVPLSGIGIYYKGQDGYDFSNCSGTKRNGCWHLVSHQVDVNVDEDVDARNGILFDGKHCGTLWEVTIAHSAKLEVFHKVGILYCLNMGERSFRKLVLGVILTTIILYALLFLDTQCYETGGKIHNAFFVNTDGCRIIAMDVMNPTIAKYTDWEWKDKRFYLKCPHQTWFRTEVANGDWYLKLTRDIDRILQESDLTHDWQIKCYWFRIKIKGRWRAKIYGPTMFPLEYPYALKVPKGLRHMRVKCLNTFTNKTLHDDAHFFIQPPPEKLLKKPPATLKYWDGEKHSSGATSPISVMILGLDSVSHLNLLRQMPRTVRYMRQNMSQVEFWGFNKIGTNTYPNLIALLTGLSAAESEAYWVRQKCMDNLPLIWKEFKRAGYNTSFAEDMAIYSMFYFGKPGFKRPTTDNNLHDFMVDLYINRQASSVSDTHCMGERAFMDILLEMNDRLLPHTQRYPFFSFYWWANGFHEFFNSPRLADGRFERLLRSLDDAGITNNTIIFFMSDHGLRWGLFRSSFQGMIEDSQPFLSVLYPKWMRLKYPMAIKSLVGNAHSLVTTYDLHETLKHILEPSSLEDTSITQKTEELWKLKGSQTPRAVSLFLPIPPWRNCNTSHIPSKFCLCHKQIPIPESNRVVTKSASIIIDYVNQLMVEYPVCIPLQLDSIESAYFAAPQRDDDFYIEKGHKNVYPEKGPFWKKQKYEDRDIVVRLKTKPGNAYFEGMTRRQGSKLSLVGEVVRVGGEGNRNNDCIDNPLLEPFCHCAL

SEQ ID NO: 39343 - DNA, 2558 bp, DROSOPHILA
aagcataataaataaatacttaaaatattgccaacatttcagtgcacagcgtaatttataaagcaataatgccatattttatataaactactattgtgggagctcaattaccgtaagagccacaacaaaccaatttcagctttccgagcaattgaacaatccgagggtatcgtttaaatccgacccaaatcagcgcaggactccttcgtcctggcagtcgccctgcagttgtacttgtatttacataagcgtccgtatgtatttctcccagagcactcgcctggcgcaaaattacactttgttggcgagacacacacactcacatgctcatacgcacacatcgtggcgcaaaaaattgtaatgagcttattaagtcatattaaagtccaagtacagccaatttgataaaaacagcaactgacagcagactggcaatgttttcatgcgacatttttttacgatagcatttggcattaatggtaatagcaaatggcgtagacacacgctgtagctatgtacgttacactcgaagaaaatcaatattttaatgagtaagcaaccaaaagggttgatgcacgtataaatagatgttgaagaaatatataaataataacttaataactttgtcttgctagaaatgaatagtactgaatttctttaagtgcatgtaatttatatgactgatgtaaatgagctcggcagcaggtggcttaacatttttattcgctccgcactgcggtaaattgttgttaactcggcttaattgagtatgatcaaattgccgctgattttgcactcgaatatatttcgactgaactttcaaaattcatgaaatgctgagcacgaaaacaacttaaacagagtcaattatatagtttatggaaaagtcgtaaaaatgccgatacttggacaaatgtttcctgcaagtaagtaatgttattaagtagtagataattacgtaacgcactcacttcatcctctagagctgggtcccaatttgatgacagcctccaaagtgctaaaaagtcctcttggccaggcgttagtctcctttttggttggctactttgtcaccacaaagttgtcgcaattttatggcaaattcaagagggactctgagaaatccgatgagtcgacgcagtacttggacatgtaccccaggaaagagagtcagccaaaggacaccaaaggacacgatatcgttctgctcactctggaggagctaactgccttcgatggctcgagtcccagtctacccatttacaccgctctgaatggcctcatatacgatctgagtccgggccgagaaaagttcagcagtcacggtccgtactccctattggccggttgcaatgccaacaaggtcctgaacattgcctgcagttccatgggcgtctgcgctgcgaacgtaataagtcgctgggagcagagcctaagagccgaatttaaagtcgtaggatatttagtcgatgctgatatagatattattagcggtagtccagtcaaacatacaaattcggccataggggagcaaatggagaagagtgatatcgtttaagatgctgtgaatatcccgttttcttagcttggcaataaaatattattcacagaaactagtaatttacttccaagctaactgaaggggatattcagtgcaaccacggactaaaaatgcgtttggaaaaattacatgtaacttgtagaataaacaaaattattgaagatatcttttagcttcatgagcgaatattttccaaaggttttaggttgccaaacaaatgatcgactatttcttttacaatctcctccagcctgagattaaattaattctgtccttctttttttttgccgtttgaccgagctcttggcatttggaaagccggaaagtttttccgcctttgtcttgcgcttttttccccagcggttcggttcgacaggaaaatatcgacaacggcaaatgtcgataacaacaaattgtttgtcgtgttttcctttttacttggcactttttgcccatcaagctgttgactttgtcaagttgtcgccgaattttcagggcttcggggtgattcgggtttcccattgtgccggtgtatgtgtgtggaaaaactttgcgccaaacacgcaattgacttaaattgaattgaaagctgaattctgagagctgagagctgaaagccaagaagtgacaaagcgggcgggaaagcagaaggaatgccgtcaggtgctacacagctaataaaatcaaaattacttttcgccagcgcaaagtttcgtcagtcgacgtgcttaaggaatttaaaaaagttgtccaaaaattgttaagcacacacttcaaaatcagtcaaatgtgcaaaaggacaacacacactcaagaacaacatttggcaaagtgttatttgaagtgtcgaatttaatcaagcgcaaaggtgacaaaagggctcaaaagttaacaacaactagggccaacaataacaagtggaaatggttcttaaaaggtggcgaaatggacgagagcagtcccctgcaaagatggaaggacaatgtcctggagtggc

SEQ ID NO: 39344 - DNA, 558 bp, DROSOPHILA
atgacagcctccaaagtgctaaaaagtcctcttggccaggcgttagtctcctttttggttggctactttgtcaccacaaagttgtcgcaattttatggcaaattcaagagggactctgagaaatccgatgagtcgacgcagtacttggacatgtaccccaggaaagagagtcagccaaaggacaccaaaggacacgatatcgttctgctcactctggaggagctaactgccttcgatggctcgagtcccagtctacccatttacaccgctctgaatggcctcatatacgatctgagtccgggccgagaaaagttcagcagtcacggtccgtactccctattggccggttgcaatgccaacaaggtcctgaacattgcctgcagttccatgggcgtctgcgctgcgaacgtaataagtcgctgggagcagagcctaagagccgaatttaaagtcgtaggatatttagtcgatgctgatatagatattattagcggtagtccagtcaaacatacaaattcggccataggggagcaaatggagaagagtgatatcgtttaa

SEQ ID NO: 39345 - protein, 185 aa, DROSOPHILA
MTASKVLKSPLGQALVSFLVGYFVTTKLSQFYGKFKRDSEKSDESTQYLDMYPRKESQPKDTKGHDIVLLTLEELTAFDGSSPSLPIYTALNGLIYDLSPGREKFSSHGPYSLLAGCNANKVLNIACSSMGVCAANVISRWEQSLRAEFKVVGYLVDADIDIISGSPVKHTNSAIGEQMEKSDIV

SEQ ID NO: 39346 - DNA, 5057 bp, DROSOPHILA
cccttgcatgtgtgcaaatatttcatttgcgaacttagcatattataaatagggcaaaagttgtataaacaaggtaacttttatgtttaagcaagcttactagaacagccgttttaaagcacgtttcttgtgtacacaataatgtttgattaacccacagttaatagccttcgcaggatgaaaattcgaagatatgtcagaaaactttccattcaaaaatgcacaaaaatgcacttctaaaatcaggttgggttaagaaattatagattatatatatcgttaaatgtaattttgttttgtactgccatatatacaaataaatttaagcaactgctaaaataaaaggtaatcaatatagtgaatattttcttaatcaaacatcttttttagcttttactgtgccgtaattaaatgtgagaaacctattttggcagcctaaataatatgcataaattctgttataatgagcgaaccaatacagtggctaatccgttttttcccgaagattcaataggaaaaacggaccacatgtcgtatgagcaattgagtccaactaagatcggggatggcaaaaattaatgggtcaagtaaatgcgtctcaataagccattgtgtgggtgcataatgcaaacttgttgataggaattgtgccacccccgaatgaggcgagcaaaacatgggaatccacaagaatatttcggcgcctgcgccatcctggaaatcggcgaatataaagctccgtgggaccgaaggtcggtgggtggtacgatggcgatggttttcactttcaatattgaaagcagcgccggcggctgaatggaaaccgaaaccccgcaactgcgtcgcgtccgattcggatttatattcagtcgcattgtgcctcgcgtgcggcaaagatgtccgcgaccacacctcgctgacgaccatctgtgaaatctgtggaaaagctcccacgctccgtcaaccgatttcctcgcacttcccgccgattaccagcaacatgggtctgcgggacaccattcgtaacctacggccggcaagtcccggccgggagaagtcatcgggcatcgagctgcagcagcgaagtccgcgaggtgcatgccaccacaatcaggtggccgccgtccaggtcacggagcaatcattacaggtatggcgcgcactgccagcagagattcgccacgatcccagcatggccagttttcagatggagaacgagagaatccatggtgagtgaagggtgtcatttgaaatttatggatgcctatagaaaaaatattaatattatttttcctctttgctcagtactaagccatatagctaagccatagcctttaaatcaataaactgtcatacaaatgtcaatccattcccttgctcaatccacgacatagatagctggttaattacgtgactgccactcacttttaggttcctccggcggcgccactgacgacgaggatgaggatggatacgaggaggtggatatgaagaacgtcagtcgcattcaggatgagcccggctcaagctttgccggctccgactttctggacatcaagaacaggcctggtgatgagaatgccaccgacgatgaggtcaccacccactccgatcacgaagcggccaatggtggtccgggtaatgccaaatcacaggcccgccggattcatcacaaatccaagcgttccaaggagcagcgacagcgggacaaattgtggaaacggggtggactacttgtattttggatcctgtcggcagtggtgctgatttcggtgggcgaaaagcatctgctggagaagaccattgatgtgccaatgggcgaggagggaaagtgtgagtttccatctatttagttgatttatttttatttttttaatttacattggaacattgtttttctaattagttttcaagctgctccaaaaacccactggtgacttccgcttgaagattcatggcgcttttagagagctctccacgctggatgcccccgaaaatgagactttgagctttggatttctgactgtgcagccacaggtgtccacttacattggcgagaatcacagccaggtgttccaggtgagtattacataactactgcacaatcgaatataaagttggcaagatgtaagcttttttttttttggatttttcaggatatacttccagcgtggcgtttaccactgctctccgaggaggaactgatgctgcgtgctccggctgtgaccaccaatcgcacctaccagatgactcaggagttagatgaaatgttggctggaaagaacagcgaatttcgcttgcatatctatagcgatgtggaggtggatttggccattgttctgaactataatcccttgatagtgaatgccaggacagggagcatcctggctggtgtaatcctgctaatcttctatgcactgcttgtttgggaactcttcgaaagaacctttgtggccatgatatgttccattctttcggtgacgactctagcctgttttaatggttggttacagaacccgggtatttcttcatttcttaattatttgaaattccccagatcgtcccaatatggatgagattatccagtggatggacatggagctactgactctactcttctgcatgatgctgctcattttgatactgactgaaactggcgtattcgactacctggccgtattttgtttcgagatatcgggtggcaagatctggcccatgatatatagtctctgtttggtcacctgcctggtgtccagtgtgctggacaacatgacaaccgtgctgctcctgaccccagtggcaatccgattgtgcgaggtaatgcagttggatcccctgcccgtggtgatgggcattatagtgcatgccaatatcggaggagccctgacgcccatcggagatcccatcagtattatagtcagcaccaatcactttattgtggataatgtgggtataacatataggttatgcaagctgttatatagatttcccctaccttttcaggatgtaacttttcccacatttgtggcccacacatttccaggtgtcattctagcagttattcaaagttgtgtgtacctgcgcctcttctatcacaatatcgatgcactgcgtctcaatgagcccaaggagatgagtgagctgcgtagggagatgaaggtgtggcagagagccttgaatgcagtggcctcctgttccaaggatgcccagctggtgaggggaacgctccaggctaagattaagcaactgaaaaggacccttagaagattgcaaaaaggtgtgggctccacggaggtctatacgaatacgctggacgagctcaagcagaaagtaagtggatttactgaactgggatctttatagctgagcaatccatttccagtaccccatcaaaaacaagacgctgcttttgcaatccgctggagccctactcttcgtcattgtttgcttcttcatccaatccgtgccgcactggaggacattacccctgggttgggtggccctgctgggtgtgatcctgctgctgatcatcctcaatcgcgatgacatggagcacttgatgcaccgcatcgagtggaccacgctgctcttcttcgccgccatgttcgtgatgatggaatgcgtggagagattgggaatcttcgcctgcatcagtgagctcaccgagcacgttatcctttcggtgggaaagagtcatcgtctggccatggccatctttatgatattatggatgtcggcgctggcatcatccatattggatagtattccggtggcagccataatggtgaagctggtgacctctctggtggccaagccatcgctgggactgcccctccagccactggtttgggctctgaccctgggcgcttcgatgggcggaaatggaacgctctatggcgcatcagccaatgtcattgcagccggaattgccgagcaacatggctataagttgtccttcacccgatatctgagaacagtttttcccatgatgctgggacagatcaccctgatgactgtctatctactggtggcgcatgtggtctttgaatggcattgagactccctatttaatacacatactgaataacatattattgtatctaatgatggaaaatgtttttcacttcgaatctaatcgtgtgtttttttgtgtgagttttactgtagtctttgtccttttacattcgcctcttgatgtgtttcatgtgtttttggcatataaaataagaatatttatatttaagcgttcatttgtgattggcaaatgtataaaaatataccataaatataaaagtacacatggtttttcgttcgccttcgtggaatttggctggactgatggaaatcacttttggtagtccatcaaggcggtgtttttaatgtcgtgtgaaatgttataaatttagactttattgtctaaggtcgaagtggggaaatcgtgaaaattcaacaggccataaatacaaaacgaaggaaaattatagatttgattttcaaatttcaataagaggcagttctacaagtatttagatacatttaaaattcgaagcgatgtctgtattttagagatttcaaagcacaatataaacatataataagttaaattataaatatcataattctcgtgttttctagtttatcccatatgcaccttggtttggaaaacataaacaaacgtaaataattcctgagactgaccattgccaagttcaatgttgaccagaatatccgcatatgaaagtgcttgcatgtacatatacatatatattaaaagcgagtatatagcatatagtatatggaaagaagacaactgctggtcaataaatgagaataagacaatgtggaaaagcagcgagggatttcctcgggtggttgttgctatttatttgctctgctactgctgcgctttccacactttccacagcgctcgttccataggtaaattgtattttaagttcacaaacaaatggccacgagggattgcgaatggaggaggtgaaacggaggacccgacctgtccgccatgtggagaggagactgccagcagttttatggca

SEQ ID NO: 39347 - DNA, 2541 bp, DROSOPHILA
atgggtctgcgggacaccattcgtaacctacggccggcaagtcccggccgggagaagtcatcgggcatcgagctgcagcagcgaagtccgcgaggtgcatgccaccacaatcaggtggccgccgtccaggtcacggagcaatcattacaggtatggcgcgcactgccagcagagattcgccacgatcccagcatggccagttttcagatggagaacgagagaatccatggttcctccggcggcgccactgacgacgaggatgaggatggatacgaggaggtggatatgaagaacgtcagtcgcattcaggatgagcccggctcaagctttgccggctccgactttctggacatcaagaacaggcctggtgatgagaatgccaccgacgatgaggtcaccacccactccgatcacgaagcggccaatggtggtccgggtaatgccaaatcacaggcccgccggattcatcacaaatccaagcgttccaaggagcagcgacagcgggacaaattgtggaaacggggtggactacttgtattttggatcctgtcggcagtggtgctgatttcggtgggcgaaaagcatctgctggagaagaccattgatgtgccaatgggcgaggagggaaagtttttcaagctgctccaaaaacccactggtgacttccgcttgaagattcatggcgcttttagagagctctccacgctggatgcccccgaaaatgagactttgagctttggatttctgactgtgcagccacaggtgtccacttacattggcgagaatcacagccaggtgttccaggatatacttccagcgtggcgtttaccactgctctccgaggaggaactgatgctgcgtgctccggctgtgaccaccaatcgcacctaccagatgactcaggagttagatgaaatgttggctggaaagaacagcgaatttcgcttgcatatctatagcgatgtggaggtggatttggccattgttctgaactataatcccttgatagtgaatgccaggacagggagcatcctggctggtgtaatcctgctaatcttctatgcactgcttgtttgggaactcttcgaaagaacctttgtggccatgatatgttccattctttcggtgacgactctagcctgttttaatgatcgtcccaatatggatgagattatccagtggatggacatggagctactgactctactcttctgcatgatgctgctcattttgatactgactgaaactggcgtattcgactacctggccgtattttgtttcgagatatcgggtggcaagatctggcccatgatatatagtctctgtttggtcacctgcctggtgtccagtgtgctggacaacatgacaaccgtgctgctcctgaccccagtggcaatccgattgtgcgaggtaatgcagttggatcccctgcccgtggtgatgggcattatagtgcatgccaatatcggaggagccctgacgcccatcggagatcccatcagtattatagtcagcaccaatcactttattgtggataatgatgtaacttttcccacatttgtggcccacacatttccaggtgtcattctagcagttattcaaagttgtgtgtacctgcgcctcttctatcacaatatcgatgcactgcgtctcaatgagcccaaggagatgagtgagctgcgtagggagatgaaggtgtggcagagagccttgaatgcagtggcctcctgttccaaggatgcccagctggtgaggggaacgctccaggctaagattaagcaactgaaaaggacccttagaagattgcaaaaaggtgtgggctccacggaggtctatacgaatacgctggacgagctcaagcagaaataccccatcaaaaacaagacgctgcttttgcaatccgctggagccctactcttcgtcattgtttgcttcttcatccaatccgtgccgcactggaggacattacccctgggttgggtggccctgctgggtgtgatcctgctgctgatcatcctcaatcgcgatgacatggagcacttgatgcaccgcatcgagtggaccacgctgctcttcttcgccgccatgttcgtgatgatggaatgcgtggagagattgggaatcttcgcctgcatcagtgagctcaccgagcacgttatcctttcggtgggaaagagtcatcgtctggccatggccatctttatgatattatggatgtcggcgctggcatcatccatattggatagtattccggtggcagccataatggtgaagctggtgacctctctggtggccaagccatcgctgggactgcccctccagccactggtttgggctctgaccctgggcgcttcgatgggcggaaatggaacgctctatggcgcatcagccaatgtcattgcagccggaattgccgagcaacatggctataagttgtccttcacccgatatctgagaacagtttttcccatgatgctgggacagatcaccctgatgactgtctatctactggtggcgcatgtggtctttgaatggcattga

SEQ ID NO: 39348 - protein, 846 aa, DROSOPHILA
MGLRDTIRNLRPASPGREKSSGIELQQRSPRGACHHNQVAAVQVTEQSLQVWRALPAEIRHDPSMASFQMENERIHGSSGGATDDEDEDGYEEVDMKNVSRIQDEPGSSFAGSDFLDIKNRPGDENATDDEVTTHSDHEAANGGPGNAKSQARRIHHKSKRSKEQRQRDKLWKRGGLLVFWILSAVVLISVGEKHLLEKTIDVPMGEEGKFFKLLQKPTGDFRLKIHGAFRELSTLDAPENETLSFGFLTVQPQVSTYIGENHSQVFQDILPAWRLPLLSEEELMLRAPAVTTNRTYQMTQELDEMLAGKNSEFRLHIYSDVEVDLAIVLNYNPLIVNARTGSILAGVILLIFYALLVWELFERTFVAMICSILSVTTLACFNDRPNMDEIIQWMDMELLTLLFCMMLLILILTETGVFDYLAVFCFEISGGKIWPMIYSLCLVTCLVSSVLDNMTTVLLLTPVAIRLCEVMQLDPLPVVMGIIVHANIGGALTPIGDPISIIVSTNHFIVDNDVTFPTFVAHTFPGVILAVIQSCVYLRLFYHNIDALRLNEPKEMSELRREMKVWQRALNAVASCSKDAQLVRGTLQAKIKQLKRTLRRLQKGVGSTEVYTNTLDELKQKYPIKNKTLLLQSAGALLFVIVCFFIQSVPHWRTLPLGWVALLGVILLLIILNRDDMEHLMHRIEWTTLLFFAAMFVMMECVERLGIFACISELTEHVILSVGKSHRLAMAIFMILWMSALASSILDSIPVAAIMVKLVTSLVAKPSLGLPLQPLVWALTLGASMGGNGTLYGASANVIAAGIAEQHGYKLSFTRYLRTVFPMMLGQITLMTVYLLVAHVVFEWH

SEQ ID NO: 39349 - DNA, 2183 bp, DROSOPHILA
atttgtgattggcaaatgtataaaaatataccataaatataaaagtacacatggtttttcgttcgccttcgtggaatttggctggactgatggaaatcacttttggtagtccatcaaggcggtgtttttaatgtcgtgtgaaatgttataaatttagactttattgtctaaggtcgaagtggggaaatcgtgaaaattcaacaggccataaatacaaaacgaaggaaaattatagatttgattttcaaatttcaataagaggcagttctacaagtatttagatacatttaaaattcgaagcgatgtctgtattttagagatttcaaagcacaatataaacatataataagttaaattataaatatcataattctcgtgttttctagtttatcccatatgcaccttggtttggaaaacataaacaaacgtaaataattcctgagactgaccattgccaagttcaatgttgaccagaatatccgcatatgaaagtgcttgcatgtacatatacatatatattaaaagcgagtatatagcatatagtatatggaaagaagacaactgctggtcaataaatgagaataagacaatgtggaaaagcagcgagggatttcctcgggtggttgttgctatttatttgctctgctactgctgcgctttccacactttccacagcgctcgttccataggtaaattgtattttaagttcacaaacaaatggccacgagggattgcgaatggaggaggtgaaacggaggacccgacctgtccgccatgtggagaggagactgccagcagttttatggcagccgcgagagggaaagtcgtgccgacaacgactgactgaattttaattaatttgcgccaaggaataaagtgaaaattggaaattggcttatttggcccagactggccgccctgcaggccaaataaaaatgtgataagcgtacgaaattacgccgaaatcgagttggtttttttttttgtaaggtgaaccaagatgacatctccctatggatacagtaagcccacctttatgataacggaccacactcgcgatccgtatcatctgcagccgggtgatgacgacgacgatcgggatgaggatgaggagcgtcagacgaagctgcaggagatcatcagttggctgcacttgaatgccaagcatcgcagcaaatggtaagtcggccgcatcaagtatacgccgcgggtggcccatgcaagtcagcttatattgatattaagtatacgcccggttggccaccgccactcgaagtttgagttgtttatttgcccggttccgttttctcattagcctggcattaaattgtgctgcaggagatgatggacccaaaacttttccttttaatgtcctgctaagcttcttaataacggtccattggttgcgacttgtttgttttccgagatgaaatcaactcgaggacattttgtggattttaagccgctgagagccgcaacagatggtttccattgagattgattacaatttatttgttttttagttgaagcagacacagcagtttgtatatttcatactccatatgcgttggaattccagcagagtaataaatgcgcttttcttcgaaactctgattgaaatgatactcctaatccgaattaatcatgtttttgttttgttagggattttttccattagcttgtggttataacaaaatgccaggcacgaaggtattgttgtatgcaatttgtgtgaataattcgaagaatagttggcatatacccatttccaatccaagccaatcttttgttcgagcaattcgcttctgggaactaccattcgatataggttgcttataatcgataatgtaataccttggacacgtgcaaaataaactgaagtacgcagtgcaatgtggagattataaataaacaatggggaataaatattgacttgcgttgcattatattattttatttatagttctctatttccgttggcaaatacgtggttcagcagcctccgcagctgtttgtaggtttttttgtattaagttaagcattcgaattaagtgtcgtattcaaattagtgcactcactcccacacaaaaattatcggtgtagtgaaaacctagggtaatgcgaattacatacgcagttggtcctcaattaaaagttccgccttgttaattaacaattaaagg

SEQ ID NO: 39350 - DNA, 183 bp, DROSOPHILA
atgacatctccctatggatacagtaagcccacctttatgataacggaccacactcgcgatccgtatcatctgcagccgggtgatgacgacgacgatcgggatgaggatgaggagcgtcagacgaagctgcaggagatcatcagttggctgcacttgaatgccaagcatcgcagcaaatggtaa

SEQ ID NO: 39351 - protein, 60 aa, DROSOPHILA
MTSPYGYSKPTFMITDHTRDPYHLQPGDDDDDRDEDEERQTKLQEIISWLHLNAKHRSKW

SEQ ID NO: 39352 - DNA, 3302 bp, DROSOPHILA
tattgagatattgaaagatcggtagattggggggtgaaacacactcgcactcccgaacaagaaacggtttcaacaatgccggatgggacagctgttgattatttttgaaaacgtcaagcgacgagttttctagcgcaagcgcaggcaattctagaactgtttcgaaatcgaaactcaaaacgctgttgctgccgtggacagttgctgctgttgttgctctgctgttgctgcgtgctcgttggaagagcgttgaaactgaactgaaaatgcggccgctcgtctgcggctttttctatactccgccgcagtcgcagtcgccgtcaccgtcgatgttgctgttgctgttgtcgcagcgactgctgttgttgctgctgttattaatgttgttgctgctgccgtcgttctcgttgctgctgctgcttctgttatgctgatataagtgttgttgctgttattagcgttgttgtcgctgctgctgcttctgttattgctgctgtgctcgtgttgttgctgtcgctgctgctgctgttatttctgttgttatttcttttgctgcttctgctgacgtctgttttgctcagcagcattaccatctttgatgagaatagtgttagttcaaaattgagttaaattcgaataacaatcttactccattcgccgaccttcattcagattcagatgacaggagcttatttcggtgatgaagattcgcgtgcagcgcggattggataaacccaacccaaaggacacaggattcctgaagatgatgcgatctgtattcaagtgctggtcatctaaagatcgtcactccgtggatttgcccgcttccatttccagctgggatcgcgtcgaatcgcagcggatagttgatacccatttgccatgcgtagccaaaagtgcttatcagcacacgattcggcacaaaaaactgctgccgatacagcaaaacggtaccaagtgctcaatttacgcggcaattttgaaacatcagtggttttttgttttgacagatttttttttttattaatagcttatttggacgagaagctaagatgccaagagcagatcagtctgcaagcatgatgaaattccacaaattttcgcattcagaacttgtctttgtgatataaactgtgatctttacatagcttaaatatagaataccatatctatgaaataaaaagtaccgcatcaaatggagaatcgcgtccagcgctccacgagactgggtcgcggcgaggccctgtaccgttcgtcgaagatggggcagaacttctccgggaaccgctgctgcaggcagcgaatgacggtgcccgtgagatagaatcgcggtggccagcggcactcgcacggcgggatgcaggtggagcactgcgcctgcaaggcgttccacttgctcatggtggtttccagcatgggcggcaggcactccaatcgccacggcagccggagatcccgtgcggtccagtcgcagtcgcacggcggaatgcaggtcatgcacatgagttcctcgggttccatgtcctcgggttcctccggcggctttgccgcctcctcgcacttgtacatcgtgaagcgcggtaccatgccgatgagctccttgtacttgcgctcctgctcgtggcgcagccacaggtacagtagatcccagtggtccaggttgcgggcccgctcccgtagcatctgcatccgtcggtagagatcactcctgcgcacctcgtcatagtttactccggtctgcgtgtggaacagcaggtacagctcattgggcttctcgtccggcagcgagatgctggatgagaacttcgtcagctcgaagtggaagagcatacggatgccataggatatgtgacggatgtgatcgaaattcttgatgttcatcgcacacagagcggaggcgtccaggagcagtagcttgcgacccgtgatcatgttcacccggaaagtgttctgaaatgagcgaggtgatcatcttatgaaactagagccaaatctatggtctattacccaccatgtactgtggatatccgtagccattgatccagcgcctgatgtccatgtcatcccattcgaatatcgaaggcaatggcagcttgtccaccacaatgatgctcagttccacgagagaatcgggtgtcgtcctgaactgtatgggtatatcgtccccatcgtacttgggacagccctttaggaactcattccgttggaacttggtgggtgccatatccgaacggatctttgtcttctttttcaccttctggtggaggaacttggtgtccgctattccatatagatagggcatcttgcataaatttagcaaacaatcttagagtcttttactggattgttttgttttattaaatatggtataacgaaaaacgtgaaatagtatgatagatggtggaaagcctttcggatctttactatattatattttgactttcttatagagtatcatgttatattctggcggtttcaagctgacaatgtcgcttttgaagggcttcgtattaccaattcgccagcacgtttcgtgtgcgaatctggagaaatctggacgcgtccaggccaggtagatagatatccatccaaatggcatacccatggcaacgaacccgcgtcgcaaacatctgtccctcaatcagcacatgccacaaacgtgagttatggacccaggtagatggtaatagatcgattttttgggattgttctcgttcgggattgggttgttccgactcctaacggtgttcggttcctccatgctggccatgtgctgatggtggttgttgtcaaaacatggtcaagggtaaacgccttcagttcggatacctgacagcgaatatgtttgcggtttattaatgaatatatgaatacatacgtatatgtatatatatatgtatatgcatatagaaatcgtttggatcgctgaatcatcgccgattcgttgcgatcgtctcacgtgacggacatatcggaggtggctttaatggaaacacgtttttggccatttcgatcattttggtgtattgtaatcaagcaaaagcccaataaacctcatcaggttcattttggacgaacgcttaccgtcattagcatgtgcctgtcaatttttattattatttttgcaacagtttttcgccttaaaaagtgtgatgacaattcgaaaggtttttttcttgttttgttttcagcacatcaattaggtctgtttgcgcatgtttttagcacgaagattcggttttttattttaaacatttcgacactaagcacggttccctagtatttaatggatttgggcgtcg

SEQ ID NO: 39353 - DNA, 1241 bp, DROSOPHILA
atgccctatctatatggaatagcggacaccaagttcctccaccagaaggtgaaaaagaagacaaagatccgttcggatatggcacccaccaagttccaacggaatgagttcctaaagggctgtcccaagtacgatggggacgatatacccatacagttcaggacgacacccgattctctcgtggaactgagcatcattgtggtggacaagctgccattgccttcgatattcgaatgggatgacatggacatcaggcgctggatcaatggctacggatatccacagtacatgaacactttccgggtgaacatgatcacgggtcgcaagctactgctcctggacgcctccgctctgtgtgcgatgaacatcaagaatttcgatcacatccgtcacatatcctatggcatccgtatgctcttccacttcgagctgacgaagttctcatccagcatctcgctgccggacgagaagcccaatgagctgtacctgctgttccacacgcagaccggagtaaactatgacgaggtgcgcaggagtgatctctaccgacggatgcagatgctacgggagcgggcccgcaacctggaccactgggatctactgtacctgtggctgcgccacgagcaggagcgcaagtacaaggagctcatcggcatggtaccgcgcttcacgatgtacaagtgcgaggaggcggcaaagccgccggaggaacccgaggacatggaacccgaggaactcatgtgcatgacctgcattccgccgtgcgactgcgactggaccgcacgggatctccggctgccgtggcgattggagtgcctgccgcccatgctggaaaccaccatgagcaagtggaacgccttgcaggcgcagtgctccacctgcatcccgccgtgcgagtgccgctggccaccgcgattctatctcacgggcaccgtcattcgctgcctgcagcagcggttcccggagaagttctgccccatcttcgacgaacggtacagggcctcgccgcgacccagtctcgtggagcgctggacgcgattctccatttgatgcggtactttttatttcatagatatggtattctatatttaagctatgtaaagatcacagtttatatcacaaagacaagttctgaatgcgaaaatttgtggaatttcatcatgcttgcagactgatctgctcttggcatcttagcttctcgtccaaataagctattaataaaaaaaaaaatctgtcaaaac

SEQ ID NO: 39354 - protein, 349 aa, DROSOPHILA
MPYLYGIADTKFLHQKVKKKTKIRSDMAPTKFQRNEFLKGCPKYDGDDIPIQFRTTPDSLVELSIIVVDKLPLPSIFEWDDMDIRRWINGYGYPQYMNTFRVNMITGRKLLLLDASALCAMNIKNFDHIRHISYGIRMLFHFELTKFSSSISLPDEKPNELYLLFHTQTGVNYDEVRRSDLYRRMQMLRERARNLDHWDLLYLWLRHEQERKYKELIGMVPRFTMYKCEEAAKPPEEPEDMEPEELMCMTCIPPCDCDWTARDLRLPWRLECLPPMLETTMSKWNALQAQCSTCIPPCECRWPPRFYLTGTVIRCLQQRFPEKFCPIFDERYRASPRPSLVERWTRFSI

SEQ ID NO: 39355 - DNA, 4174 bp, DROSOPHILA
aataatatttctattgtatttctccaaacaatcctttttccaattgttgtgaaattatcagcttatgaaagtatcgagctatcgcagaacgatagacccgataaatttggaaatagaagaactcctaatatcgaaagctttgcttacaatttttataacgttaagttaaagttatattatactttaatttgcatacttagaaaacgttttatttgtcatattttaggaaaaggcagaaaaatatatcgttagcaagggcgttgccacatcgtcagttctagagcgacgttgccatcgtagtttcgatgccagtaatcgatactttttgttgtagttgtacatttttcgccaaaaataataataaaagtgaaaaattttttttgttaatatacgtttatttgttgtacaaaggagaaaatgttattaaactgattggccgccccagcattttcgtgacccccgctccaaatacaacaaaatcgaacggccgccagcaacaacaaggtgcagtaaatattcagtgcgctggtaagaaagatggaaacaaaacgagagaccgaaaaagcaatcaaaatagaattccgaatttagaatatgacagactgaaaaaaattttcaattcgaacgcattgccgctgctgctgcccgctcctcttcttcttcatctcctcctccttcttcctcttcttcgccagccgctgtggggggacattgggggtcaaatgcagaagatcgggactgaagatttcgtgaatttgtgatttccgaattcgttcctgctaatttgcgactgccagactcaaagaacacacacacacatacacaccagcacacacccacacgcttgcacatacattcgcttgtggccgcctgtaattatgatttttattactcctgcagcgcatatcgccttctttaaccgccaattgctcctgctcctgcccactaaccaagtcaaaccaaaagaagcgattactctccaagcgccagcggaagtgaaatgataaagtccaccacgaatccacaggaacagcgtctgccacgccccgaggatcagtcgccagcgccgccgccgccgcccccctcctcagccaccacctccaccgccgccccagccacgcccacgcaccaagtggccaccgtgatagccaacatggacaccctgaagacagcctttctgcccaatctcagcatggaccccaatgtgcacgtgtcgccgcactattgtcccatgtgtcaccagcagtttgagcgaccgcagcacgtcgcggatcacatgcagctgtgccacgggatcacgctgaacgcccagggagccattgccacgctggacggcggtcatccgcaggcacagcagcaccccaagctcagccacccctgcttcaattgtgatgaaaagtttggcaacgccgtcgatttagacgaacaccatcggctggcccatcagacgcccgccttcctgtcccgctgccttatgtgcagcatctatggcatccactcggccacccagcagcccaacgagtacaaatgcacgcagtgcggctccatttgcaccaccgccatgctggctgccggacagcagggctttatggaacagcaggaggcggcggtgacgcccgacgatcagctgccggcaatggcgccccgtgatatgagactgacgcccgaggagcagcaccatcagcagcaactgcaggcggagcaccaccatcagcaacagcaccaacaacaacaacagcagcagcagcagcagcaggaactgctggagcagcagcagcgtgaaatgcaggagcaggcgcaacagcagcaggtgcaccatcaccagcaggatcaggatctcgccggcgaccaggtggcgctgaaggtgccaccactcaccgtcaagctaaacaagaacgccaacggtggcgccattgtgtcgcatccgcaggtcattatcaaggaggagccactcagcctgagcgacagtggtgatgttgtcaactctgtgcctgtctatgccatacaagccaatcccggtgtacccgctccggccagttcgggtgtgctagtcggcacacaaacggtacctgccgatctggcgcacaagatccggcacaaatgtccggattgtccaaagaccttcaagacgcccggcacgctggccatgcaccgcaagatacacacaggcgaagcagagagagaagccgttccactgcggttactgcgagaagtccttcagcgtgaaggactatctgaccaagcacatacggacgcacaccggcgagaagccgtacacctgtccgtattgcgacaagcgcttcacgcagcgcagcgccctcactgtgcacacgaccaagctgcatccgctctagggaaggccgggcggtggccgccagttacccgttcctgccccagccgctcctcctcctcctactcatcctccaaatccttctggtcctggtgcgccgccgccgttgtccgccgacacggatacagatcccaagaagccatctgcggcggctgcggcatcggcttaggacgaactgcagcggaaacgggatgagcaaaccataaatgaaagaccatttcaaagacgagacacactcacgtagacgggagttatgcaactgcagcggatgcaacaactgcaaccaacgactggcaaatctcttcgcagtgctgctagattaaattactaaattagatacataccttcagttcggttaacacagaagcagaagcagaaacagatttgtactaaattagcatacagttcgtagaatgtttaagttattgcaatcgatttttgattcttattactatttggttatgtagatgttttgcaatttttattttttatacacctatgtatatcgtatataatattttgttattctatgagattttatatggtgactccatagcgcacactcacttacgcgcggcgctatacagacacacacacaaacacacacacacccaaaactacacacaacacacatatattatttataaagagagagaaaatatttttactcatatactttgtggcaatattatttttattacttccttaaattgtttgtaaatgttactgaaagcagcaaaacaaaaagaaaaaggtaaactcatgtctacgcgcaaaacttaaattatttttataaattatacatctattttattcgaactcaaaacaacacaaaattatttatttttacgtgaaagaacgtttttcaaaatttcgactcgtagcggaaatgacaaaggaccaatacgaaatttagtcatttctcaattatttgcacacgagcaggatctcgtttgttttggctttaaaaatttatttacttttaattaactaaatgatctaatcattttagcttgtttttattgatgaatgttaaccattgtttattttttaaattatttaagttgaaagcgctgcttttgtttgttaaactaaactaaactaaacagtgagattgtataaaactttaaaaaaaaaaggaataacgaaaaacataactaagaaattaattttacaaaatttgcattttttaacgcaaaacaaaaagtatttaaggcaaatcgaaatgagaaatctacgctaaacgcaacacagctttatgcgccaaactagaagattaaaaaaaaattaacataacgatctacacaattgatacttttgataaaaagaaagcttcaagttgtttttgtaatatatataaatatggattgatcatttttacgactacttaaacgcgtttttttaaaccagcaaatgattacttgcaagagttgtacgtactaaaatcgactaaaacttaaactaaaactgtagcaaaaccaaaaccatgtacatttttataacatagtgttatataattataaagtatgcaaatatataaacctgtatctaatattaatgcataatacactcaaacaaattgtctacctaatggcacatagcacagcaacaaacgatgcgcagcgcatgtaaaaccaaaataaattctaagtactaaactattgtaattctttaagttttaaataaaccgtgaagagttgacgatcaaaagcaaacagcaaaacgctaaatgcagcaaaaaaaaaagaaacgcctaactaaccgcaacactgaaaaaaaaaaccaattaactctgctgtaagtgattaccaatgaatgagtcat

SEQ ID NO: 39356 - DNA, 2353 bp, DROSOPHILA
atgataaagtccaccacgaatccacaggaacagcgtctgccacgccccgaggatcagtcgccagcgccgccgccgccgcccccctcctcagccaccacctccaccgccgccccagccacgcccacgcaccaagtggccaccgtgatagccaacatggacaccctgaagacagcctttctgcccaatctcagcatggaccccaatgtgcacgtgtcgccgcactattgtcccatgtgtcaccagcagtttgagcgaccgcagcacgtcgcggatcacatgcagctgtgccacgggatcacgctgaacgcccagggagccattgccacgctggacggcggtcatccgcaggcacagcagcaccccaagctcagccacccctgcttcaattgtgatgaaaagtttggcaacgccgtcgatttagacgaacaccatcggctggcccatcagacgcccgccttcctgtcccgctgccttatgtgcagcatctatggcatccactcggccacccagcagcccaacgagtacaaatgcacgcagtgcggctccatttgcaccaccgccatgctggctgccggacagcagggctttatggaacagcaggaggcggcggtgacgcccgacgatcagctgccggcaatggcgccccgtgatatgagactgacgcccgaggagcagcaccatcagcagcaactgcaggcggagcaccaccatcagcaacagcaccaacaacaacaacagcagcagcagcagcagcaggaactgctggagcagcagcagcgtgaaatgcaggagcaggcgcaacagcagcaggtgcaccatcaccagcaggatcaggatctcgccggcgaccaggtggcgctgaaggtgccaccactcaccgtcaagctaaacaagaacgccaacggtggcgccattgtgtcgcatccgcaggtcattatcaaggaggagccactcagcctgagcgacagtggtgatgttgtcaactctgtgcctgtctatgccatacaagccaatcccggtgtacccgctccggccagttcgggtgtgctagtcggcacacaaacggtacctgccgatctggcgcacaagatccggcacaaatgtccggattgtccaaagaccttcaagacgcccggcacgctggccatgcaccgcaagatacacacaggcgaagcagacgccacgcccaaagaacgcccctacacgtgctcctactgcggcaagtccttcactcaatcgaatacactaaaacagcacactcgcatacatacaggtgagaaaccatttagatgtggctattgtggcagggcgttcactgttaaggattacctgaacaaacatttaacgactcacacgggagagaagccgttccactgcggttactgcgagaagtccttcagcgtgaaggactatctgaccaagcacatacggacgcacaccggcgagaagccgtacacctgtccgtattgcgacaagcgcttcacgcagcgcagcgccctcactgtgcacacgaccaagctgcatccgctctagggaaggccgggcggtggccgccagttacccgttcctgccccagccgctcctcctcctcctactcatcctccaaatccttctggtcctggtgcgccgccgccgttgtccgccgacacggatacagatcccaagaagccatctgcggcggctgcggcatcggcttaggacgaactgcagcggaaacgggatgagcaaaccataaatgaaagaccatttcaaagacgagacacactcacgtagacgggagttatgcaactgcagcggatgcaacaactgcaaccaacgactggcaaatctcttcgcagtgctgctagattaaattactaaattagatacataccttcagttcggttaacacagaagcagaagcagaaacagatttgtactaaattagcatacagttcgtagaatgtttaagttattgcaatcgatttttgattcttattactatttggttatgtagatgttttgcaatttttattttttatacacctatgtatatcgtatataatattttgttattctatgagattttatatggtgactccatagcgcacactcacttacgcgcggcgctatacagacacacacacaaacacacacacacccaaaactacacacaacacacatatattatttataaagagagagaaaatatttttactcatatactttgtggcaatattatttttattacttccttaaattgtttgtaaatgttactgaaagcagcaaaacaaaaagaaaaaggtaaactcatgtctacgcgcaaaacttaaattatttttataaattatacatctattttattcgaactcaa

SEQ ID NO: 39357 - protein, 510 aa, DROSOPHILA
MIKSTTNPQEQRLPRPEDQSPAPPPPPPSSATTSTAAPATPTHQVATVIANMDTLKTAFLPNLSMDPNVHVSPHYCPMCHQQFERPQHVADHMQLCHGITLNAQGAIATLDGGHPQAQQHPKLSHPCFNCDEKFGNAVDLDEHHRLAHQTPAFLSRCLMCSIYGIHSATQQPNEYKCTQCGSICTTAMLAAGQQGFMEQQEAAVTPDDQLPAMAPRDMRLTPEEQHHQQQLQAEHHHQQQHQQQQQQQQQQQELLEQQQREMQEQAQQQQVHHHQQDQDLAGDQVALKVPPLTVKLNKNANGGAIVSHPQVIIKEEPLSLSDSGDVVNSVPVYAIQANPGVPAPASSGVLVGTQTVPADLAHKIRHKCPDCPKTFKTPGTLAMHRKIHTGEADATPKERPYTCSYCGKSFTQSNTLKQHTRIHTGEKPFRCGYCGRAFTVKDYLNKHLTTHTGEKPFHCGYCEKSFSVKDYLTKHIRTHTGEKPYTCPYCDKRFTQRSALTVHTTKLHPL

SEQ ID NO: 39358 - DNA, 3877 bp, DROSOPHILA
caagcaaatgccccgttatcgcagtcaacaaacgaagtcacacactaattaatcactagtccacggtcttattttgcattatttacattcgatattttcgaattgcgattgtggcgggcttacgatccaggaaaactttacttaatatttcttgatgtatttatgttgattatcaacaatgtattgtgatgagaaagtcctatcacgcctactatatgttcaacaagtcgtggacttacggtttatttctgtcccctgtcgggagaagaatggtcggtattacctggtttccctacctgtagctgtagaaatggaagtgggcattgagctcttgatatcgatatatcgattaccttgggaatatccttacgaaaaaccgttactatcattacgttttaacggatttgcgaaacataagcacttgctaaaaaagtttgcttcgatttattaagaatatcaaatggattaccaaacacattcgtatgagatgcagaaaaataaaactatttattcgtcaccattgaaaaccacaacaatttattgtcttataataacggtaaaattcataactatcgatagttaacaacactgcccgcctgtgcatcactgaccagtgctgcaaaacgaccgcagcgcatcaggtggcaaccgtgtgttcctacaccaagcaaaacaactattttattattaaattcagcacaaagttcaatgattattaggtcctctgcacactcactattcgatcagcaagcactggcacagcgataagtatgtaagttaaagtttcaaaatggtacaaagccaaccaaatgtgcgggcgcacgctattttgtgcagtgtaaaggcgccaacgatgttgtcttcgtctcgcacaacgcaaatttattcaaagacccactgccacattttgatacgctcccgagcagctaaacacgtttcgtatgcttgcatgtccatttcgtaatgcccccgatcaggaactaaggtctgtccacccgagatggcggcgataaaggtgagtttgcgactgcccttttggagcacacagacaatggcccaactaaatgcgttgtacaaccacagaacatcaccctgggcattctgtacggcctgtgggacagcatacgtggcatgacactggtcctgcacatcgacgacgaggtgaaccgccagaatgccgagcaggagcaccgccaacagctgcgtcgcaccgacaaggatcgttacgaacgcgccaggagatcaccgtcaccagtgcccagttccgcggctgccatgattcgggaggagtatgccaagcaggcggaggagaacgccgacgagcggacgctagagaagatcctgggcaagaagccagccgcccaggatcaacacccgcaggggtatgtgttacacaaagactcattccacgtacatgtaattttaaactgcgcacttgatttttaatccggcgacacagggagaagaagatcgccaagaagctgttcaagtgctgcatgctcaatggcggtttcacctggctgagcatcgtcctgttcgagaacgctctgctgcccacgctcaaattctgccttaccatcttctatggagcccattccgagaccctgccggtggtttggggctggctgcatcccatactgtccctgctcttcggcatgatgtgggtgctgcccatattcatgctctccaagattgtgagctctctgtggttcgcggacatagccaatgccgcgtatcgcgtgagaaagggtcgcccgcagctaatccctggaattagcaaactggtggccgacttcctattcagcatggtggtgcaaatgctgttcctggtacagagcatgctggttaacctagtgcctgtgaaatatgtgggctcctcgctgtgcttcgtgcatctgtgcctgctctactcactgtactccttcgagtacaagtggttcaacatgggctgggagctacatagacgactcacgtacattgaaaagaactggccctatttcttcggcttcggaataccgctcaccgtgctgacaaatctgtccagctcggtgatcgtcagtagctgcatcttctccatcttttttcccctgttcatactcagcggcaatgaggcaaaacccattgtggacaccacgtaagtgtttttggtttggtaacacagtccagcttcactaaatcgaacttctggaaaatgtaaactggaaagtgatgtagttcatgttcaaactatcacgcaattttagttggacgtcttcatgtaatgtaatgtaattcgtttttcctttgttcgtgaccagcacgtatcgatttagagaagctcttctgtactatatctataaatataaataactaaatatttgacatccacccagtgaggtctccctgcgtctcttctcgccggtggtcttcatatcgaacctctgcttcggcggcaatccgtggagcaaggccaatcgactgagtgccatgcagcggcagcagtatgagctgcagcagcgacagcgtttgctccagcgggacgagcaactgctcaagcagcgcaagcagcaatatgtgcagcagcaacggctgcaacaggagcagctaatgcgacgtgatcgctcgcattcgcgatcacagacaccgcagctgggacatccgcatcgctacgcccaggcgcccgttttcgatgcgggtcgggtgcgcgattcctccgcctcgtcaacgcacagctccaatgcgccgagcattaatagccatcggccgccgccttattacggcagctcgctgcgcggagctgcgcctttggtgcccactcctgtgcccggtgcaccgagagctccgctaaccccgcccgtgatacgccaggagtcggggcccgatgactggaacttgtgagatttatgcttatacacgcaacgtaggctttagctatatataattcgatctgtgtaatctacgtatcatctacctatctaaccatcgtgaactgtgtaagttaaagataactctaggtctacgcataatgacaatgttcgctagtcgacaacgccaccgccaccaccaccaccaacacaacgccctattcggaatgggcatgactatatatatatagactatagagtggctatatctgaaatgcggctcgcgcaactgctgcataatcgtttacatgtttattttagtcgtcgtttttctctttaatttttgctcgtagggtgatatgctctacactagaaattacgtcgggcgtaaagttcgttaaatgtataattaatcaaaaataaaattaattttgtactttcgtcaattgttgttgcttgcttgcctaatggggagcgcttggccaagccttatcagtgcgatttgtctcgactagattatagattgtgtgagtcagaagtaatctaaaatagttgctaatttcgtttcgtttgatgactgtcacagtttttaataaggatcacttcctatttttaaatcagaagttcctataatagctttgcccaatttatgaccctattcccaatgtttccactccaccaattcgaataataatttcatgatgatttgacaatataacagctacttagtaccacataataactcccccccgaactgaatcctccttccctaaccgccaccaattaacgcttgagttacagcgcacgaacaatcgaaccaggatatgggttcacgcttggattggggtgttgctgatgtggcgttgtgggcgattgccgaccaaattgattatcaccaaggtaacacccatgtgtccacacattgttctgcttgaaagtggaattgtcagtgacagtataggttgtacatatctgtatcctttttcaaaagcgtagtttcctgtcccagtcaccatttgttgttcgtcctgtgc

SEQ ID NO: 39359 - DNA, 1494 bp, DROSOPHILA
atggcggcgataaagaacatcaccctgggcattctgtacggcctgtgggacagcatacgtggcatgacactggtcctgcacatcgacgacgaggtgaaccgccagaatgccgagcaggagcaccgccaacagctgcgtcgcaccgacaaggatcgttacgaacgcgccaggagatcaccgtcaccagtgcccagttccgcggctgccatgattcgggaggagtatgccaagcaggcggaggagaacgccgacgagcggacgctagagaagatcctgggcaagaagccagccgcccaggatcaacacccgcagggggagaagaagatcgccaagaagctgttcaagtgctgcatgctcaatggcggtttcacctggctgagcatcgtcctgttcgagaacgctctgctgcccacgctcaaattctgccttaccatcttctatggagcccattccgagaccctgccggtggtttggggctggctgcatcccatactgtccctgctcttcggcatgatgtgggtgctgcccatattcatgctctccaagattgtgagctctctgtggttcgcggacatagccaatgccgcgtatcgcgtgagaaagggtcgcccgcagctaatccctggaattagcaaactggtggccgacttcctattcagcatggtggtgcaaatgctgttcctggtacagagcatgctggttaacctagtgcctgtgaaatatgtgggctcctcgctgtgcttcgtgcatctgtgcctgctctactcactgtactccttcgagtacaagtggttcaacatgggctgggagctacatagacgactcacgtacattgaaaagaactggccctatttcttcggcttcggaataccgctcaccgtgctgacaaatctgtccagctcggtgatcgtcagtagctgcatcttctccatcttttttcccctgttcatactcagcggcaatgaggcaaaacccattgtggacaccactgaggtctccctgcgtctcttctcgccggtggtcttcatatcgaacctctgcttcggcggcaatccgtggagcaaggccaatcgactgagtgccatgcagcggcagcagtatgagctgcagcagcgacagcgtttgctccagcgggacgagcaactgctcaagcagcgcaagcagcaatatgtgcagcagcaacggctgcaacaggagcagctaatgcgacgtgatcgctcgcattcgcgatcacagacaccgcagctgggacatccgcatcgctacgcccaggcgcccgttttcgatgcgggtcgggtgcgcgattcctccgcctcgtcaacgcacagctccaatgcgccgagcattaatagccatcggccgccgccttattacggcagctcgctgcgcggagctgcgcctttggtgcccactcctgtgcccggtgcaccgagagctccgctaaccccgcccgtgatacgccaggagtcggggcccgatgactggaacttgtga

SEQ ID NO: 39360 - protein, 497 aa, DROSOPHILA
MAAIKNITLGILYGLWDSIRGMTLVLHIDDEVNRQNAEQEHRQQLRRTDKDRYERARRSPSPVPSSAAAMIREEYAKQAEENADERTLEKILGKKPAAQDQHPQGEKKIAKKLFKCCMLNGGFTWLSIVLFENALLPTLKFCLTIFYGAHSETLPVVWGWLHPILSLLFGMMWVLPIFMLSKIVSSLWFADIANAAYRVRKGRPQLIPGISKLVADFLFSMVVQMLFLVQSMLVNLVPVKYVGSSLCFVHLCLLYSLYSFEYKWFNMGWELHRRLTYIEKNWPYFFGFGIPLTVLTNLSSSVIVSSCIFSIFFPLFILSGNEAKPIVDTTEVSLRLFSPVVFISNLCFGGNPWSKANRLSAMQRQQYELQQRQRLLQRDEQLLKQRKQQYVQQQRLQQEQLMRRDRSHSRSQTPQLGHPHRYAQAPVFDAGRVRDSSASSTHSSNAPSINSHRPPPYYGSSLRGAAPLVPTPVPGAPRAPLTPPVIRQESGPDDWNL

SEQ ID NO: 39361 - DNA, 5350 bp, DROSOPHILA
ttgcttgcctaatggggagcgcttggccaagccttatcagtgcgatttgtctcgactagattatagattgtgtgagtcagaagtaatctaaaatagttgctaatttcgtttcgtttgatgactgtcacagtttttaataaggatcacttcctatttttaaatcagaagttcctataatagctttgcccaatttatgaccctattcccaatgtttccactccaccaattcgaataataatttcatgatgatttgacaatataacagctacttagtaccacataataactcccccccgaactgaatcctccttccctaaccgccaccaattaacgcttgagttacagcgcacgaacaatcgaaccaggatatgggttcacgcttggattggggtgttgctgatgtggcgttgtgggcgattgccgaccaaattgattatcaccaaggtaacacccatgtgtccacacattgttctgcttgaaagtggaattgtcagtgacagtataggttgtacatatctgtatcctttttcaaaagcgtagtttcctgtcccagtcaccatttgttgttcgtcctgtgcggtcgattttttagctcttaaaaacccgaatcagaaatcatatgtgaaaaacataataatgattttgatgaatccgaaaacttcgaaaatcctgtggctgctgggatttctatcgttattaagcagctttagtttggagatcgctgcgcaaaccactcaaaatatcaatgtgtgtaagttgagcatcgatcgatatgcctaaagatatatatatatagatgataaatacataatcatatacctaatgattatagtttagtgcactcatttaaagatctttcgaaactatatcgaatattatcgaactcttttggctgagtggattaaaagtaaactaattagatgaaaaccaatatggattgggattacttttttgggtggtgccagtcataatgagtttttagggcaaacaaacaaacgcaatgccacgtaatgcctttggccaatgcactttaaccgatgtgatcccatccctttggatagtgttcatcaacgaggtggacaatgagccggctgcgaaggctgtggaggtggtgctcacctacttgaagaagaacatacgatatggtctatcggtgcaactagattcgatagaggcgaacaagtccgatgccaaggtgctgctggaagctagtgagttgtggtcgggattatgccaggattcagttgctcatactcacacttttccatctcagtttgcaataagtacgcaacaagtattgagaagaaacaaacgccccatctgatcctggacaccaccaaatcgggcatagcctcggaaacggtgaagagcttcacccaggctctgggtctgcccaccattagtgcctcctatggccagcagggcgacttgaggcagtggcgcgacttggatgaggcgaagcagaagtatttgctgcaggtgatgccgccggcggatattattcccgaggccattcgaagtatagtgattcacatgaacatcacgaatggtaaaaagatatgatatctatttgaaagtgagtattaatacgtacccttccaaatcccctccagctgccattctgtacgatgattcctttgtcatggaccacaagtacaagtccctgctgcagaatatacaaacccgtcatgtgatcaccgccatagccaaggatggtaagcgggagcgcgaggagcaaatcgaaaagctgaggaacttggacatcaataacttctttattctgggcaccctgcaatcgatccgcatggtcctggagtcggtgaagccagcgtatttcgagcgcaacttcgcctggcacgccatcactcagaacgaaggagagattagcagtcagcgggacaatgcgaccattatgtttatgaaacccatggcgtatacgcaatatcgagatcgcttgggattactgcgaaccacttacaatctgaacgaggagccgcagttgtcatccgcgttttacttcgatctggcacttaggagtttccttaccatcaagtgggttggatgtatatttactatatattttaactatttttgcctgcagagaaatgttacaatcgggcgcctggccaaaggatatggagtatctgaattgtgacgatttccaaggtggcaacacaccccaaaggaacttggatcttcgagattacttcaccaaggttgctgctcccacctgtataagaaattatgattgattgattacccacttccgtttctcagattaccgaaccgacttcgtatggaacctttgatctcgtcacgcaatccactcagccattcaatgggcatagcttcatgaaattcgaaatggatataaatgtgctgcagattcgtggtggcagttccgtgaacagcaagtccattggcaaatggatatcgggtctgaactcggagctcatcgtcaaagacgaggagcagatgaagaatctcactgcagacactgtttatcgaatctttactgtagtggtgggtcgcgacaggggattgcaaaggatgttttagtagtgtagtttttttttatttcttaagtattcaacttgtagtccttgtgtgtgtcgtcttttgatcatattcagttacatttaaattaatatatattccaaatattaaaggtaaaccaacgtggttttagtcaataaactaaatttcatttgaacttcacagcaagctcctttcataatgcgcgatgaaacggctccgaaaggatacaaaggatactgcattgatctgatcaacgagatagccgcaattgtccacttcgattacaccatccaggaggtggaggacggcaagtttggcaacatggacgagaatgggcaatggaatggcattgtgaagaagctgatggacaaacaggcggacattggccttggcagcatgtcggtgatggccgaacgggagatagtcattgacttcaccgttccgtactacgatctggtcgggattacgatcatgatgcagcgacccagttcgccaagctcgctgttcaagttccttaccgtgctggaaacgaacgtgtggctttgcatcctggctgcctacttctttaccagctttctcatgtggatcttcgatcgctggagtccctatagctatcagaacaatcgagagaagtacaaggacgacgaggagaagcgcgagttcaatctgaaggagtgcctctggttctgcatgacttcattgacacctcaaggcggtggcgaggctccaaagaatctgtctggccgtttagtggccgccacctggtggctattcgggtgggtagttgctcttcatttgcttgtaaactctttcctttttaaaagagtttttttgttcttcccttaagttttatcattattgcttcgtacacggccaatttggctgccttcttgaccgtatcacgtttggatacgcccgttgaaagcttggatgacctggcgaagcagtacaagatcctatacgctccattgaatggctcatctgcgatgacatatttcgagcgtatgtccaacatagagcagatgttttacgagatttggaaggatctgtcgctgaacgactccctgaccgccgtggagcgctccaagctggctgtttgggattatccagtgagcgacaagtataccaagatgtggcaggccatgcaggaggcgaagctaccggccaccctcgacgaagcggtggcccgggttagaaattcgacagctgccacgggttttgcctttctgggcgatgccaccgatatacgctacctgcagttgaccaactgtgatttgcaggtggtgggcgaggagttctcccggaaaccctatgccatagctgttcagcagggatcgcatctcaaggatcagtttaataatgcgtgagtaatgggaaaatatagatgtgagcttcttcatatcgttgtggtgctttagaatcctgaccctgctcaacaaacgacagctggagaagctcaaggagaagtggtggaagaacgacgaagctctggccaagtgcgataagccggaggatcaatcggatggcatctcgatccagaacattggcggcgtcttcattgtcatattcgtgggcattggaatggcctgcatcacgctggtctttgagtactggtggtacaggtaccgcaagaatccgcggatcatcgatgtggccgaagccaatgcggagcgatccaatgctgctgaccatcctggcaagctggtcgatggtgtgatccttggccactcgggggagaagttcgagaagtcaaaagctgcactgcgtccgcgctttaatcagtatccggccacgtttaagcctcgtttctagaattactcgtataccaatgaaacgaatattatggtaaaatgagcactcggatgtctacgtctagttttaaagaaatcagtcactttgtgcacttttattgaactcttaataaatgtttaaacaaaataattgtaaaacctttgtatttattatttttgaatttcaaataatatttcaaaagccgctggtatttctagtttagtattaaataccgccttctgctatcgagaaatcgacaccgataggttcggacaataaaacgcccccgatatcgataggcccgataaattcggacaaaaaagaacaacataaaattccgcccgcacccgcgctcaacagttttgtttttaactaaccgcgatgggagacagttcagatgaggaatatctgggcacggactggctggcttacagcgaacgctccgactgggaagatgtgcaaccgctcgcccaggacgacggtcccaatccggtggtgtccattgcttacagtcaaaagtgtgagtaatgcatgcggctttatctctggatgtcactttatctgagcaaatatctccgtacatcgtagttcgcgaggtcttcgactacatgagggccataattgcgcggggggagaagagccaacgtgccttggacctaaccacggacgcactgcgtctgaatccggctaactacacggtctggcaatacagacgcgacgttctgcgcgaactaaaggctgatctgtatgcggaactggactatctgaccgaggtgattggccagaactcgaaaaactaccaggtttggcaccaccgtcgcgtcatcgtcgagatgctgaacgatcccagcaacgagctggagcttactgagaacgccctggtcaacgatggcgatgccaagaactaccacgcctggcaacatcgccagtgggccattcgcagctttaagtgagtagtcgtatgtttattaagatttactttctataaattaatgtccactacttttagtctctatgacga

SEQ ID NO: 39362 - DNA, 2790 bp, DROSOPHILA
atgccacgtaatgcctttggccaatgcactttaaccgatgtgatcccatccctttggatagtgttcatcaacgaggtggacaatgagccggctgcgaaggctgtggaggtggtgctcacctacttgaagaagaacatacgatatggtctatcggtgcaactagattcgatagaggcgaacaagtccgatgccaaggtgctgctggaagctatttgcaataagtacgcaacaagtattgagaagaaacaaacgccccatctgatcctggacaccaccaaatcgggcatagcctcggaaacggtgaagagcttcacccaggctctgggtctgcccaccattagtgcctcctatggccagcagggcgacttgaggcagtggcgcgacttggatgaggcgaagcagaagtatttgctgcaggtgatgccgccggcggatattattcccgaggccattcgaagtatagtgattcacatgaacatcacgaatgctgccattctgtacgatgattcctttgtcatggaccacaagtacaagtccctgctgcagaatatacaaacccgtcatgtgatcaccgccatagccaaggatggtaagcgggagcgcgaggagcaaatcgaaaagctgaggaacttggacatcaataacttctttattctgggcaccctgcaatcgatccgcatggtcctggagtcggtgaagccagcgtatttcgagcgcaacttcgcctggcacgccatcactcagaacgaaggagagattagcagtcagcgggacaatgcgaccattatgtttatgaaacccatggcgtatacgcaatatcgagatcgcttgggattactgcgaaccacttacaatctgaacgaggagccgcagttgtcatccgcgttttacttcgatctggcacttaggagtttccttaccatcaaagaaatgttacaatcgggcgcctggccaaaggatatggagtatctgaattgtgacgatttccaaggtggcaacacaccccaaaggaacttggatcttcgagattacttcaccaagattaccgaaccgacttcgtatggaacctttgatctcgtcacgcaatccactcagccattcaatgggcatagcttcatgaaattcgaaatggatataaatgtgctgcagattcgtggtggcagttccgtgaacagcaagtccattggcaaatggatatcgggtctgaactcggagctcatcgtcaaagacgaggagcagatgaagaatctcactgcagacactgtttatcgaatctttactgtagtgcaagctcctttcataatgcgcgatgaaacggctccgaaaggatacaaaggatactgcattgatctgatcaacgagatagccgcaattgtccacttcgattacaccatccaggaggtggaggacggcaagtttggcaacatggacgagaatgggcaatggaatggcattgtgaagaagctgatggacaaacaggcggacattggccttggcagcatgtcggtgatggccgaacgggagatagtcattgacttcaccgttccgtactacgatctggtcgggattacgatcatgatgcagcgacccagttcgccaagctcgctgttcaagttccttaccgtgctggaaacgaacgtgtggctttgcatcctggctgcctacttctttaccagctttctcatgtggatcttcgatcgctggagtccctatagctatcagaacaatcgagagaagtacaaggacgacgaggagaagcgcgagttcaatctgaaggagtgcctctggttctgcatgacttcattgacacctcaaggcggtggcgaggctccaaagaatctgtctggccgtttagtggccgccacctggtggctattcggttttatcattattgcttcgtacacggccaatttggctgccttcttgaccgtatcacgtttggatacgcccgttgaaagcttggatgacctggcgaagcagtacaagatcctatacgctccattgaatggctcatctgcgatgacatatttcgagcgtatgtccaacatagagcagatgttttacgagatttggaaggatctgtcgctgaacgactccctgaccgccgtggagcgctccaagctggctgtttgggattatccagtgagcgacaagtataccaagatgtggcaggccatgcaggaggcgaagctaccggccaccctcgacgaagcggtggcccgggttagaaattcgacagctgccacgggttttgcctttctgggcgatgccaccgatatacgctacctgcagttgaccaactgtgatttgcaggtggtgggcgaggagttctcccggaaaccctatgccatagctgttcagcagggatcgcatctcaaggatcagtttaataatgcaatcctgaccctgctcaacaaacgacagctggagaagctcaaggagaagtggtggaagaacgacgaagctctggccaagtgcgataagccggaggatcaatcggatggcatctcgatccagaacattggcggcgtcttcattgtcatattcgtgggcattggaatggcctgcatcacgctggtctttgagtactggtggtacaggtaccgcaagaatccgcggatcatcgatgtggccgaagccaatgcggagcgatccaatgctgctgaccatcctggcaagctggtcgatggtgtgatccttggccactcgggggagaagttcgagaagtcaaaagctgcactgcgtccgcgctttaatcagtatccggccacgtttaagcctcgtttctag

SEQ ID NO: 39363 - protein, 929 aa, DROSOPHILA
MPRNAFGQCTLTDVIPSLWIVFINEVDNEPAAKAVEVVLTYLKKNIRYGLSVQLDSIEANKSDAKVLLEAICNKYATSIEKKQTPHLILDTTKSGIASETVKSFTQALGLPTISASYGQQGDLRQWRDLDEAKQKYLLQVMPPADIIPEAIRSIVIHMNITNAAILYDDSFVMDHKYKSLLQNIQTRHVITAIAKDGKREREEQIEKLRNLDINNFFILGTLQSIRMVLESVKPAYFERNFAWHAITQNEGEISSQRDNATIMFMKPMAYTQYRDRLGLLRTTYNLNEEPQLSSAFYFDLALRSFLTIKEMLQSGAWPKDMEYLNCDDFQGGNTPQRNLDLRDYFTKITEPTSYGTFDLVTQSTQPFNGHSFMKFEMDINVLQIRGGSSVNSKSIGKWISGLNSELIVKDEEQMKNLTADTVYRIFTVVQAPFIMRDETAPKGYKGYCIDLINEIAAIVHFDYTIQEVEDGKFGNMDENGQWNGIVKKLMDKQADIGLGSMSVMAEREIVIDFTVPYYDLVGITIMMQRPSSPSSLFKFLTVLETNVWLCILAAYFFTSFLMWIFDRWSPYSYQNNREKYKDDEEKREFNLKECLWFCMTSLTPQGGGEAPKNLSGRLVAATWWLFGFIIIASYTANLAAFLTVSRLDTPVESLDDLAKQYKILYAPLNGSSAMTYFERMSNIEQMFYEIWKDLSLNDSLTAVERSKLAVWDYPVSDKYTKMWQAMQEAKLPATLDEAVARVRNSTAATGFAFLGDATDIRYLQLTNCDLQVVGEEFSRKPYAIAVQQGSHLKDQFNNAILTLLNKRQLEKLKEKWWKNDEALAKCDKPEDQSDGISIQNIGGVFIVIFVGIGMACITLVFEYWWYRYRKNPRIIDVAEANAERSNAADHPGKLVDGVILGHSGEKFEKSKAALRPRFNQYPATFKPRF

SEQ ID NO: 39364 - DNA, 6938 bp, DROSOPHILA
cagctagtagtgaataatacttgagtttttgagtttgttgggctgggttgaaaaaaaaaaatatgcactttagcctctattaagcattttcctatggttttcactctcgttcgggaactgtgtgttttgaaaatgtaacaatttgcgctttcgtcctcgtacattgtgtgtatttacagaaagtctagcccatttttagattttgtatgggaatgagtggaaattacaagtgtataatatataatacaaatacactttagttggtaagattagcaagacgtaagacgtacgatagttaatgaggggggaattgctagttttatgttaatgcctataagctcaaatttacaactgattattcgctgatcgaaaatgatctcaagatctctatcatttgtttagctttagtgtggatagtgttgaaaggttgacttgaaagcaaatggttagtaactaactgtcgaggaacttagaggtaaacgaaaacgcgtgttttaggaatgggtttgtttttcttagtgtatgtggccttgtttttacagttatatcgttacctacacaggtgggctctgttttaccgatctaaacgtttgaacaactttgatctatcagtgatcctaatcaatcgaaatcaatcgaactcaagactgacagaaatcaacgtaaactaaagtaaaatcgtctaaaaatttatcaaaactttataaaacttcttggctgctttcaaggttcctcactttacgtttcattgaaaaataaagtaatatttgttattgtttgtgtttggtgagtgtttgttgcatctccatttgcatcaatcattttcctgctggttttttttttctttctttgcgaaattaaagtaattcttttattgtttgtgttgttgcgctatataataactatttctcacatattatctacacataccaacgtgtatcgtaccgtttaatacctatatacaattctcaaatatccgccatgaaccagcaaggactccctacttcgaatgcgagaccacggagtgggagaccatcgagtgagagagcattgagtgggacacgccggagatttccgcataggtatccgtgggtccttcggcactgcacaccgaatcctcgggcgtcctggaaggttccgcctcggtgatctcgatgtcctgatgatgcttgttgctgcggtgtttggcacttagagcctgcgaatttgagatattttagtgggtcacatggacaactggtggatatgtgttttctcgttgtagtttcgtgtgcaatctgttttcgataagacttatgtggtgctatctatgggacggacacatgcacacacacacacacacacgcacaagctggtggtttcgggttcattggggaactttgggtctaagtttatagacaaacgtgcgagaaattcttttgatttagtcgttttgttttggattttagtttacattcacaacacagatattttagcaggttaggtttagaggtttatgctaaaagcaaccgaaaattcttaccttatccttgctgccctttttctacattgaacattggtggttattgttttgtttggtttggttgtggtgggtttcgaatatattgtacatagtcatgacaagaacaatgatatttatagatgtattaatataagtggcaaacagtactgcgagttcacattggaggatcaagagaagtacagattcatagacggttagagagacgggggagagagaaagatctagggagcgtggggatgggcagcaaaaggtttggtttcggattgaagaataacagcaatatcgatctgaggcctacagcccggttccccattctggccacgtcaatgtcatgtacagtgagcactatggctggtggtggactacgctgccgttgtggtgaccccgactcacctgcagggagaagcgacggtgacccgccttgcgtccgccacgtcgcttactgatgtgcggattgtcctgccgcagagtcttgttcttcattatctccaattgggtatacagtctggaatcgaaaatgtatagaaaatagagataatagaacatatagatatgcttcgtaccttttgagttcggcgcgtatgtcctcgggactcatttcggatatggtcagctcaccaatgtccggatcgcccagacagagcccggcatatcctccgcccagccgctggccggcgtcgtgtgacgtacccttgaaagcatccacaggtaaacgtattgatagatcatacgctagcgaacgaacctgcaagctatgaagatgcaacaaacaccgcaaaccacactcaggaagtcaaacggaaaatggagaacggaacggaaacggaaatggaaacggaactcaaaggtaagagagagcaaaatcgcatggtatagatctgtgctgaagagttatgtatagttatatgtatatagtatgtgtatgggtggtctgtgcttattggtcgtgattgtatctttgggggtgctggaaatgaacgaaaagaaacaaatcaaattaaaaaagtaactcaaaaggtaaacaagatggacgatagctataagaagactacttagacagagaacttcagtttaagattattcagttgaggcacagaaagacagagaaagttacagtgaggcagagtcttggatacactagtttggaatttttttttctggtatgcatattggaaattttgaaaggaaaccgatttttgtcatttgtttgttagtagttagatgttgtgttttcttgttaaattcatgcaaaaatcaacactaaacatgcaaattaaatggcgtgcttattgagttcaagttaaagtgcaatacattcaggcataaataataagagctaaaaacagtcgaacattctctgtttaaacgagacacacttgcagcaacttcatagcttgactaaagtttcaattcaatgttagcttattactaaaattatgttaattttctcggtgaaaaccagaacaagaactcaaaatataaccataaacaaatgaaatattcaaattgtattttaattagcaaaagcaaccaagcttttgagtggatgtccacattttaatacttcttgtgttttggctagttatttaacaaaaatcgtttcctcaaccaatgtcaataccaagtacgcatttcgatgactataatgacgaccacgcccacgacagacgaaaggcacaaaatgaacgggtgtgaatactctaagcatatgaattatattcgtttggtgcccgactaggacaaaacacttcctaattacatcatatatctcaatgtgtagaacacaaaagcgtactcaaaccaaaaaaaaaaaaaaaaaaaccaaagcaaagtaagtaaatcatatcgtttcgaactcaaatcggttacctgcttgtgctggtaccacaactttggcacaaatatcagacccaaggcgaaactattcgtcagctgggagcggatgaacagggccagcaagatggcgctgggactcatttccggcaggtagacaaagcgcagaaagtagaagctggacgagaccaggaactccagcgtcagtgcggtgaccagaaattgtcgttccttcaatgggacaaaaggaaattaccgattaattcatttgacttgacttaaattccccttctacttagttaatcatctaagccaatctcttgcgcttaattgataaagaaagatctgcaatcgatttgactgtacatcttacccggaactgggtgttggcattccgactggcgatggacaggtgcagtccaaagcacaggatgagcatctcgctggtctgcgtgaccagttcccacttgagcggatggcaggtgttcgtgtccgcctccctgaggctctccagctgcgcactttcgagaagatccaacgacgaggccgtaaaggcggccatgtagcagatgacggcaaagaccatggtgcccagatacttgagcaggtccacgtcgcgcagcacccagcgatgcgctttccgggtgcgaaagtccaccaggtggcggtacaacttcagtatgatggcgccgtagcaggtgatgaagcccagctcccgaagccagggctccagaaggcagcgctcggtggatgcgggaaagaaatggacggcaacctaaagatgaatatgtaaatacacacagaagttgaaggtgaccatcgccaggagcactcacagatgcataaagtaaaacaatgcccagcagtatcgtctccagcacagtccacataccagacgcaatggcctgaaaatgatgaaaggattactcaaagtttcccaactttaggatatgtaaactaaataccttgcactttcgctgccggaagacaatcaccccgaggacaatgcagcacaggatgcaggcgcccagtacgatggccaccaggaggcgcagacaggcgtccacattgagcacctcctcctcctgaaaggtcagacagacgccgttgctatcgcagttagtgcatccgccgggacacggaatgcacgagtagttgtcgtagccctcggacagttccactcgatcgccacggaatccctggagcgtggaattgggcaggtagtaggattcccggcacagacaggtgtacacatcccgggtggcggcgggtttgttctcggtgagcaggcagaaggtcgtattccgatcgcaactacagagatatggtattatatatattatccagaactaatgtcacgaattatcgtataaagtttggccacaactcacccatgacggcgaccgaaaacttcctccaggccatcgttgcacacatcctcgtcggcggcaatgaaggcagccgccacaactctgaaagcatttagcataaattacaaagttgtgccaaccagctgcacatcgatgcgactcacttgatcctgtgctcgctgaaggatatgcgaaatggccagagccagcgacgcgtcaacaggttgcagtcgcgaaatggagcgccccactcctgggtgccgtccgtgctgttccaggccgcactgtagtcgggtaaaataatacatttatgggcaactttccaagattatacggcttatggtctattcaaattaagcgatgcacattatttcggcaagctacggtgcatattgaatttaattgtatttatcttttagagtaattagtatttgcatttcaaagccataagataattgattttaatttgttgctaattaatgtcgcacacttttttgggacacaaccagtcttcgaaacttaccccaactcccgccaataggaacccaaatatgccttattgtgcacctgatccggtggtatctgcaataagttaaatcgattagcccatggccccattatcgctgattagcgagtgcataccgtaacgttatccctgaatttaacgaccaccgtgtgaatgctgggcgcggcaatggcgaatgccagcagattgtcgtcctcgttgagggcgtagctggcgattccattggcccggcgactcacctccgcacgtgtcggctcatcgatggcaatcggtgtgttggcatttgggaatttgcccgataaaaattcaataaactggcgtgcggcatcctcggcgatgtcggtgtagtcgtaaaactgttgaattcataaaaccagatcacaattaattgcgttgtgtcataaataatcatttcaatgtatatgaaatgggcatataaatatcatttaaatcgaattcgatttaaatacacaaagaaaaagttcaataaaattaacacagcataaatttacgctttgctaaactcaatttatttataccacactatataggaaacggaaaacgtgtgctttctaattgaagatattttcggaaattgcgaaaaaattacgtatatgccacgtatattggtcgccacgtgatttaagtgaccatgcggcacggccacttcccccgacttgggaccattaattattcacctggcgcacaggacacgtttcacagcaacaccttgcggcaagagtgcgaaaagttttgcttcgtttcgactgtgaaataataggatttaataccctcgccgtgctgtgggactgcgggaagggtttttaatccaagttcgttcagctcctaaccgaccaaatgtttatacataatttacacgttacaagaaactctcgagatctacgcaccaaagtgtaggaaatggtagggccactttgatgacatcattatggctttgggaaacaaaagtaaccacagaagggagcagggagggggttgctggtagcggggaaaaaggacacgttgtttgggcgtgagtcatgtagttgggctggcggcaccttttggcttttaaaacaaatatttcccattagctgggctttcggtgatgagcgaccacattgcgtatacgccaccgaagccaccaaataaattgccaacaagtaacatcgatatacaaacgtttgctggatgctcctctaccatgtgtgtgtgagtgtgtttcttcattttttttcctgccaaacgtgagccaaaatttacacatcgaggcaaaagcaatcagtataaggcagctggagaaatggcacgagacctgctcccagataaagtcattatgtagtgctcctagcactcgcgcgcagccataatcataaacatttggtatactcttgcatgctagagaaatattgtagttgggtaagtgttttcagatattaaactaagtaaggaaatatttctatttttacaccattattcattgttttttcttcaggagttatctgaactttaagtaatcccaccacagttcttggaagcagtagaatgtcttcattaccgccaaatccttttgatatcctttttcccaaatgtccgcaattacacacataccctcgcactagcgcccctcgttttttcagggtataaatgtatggggaaaacacttgtaaatagcggcagcagccac

SEQ ID NO: 39365 - DNA, 2010 bp, DROSOPHILA
atggtcccaagtcgggggaagtggccgtgccgcatgttttacgactacaccgacatcgccgaggatgccgcacgccagtttattgaatttttatcgggcaaattcccaaatgccaacacaccgattgccatcgatgagccgacacgtgcggaggtgagtcgccgggccaatggaatcgccagctacgccctcaacgaggacgacaatctgctggcattcgccattgccgcgcccagcattcacacggtggtcgttaaattcagggataacgttacgataccaccggatcaggtgcacaataaggcatatttgggttcctattggcgggagttgggtgcggcctggaacagcacggacggcacccaggagtggggcgctccatttcgcgactgcaacctgttgacgcgtcgctggctctggccatttcgcatatccttcagcgagcacaggatcaaagttgtggcggctgccttcattgccgccgacgaggatgtgtgcaacgatggcctggaggaagttttcggtcgccgtcatggttgcgatcggaatacgaccttctgcctgctcaccgagaacaaacccgccgccacccgggatgtgtacacctgtctgtgccgggaatcctactacctgcccaattccacgctccagggattccgtggcgatcgagtggaactgtccgagggctacgacaactactcgtgcattccgtgtcccggcggatgcactaactgcgatagcaacggcgtctgtctgacctttcaggaggaggaggtgctcaatgtggacgcctgtctgcgcctcctggtggccatcgtactgggcgcctgcatcctgtgctgcattgtcctcggggtgattgtcttccggcagcgaaagtgcaaggccattgcgtctggtatgtggactgtgctggagacgatactgctgggcattgttttactttatgcatctgttgccgtccatttctttcccgcatccaccgagcgctgccttctggagccctggcttcgggagctgggcttcatcacctgctacggcgccatcatactgaagttgtaccgccacctggtggactttcgcacccggaaagcgcatcgctgggtgctgcgcgacgtggacctgctcaagtatctgggcaccatggtctttgccgtcatctgctacatggccgcctttacggcctcgtcgttggatcttctcgaaagtgcgcagctggagagcctcagggaggcggacacgaacacctgccatccgctcaagtgggaactggtcacgcagaccagcgagatgctcatcctgtgctttggactgcacctgtccatcgccagtcggaatgccaacacccagttccgggaacgacaatttctggtcaccgcactgacgctggagttcctggtctcgtccagcttctactttctgcgctttgtctacctgccggaaatgagtcccagcgccatcttgctggccctgttcatccgctcccagctgacgaatagtttcgccttgggtctgatatttgtgccaaagttgtggtaccagcacaagcagggtacgtcacacgacgccggccagcggctgggcggaggatatgccgggctctgtctgggcgatccggacattggtgagctgaccatatccgaaatgagtcccgaggacatacgcgccgaactcaaaagactgtatacccaattggagataatgaagaacaagactctgcggcaggacaatccgcacatcagtaagcgacgtggcggacgcaaggcgggtcaccgtcgcttctccctgcagaaaaagggcagcaaggataaggctctaagtgccaaacaccgcagcaacaagcatcatcaggacatcgagatcaccgaggcggaaccttccaggacgcccgaggattcggtgtgcagtgccgaaggacccacggatacctatgcggaaatctccggcgtgtcccactcaatgctctctcactcgatggtctcccactccgtggtctcgcattcgaagtag

SEQ ID NO: 39366 - protein, 669 aa, DROSOPHILA
MVPSRGKWPCRMFYDYTDIAEDAARQFIEFLSGKFPNANTPIAIDEPTRAEVSRRANGIASYALNEDDNLLAFAIAAPSIHTVVVKFRDNVTIPPDQVHNKAYLGSYWRELGAAWNSTDGTQEWGAPFRDCNLLTRRWLWPFRISFSEHRIKVVAAAFIAADEDVCNDGLEEVFGRRHGCDRNTTFCLLTENKPAATRDVYTCLCRESYYLPNSTLQGFRGDRVELSEGYDNYSCIPCPGGCTNCDSNGVCLTFQEEEVLNVDACLRLLVAIVLGACILCCIVLGVIVFRQRKCKAIASGMWTVLETILLGIVLLYASVAVHFFPASTERCLLEPWLRELGFITCYGAIILKLYRHLVDFRTRKAHRWVLRDVDLLKYLGTMVFAVICYMAAFTASSLDLLESAQLESLREADTNTCHPLKWELVTQTSEMLILCFGLHLSIASRNANTQFRERQFLVTALTLEFLVSSSFYFLRFVYLPEMSPSAILLALFIRSQLTNSFALGLIFVPKLWYQHKQGTSHDAGQRLGGGYAGLCLGDPDIGELTISEMSPEDIRAELKRLYTQLEIMKNKTLRQDNPHISKRRGGRKAGHRRFSLQKKGSKDKALSAKHRSNKHHQDIEITEAEPSRTPEDSVCSAEGPTDTYAEISGVSHSMLSHSMVSHSVVSHSK

SEQ ID NO: 39367 - DNA, 3858 bp, DROSOPHILA
aactagagtcttggctggaggcgccacatatgagccgccgcctttccaaaatcgcgcgatttctgtgcagcacagcgccctcgaaagtgaaaagaacttgacgactcccacattcacttgcgtcagccatgtcgtatgcgtaatatttccacgacaatcaacaaggtgaggaggggcggacacagatttgcgcagagatttgtgtcagcaggaagcaggagatagaaaaaaaaaacatcgaaaggacgaagcacaccgaaaagtgaaggagcacattatatgggctgctatctcagcaattttattgattattcgccattgcgccgcgttggcaatttcgcaaattgtcgttaattgtctctgccttggatcgatgcgccgtatgcaggctgcactcgttctcacaaatgtccgtcaaaagttatgaaggcaaccggaaggtgaatccccccgctccaccttccaccaatccttacggcaatcctttgaatttgcgttggcatttgtgtgtgtgtgtgtgattgcctcaaaagttgaggggcaccaagttgtacgctggcttattgcttctcgcaattgcattgcttctaagtagttctcgtgaccaagtgcatagcacagctggaactttcacccaaccgtcttatgcaacaaattataaggtggcactctaacagtggcagttgcaaagttaaacaaaatgtgcacacttctcaaactgctggcactcgattgaagaacttttgtgttaatgctgcgtaaatctcaatttactttaggatagtagttattaagttgatatttacataactatggaaagttacaagtaaataatgttgagtgaagcagtagtgattaggaataagttatggaaagaagttaatacctaagagtaagctgttttatatattcctattatctggctagcaccatttcagtctatcattgcatatgtaatcattatattataatttaataataatagtataaatataacttattaacctaccggctcatctggcagcgtttcgagtacttttggctcgcacttctcctccggcttcttcccgctgcccgcatcctttgctgctgcatctgttgccgctgctgctgcagttgcaacatctagtgaagtgactcctgctgcagtggcgggcgttgtgggcgtggcgctgcgcttacgcaatcgaaaacgctccgcccgactgagagcggacacactgctggcggtgggcgttagctcgtcaaagtcaaggccattggcatcgtgcagcaagtgatacttgtgccccagggaaatgccgctgctgctgctctgcggcaggtgtgcccttttgtagtaggccaaaagagcatcgcgcctgctctcgcggccaaagggggcgtggctggggctggggctgggcgatgcggtggctgtggcaaggccgactatcaaaagcaccagcagcgagtagagggtgtttaattgtgtgctgctgctgctgctcggctccctgatgtttttactgcttttagtgctgctgctgctgctgctgctgctgctgatgatgatgttgcacctagtggattcggataatgttgcagctgctgcacttgctgctgttgcactatttgttcgttggttctgttgcttttgttggtttgtcaggtggtctcgatcgctgtggctgctgcaattgcttcgctgagtgctctgtacttgagtgtttgtttgattttggtggcatttcttttgatagtttcggcagttgctgctgctgctgcattggctgctttgcggcattgaactctgagcggtttcaatttttgactttgttgctatgcacagttccatatcactgatgttgttgctcttttgcttattcctatgctggtggcgcctccagttgttgttgccgctgttgccggtttggtggtagaaaaagttgctcgtgggtgtggcagcttcgacaggtgtaaaccgaaattgtggcacagtggcgcgctcatctgcaaaaattagaaaagttttggctattgtttagttgcggcttagtcggtgaataaatttaaagttgctgccacatagcatggctttgttatcaaatgtggcatgcacatgcagcaaaaatgaacactaaacatatgaaacaattcgaattatttggaagtactttccattacacataaacacatattaaagtcacgtattaaatcatatgttattatatattaaatccctaaatttaacaattaccagcaattacgaagtaaacacaattaaattggctacaaacgattgagcggaccgtttcgattactcactaaatgcttgtggttgaatatttttacaattatgttcaattaattttaacaaatgcatgctgatcaattaaaaaaagcccacaagaaatcagaatccgaacgtcaaattcaaaatccacaacgcccacgtcaatgaaaatttatatagctgcgccaattgcaatttaattgagaatccagcacaaataattgctgatgacgtccgctaaatgtgcaaaaccaaagtgcatgaaaatcaaatggagcatgatagactttggaagtactctgtactgaatatacaaattttcaatgtgactttcaattacatataaacagaatgacataaaagaccacaaaagtttgttctagttcttttttgaagaataaatctgaataacaaccatagtttgtggatgcatcttcctcagccggatgaagctgcaattaaatcgcatcaaattgctcggttcagacaaacttgtgcgcaatttggagccacattccggcactcccatgcccatgcccacacccaatcccacagccatggagccatggagccatggagccatgaaacccctgaaagcagtgctaaaaagaatttgcttggccagttacgagctcccgtgggagtgggcgtggcacttgctgcactcaagtgtcgcccagcggtatgccataattttccactttttttcttcttctttttgttgcacattcacattccccattgttgctgcacttggcaatttgcaatttgcaattctgatttatgaatttgcacagggcgtgaaggtggcacaagcaatgggcagggtattatatggtgcggcattagcacatcaatgcgatgacaggccgcaaattggcccaacgatttggacggcttctacacagtagcagcagttttgctggaaggcaaacaggtgtaaaaacaatttccgctaattgaaattaattttcatggctgcaactgcacggcggtatgtgtggtatgtctctttttcggagggtcagggcccacggatttgtaaaaagggatggggggaagggggtgtaggcgaaggtgaaagtcgggaatagttggcacatgcgccataaacaagttgtgattacgtgatttggccagatgccagcagcccaaggggcaaaaaacagtcgcccatgtccatttaaggtgggactcccaaattttgcatttcctgaatcctgcgaattcctcaaaatgtagtacatccctcagctatttgtagttcataatgcataatcagtataaatctagtatgaagcatccttaagctgcatgctttggttagataaatgaagtcttaacgctaaaccattggcaaaaacagcacgttgagcgtacattttttcttgcagtgtgcgtgaccactacactcgtgtgttgccaagtttcttttaccactttggcctgtttttgctgcctgttttccgcctggctgctttcacctggcctcaccttgacactcgctcaactgcagctaatgcggtaaggatgcgagaaagccaacccactgcctgtatctgtatctgtatctctaactgtat

SEQ ID NO: 39368 - DNA, 1083 bp, DROSOPHILA
atggctccatggctccatggctccatggctgtgggattgggtgtgggcatgggcatgggagtgccggaatgtggctccaaattgcgcacaaatgagcgcgccactgtgccacaatttcggtttacacctgtcgaagctgccacacccacgagcaactttttctaccaccaaaccggcaacagcggcaacaacaactggaggcgccaccagcataggaataagcaaaagagcaacaacatcagtgatatggaactgtgcatagcaacaaagtcaaaaattgaaaccgctcagagttcaatgccgcaaagcagccaatgcagcagcagcagcaactgccgaaactatcaaaagaaatgccaccaaaatcaaacaaacactcaagtacagagcactcagcgaagcaattgcagcagccacagcgatcgagaccacctgacaaaccaacaaaagcaacagaaccaacgaacaaatagtgcaacagcagcaagtgcagcagctgcaacattatccgaatccactaggtgcaacatcatcatcagcagcagcagcagcagcagcagcagcactaaaagcagtaaaaacatcagggagccgagcagcagcagcagcacacaattaaacaccctctactcgctgctggtgcttttgatagtcggccttgccacagccaccgcatcgcccagccccagccccagccacgccccctttggccgcgagagcaggcgcgatgctcttttggcctactacaaaagggcacacctgccgcagagcagcagcagcggcatttccctggggcacaagtatcacttgctgcacgatgccaatggccttgactttgacgagctaacgcccaccgccagcagtgtgtccgctctcagtcgggcggagcgttttcgattgcgtaagcgcagcgccacgcccacaacgcccgccactgcagcaggagtcacttcactagatgttgcaactgcagcagcagcggcaacagatgcagcagcaaaggatgcgggcagcgggaagaagccggaggagaagtgcgagccaaaagtactcgaaacgctgccagatgagccggtaggttaa

SEQ ID NO: 39369 - protein, 360 aa, DROSOPHILA
MAPWLHGSMAVGLGVGMGMGVPECGSKLRTNERATVPQFRFTPVEAATPTSNFFYHQTGNSGNNNWRRHQHRNKQKSNNISDMELCIATKSKIETAQSSMPQSSQCSSSSNCRNYQKKCHQNQTNTQVQSTQRSNCSSHSDRDHLTNQQKQQNQRTNSATAASAAAATLSESTRCNIIISSSSSSSSSTKSSKNIREPSSSSSTQLNTLYSLLVLLIVGLATATASPSPSPSHAPFGRESRRDALLAYYKRAHLPQSSSSGISLGHKYHLLHDANGLDFDELTPTASSVSALSRAERFRLRKRSATPTTPATAAGVTSLDVATAAAAATDAAAKDAGSGKKPEEKCEPKVLETLPDEPVG

SEQ ID NO: 39370 - DNA, 3977 bp, DROSOPHILA
tgtgtctgtgtgtgtctgtatgggtatgggtgtatgggtgtttgtgtggggaaaggtgaaactttggaactccttgttgttgctgctgctcctggcgccgccgattgttaattcaggactacgaatttggctcgaaagacgaacggcaaattaacgaggattcgaaaacgaaagaaatacgaaacggggaatgcacgagaaatgcgtataaaaatattcattttgctcataaattaaacgatttgcacgatgaaagcgggtagaccaacacgcgcgcaaaactaacggagcggcgtctcacacacacaaacacacacagacacacacatacacacacacacacatgcactctggcatatatcctggcaggatttcgtcctggcccatgtttgtatgtgtattaatgccgccgcagagctaagcgcgcaaaaaccgacagatacacgagcatttaacacccaaaaaatgcgtggcgcatgttgaaaagctgctccgtttcgagcaacttaaataggtggaaacaaaaaacgccgcgtttgcatcgtaattttccattttatgctgggcattttctatctagcaccacgcaattttccacatttttcacatactcatcggttttagcaattattttgtaattcttttcggtcaggcactggttcaactttggatttccggtggcagcgcccacaatcgaagcgtgtgcgttcgcgtttgtgtcctgtactcaattgtgttctccgagcggtcggccagcaccagtcacatcgtaatccttgcgattgggtcgccgatgcgagtgcgcgcgttaagttgttgattccgcaaaagctctctctgcgattcctttcgctctcgaaagtccatccccgaagataaccggtttggtttgagtccgaacttaaaggatatgctgcgctagcggtgactcgaacctttcgacagaactcagttttctatagatccactaagagataaactatctataaagttttagaatttacttaaagttttaaattacaaatgtacatgcgtgattctggtatactaggttcagttaaacaaacgccgtcacaactgcagcacaacaactttgtcctggttcgattggcagaggagcaataaaaaaatagtcatatatctcacaatgccctagcgaagcgcgctaaagcttagaatgtggcatggtttcgtataaagtacacgtcgtactccttctcgatccacttgatcagcttgtccacgtacttgatcacagtggctttgtccacaaccggctcgaatatggcgtacagttcgtaggttccggttgcccaggccaggaccacctcgcgctccttcatctcgtagataagcttcagcgggcgactactgttgtggatgcgatgcagcaagtcgcagtagatggcctccaggcgctccagctccgtcagagatttgtacggatgcctgagcatgggacacagcagttgagctgtgctcttgggcttgtaaagaaagtgccgcagctcggggattcccacaacctgttggtagagtttcgcattgaacggctgctgcagctcctcgttgatggcttccaagcagtggcttttgcgtagcttctccgtgatctttgccttggcctctgccagcgtgaaaaaggcatctctgtccacggacagcaggagcaaacaggcctggcaatcatccgccaggtacgagacatgcgcatgcagatacccattcatgtcgaacttgggcaggcaaattggtgaccagttctcggagctcttgaaggactcggagcactctaccaggttgaagatcagacgcaaatcagccggatggatggagtacttcttcatgcgcaccaatgctatcagtttgttattggcaattagcacggcaaacaccaggttcttgatcttggagcagttgctctgaatggcgctggtgatttgcgatcgtatcgttgtgggcaatgggaagacgcgaattgagttggtcaaaaatgtgaagatgttgttggacactaaaagaagtcgttgagaaattaagcaatttggatatgcttagatatccttacccttggcactactactgtcgttcgccaacagattgtagaacaatcgttcgctgccggagagcagtctcctcagatcaaagttcttgcgcctctcaaagattttcgtcatgtgtgaatacgtcagaatggacaatatttgattgtagacatccctggtaaagaatgggaagttcccattagttagcattgctatcaggtgcgttataattgactcaccccagttgaagctgcagctgctgcacactcatgttgctcctgctggcagccaccaggatgagcgagctgcgttgcatgaaagcgaacttaatgccgcccgcatgaatggaggtaatagcatcctggcccatttggacgaagcttaccagtgcctgaatgacaccgaaaagcgtggccagtttatcctcattgccgtgtagcgagaagattggctttcccgcctcgcttagtatgaagatgtgtttcttttggccctgccacagactgtcgtgctggtaatcgtattcctcctccagtcccccgccaatggagtcctctgttttggcgctggtcgaggtgctcaatgccagagactccacagaggcagccagtcccttgttctcctgccccggctccggactgagggcactgttatctcgcatggtgcccaggccatctcttagctcagagataatactatggttttgttgctcggcctcctggtcgggatccgcctcttgatagagatttggggactccggatcgccctctgcgtctagatactcgcaggtggagttcgtgtccgacctgactgacgtctgctctacttccatttcgaattcgtttaactatttcagtcgctggaacattgcagtttgccaatatttagcaatatcataaatttacaactaaatcattacagctggaatggatttcccaacactgtccgaagcagaaggtgaaataaagggtgttccggaaaacacaccataagataggcttattcattcttaaatgttatgaaaaataagttaatttgatatatggattttgaattactttatcttaataattataattaaatttttatatctgttattttgtttttgttttaagacctcttatagaaacacttctatccaacactacccaccagctgtttaccaaaatcgacggaaaagaagaagaacataggttatgaaaacacgagccgctccaaaatgttgagaaaatcgtttgccaaccgtaagtaatcaattaaaacatcaaggaaaccaaattatacatgctttcccttggtagtaccccgctttggtcagatgtgcggtctgccacgacgcctgcagagcacacagccggagcaatcggtggaaacggaaccggaggacatcgccctggtggaacagcggattctgaagcatccggactacttccaagtgcacaacctgttcaccgtgcgcgacctcttcaatgcccgagtgcactatggccacaaggagggctccctggacgaccgaatgcgtccgtacttgttcggcagtcgattaggtcatctgatcttcgatctggacaagacggcatcacatctgcgcgatgccctcaactttgccgcacacattgccttccgagatggcatcattctgttcttcaaccgcaacgccatgaactcacatctcgtggagcgaaaggcccaggaggccggtgaattctcgcacactcgcttttggcgcggcggcatctttaccaatgccaatgtgcaattcgatgcggtcaccaggctgcccgatctttgcattttcctcaacactcaaaacaacgttatggctcagcacacggcggttcgggacgccgccaaaatggccataccaacgattggcatagtggacagcaattgcaatcccaacctgatcacctatccggtgcccggcaacga

SEQ ID NO: 39371 - DNA, 1859 bp, DROSOPHILA
atccattccagctgtaatgatttagttgtaaatttatgatattgctaaatattggcaaactgcaatgttccagcgactgaaatagttaaacgaattcgaaatggaagtagagcagacgtcagtcaggtcggacacgaactccacctgcgagtatctagacgcagagggcgatccggagtccccaaatctctatcaagaggcggatcccgaccaggaggccgagcaacaaaaccatagtattatctctgagctaagagatggcctgggcaccatgcgagataacagtgccctcagtccggagccggggcaggagaacaagggactggctgcctctgtggagtctctggcattgagcacctcgaccagcgccaaaacagaggactccattggcgggggactggaggaggaatacgattaccagcacgacagtctgtggcagggccaaaagaaacacatcttcatactaagcgaggcgggaaagccaatcttctcgctacacggcaatgaggataaactggccacgcttttcggtgtcattcaggcactggtaagcttcgtccaaatgggccaggatgctattacctccattcatgcgggcggcattaagttcgctttcatgcaacgcagctcgctcatcctggtggctgccagcaggagcaacatgagtgtgcagcagctgcagcttcaactgggggatgtctacaatcaaatattgtccattctgacgtattcacacatgacgaaaatctttgagaggcgcaagaactttgatctgaggagactgctctccggcagcgaacgattgttctacaatctgttggcgaacgacagtagtagtgccaaggtgtccaacaacatcttcacatttttgaccaactcaattcgcgtcttcccattgcccacaacgatacgatcgcaaatcaccagcgccattcagagcaactgctccaagatcaagaacctggtgtttgccgtgctaattgccaataacaaactgatagcattggtgcgcatgaagaagtactccatccatccggctgatttgcgtctgatcttcaacctggtagagtgctccgagtccttcaagagctccgagaactggtcaccaatttgcctgcccaagttcgacatgaatgggtatctgcatgcgcatgtctcgtacctggcggatgattgccaggcctgtttgctcctgctgtccgtggacagagatgcctttttcacgctggcagaggccaaggcaaagatcacggagaagctacgcaaaagccactgcttggaagccatcaacgaggagctgcagcagccgttcaatgcgaaactctaccaacaggttgtgggaatccccgagctgcggcactttctttacaagcccaagagcacagctcaactgctgtgtcccatgctcaggcatccgtacaaatctctgacggagctggagcgcctggaggccatctactgcgacttgctgcatcgcatccacaacagtagtcgcccgctgaagcttatctacgagatgaaggagcgcgaggtggtcctggcctgggcaaccggaacctacgaactgtacgccatattcgagccggttgtggacaaagccactgtgatcaagtacgtggacaagctgatcaagtggatcgagaaggagtacgacgtgtactttatacgaaaccatgccacattctaagctttagcgcgcttcgctagggcattgtgagatatatgactatttttttattgctcctctgccaatcgaaccaggacaaagttgttgtgctgcagttgtgacggcgtttgtttaactgaacctagtataccagaatcacgcatgtacatttgtaatttaaaactttaagtaa

SEQ ID NO: 39372 - protein, 528 aa, DROSOPHILA
MEVEQTSVRSDTNSTCEYLDAEGDPESPNLYQEADPDQEAEQQNHSIISELRDGLGTMRDNSALSPEPGQENKGLAASVESLALSTSTSAKTEDSIGGGLEEEYDYQHDSLWQGQKKHIFILSEAGKPIFSLHGNEDKLATLFGVIQALVSFVQMGQDAITSIHAGGIKFAFMQRSSLILVAASRSNMSVQQLQLQLGDVYNQILSILTYSHMTKIFERRKNFDLRRLLSGSERLFYNLLANDSSSAKVSNNIFTFLTNSIRVFPLPTTIRSQITSAIQSNCSKIKNLVFAVLIANNKLIALVRMKKYSIHPADLRLIFNLVECSESFKSSENWSPICLPKFDMNGYLHAHVSYLADDCQACLLLLSVDRDAFFTLAEAKAKITEKLRKSHCLEAINEELQQPFNAKLYQQVVGIPELRHFLYKPKSTAQLLCPMLRHPYKSLTELERLEAIYCDLLHRIHNSSRPLKLIYEMKEREVVLAWATGTYELYAIFEPVVDKATVIKYVDKLIKWIEKEYDVYFIRNHATF

SEQ ID NO: 39373 - DNA, 3576 bp, DROSOPHILA
aaaacatcaaggaaaccaaattatacatgctttcccttggtagtaccccgctttggtcagatgtgcggtctgccacgacgcctgcagagcacacagccggagcaatcggtggaaacggaaccggaggacatcgccctggtggaacagcggattctgaagcatccggactacttccaagtgcacaacctgttcaccgtgcgcgacctcttcaatgcccgagtgcactatggccacaaggagggctccctggacgaccgaatgcgtccgtacttgttcggcagtcgattaggtcatctgatcttcgatctggacaagacggcatcacatctgcgcgatgccctcaactttgccgcacacattgccttccgagatggcatcattctgttcttcaaccgcaacgccatgaactcacatctcgtggagcgaaaggcccaggaggccggtgaattctcgcacactcgcttttggcgcggcggcatctttaccaatgccaatgtgcaattcgatgcggtcaccaggctgcccgatctttgcattttcctcaacactcaaaacaacgttatggctcagcacacggcggttcgggacgccgccaaaatggccataccaacgattggcatagtggacagcaattgcaatcccaacctgatcacctatccggtgcccggcaacgatgactcgccggccgcagtggagctctattgcaacctcttcaaggaagccatactgcgtggcaagcgggaacgacgccaactccttggccttccgcctctggacgaatcccagccgcggcgcagtcgcaaaactaagtaatagccaagtagtagtgtcaagttgattttgttacatttatcttaatacaaatgccaatggccgtcaatccacgatgaagaagaaattgctaaatatggttgcaaaattgcagaactttgtgcatgtgccatgctatttgatagtgtttaagaaaacccacgacctgggttagtttcggatagctattctagggcggcagcagagtggcacccttgacaaagttgttgctgtagtggctgaaatacgagggattggagttggaccccgtgttgttggaacttccagagggccagtagttggtaatctgtggtggggtgtcaggtggcggcggaggcggcgctgaggtaccaatgatggagagatccgtaccgcctttgatggcacggccgggaccgaagaacgtatccatttgctgcttcttgaaatcatgcatcgacgcaaaaccattcggcggcctctccttggacatgtcccacgagccgatgctggatgacttgcgcacgaacacttggcccttttcattcttgtcctgctccacccagcgctctgcatgcttcaccgtcagcatcgccttgtgcgcaactatatactcctcggccttctgtagtcgttccagttgctgctcgtccagctggtcgcgcggcagcttccccaaacgctgcaccgttcgcttccagttgtggaactcacggtttttaaagggcttcatggccatacggtactccttccactggcgctggcgctcctccttcgtaccaggcggtgcatcctcgagcggcggtggtgcctctggcttctgtatccattggccattgacctggacaaatgtgccgcagcgcttgggcttcttggagggctgcgcttccccgtttgacggcgaattgttgccattgcttggcggtgggggcggaggcataagcctcgtatctttgtcactgttgccgcgatggtttaccttgaatttcttgttattctggtttggattgctgcgattgttttgtgctccctgctccttgggtaccagattccacaagctggggcacttgggcatgggcggttggattggtggtggtctatgttgtggcgacatcatgtcctcccagaacggaggcggctgcagaggtcggtgattgtgattccggcggggcccagaaccacgtggtcctccaaagcccactggaccaccggggcccatactgctcatgggaccacagggacccatattgcttatgggaccgcgaggtcctcctggtcccattggccccatggggggaccgcattgtccgggtccaggcccaaaattgcctccaaagcccatgttcatcagctgcataggaagtggaggcggtcgattcatcggaggatagttcctgtcctggtagctttgcggacctccgcctccatgaaaggcattgttgctattcgaagaccaatgtttacgtccgttgccgttgttgttattgttgttgttgttactattgttattgttgctccgttgtagtccgcttttggtatccggtttcagtgcatccttgcatttcttccaatctgcaaacgacattttcagcggcttagtttcaggctcatctttgccggactccggaacgacttccttggaatcctctggtgccgcctccacgtccccgttttcagacatctcgcaccttagagagtgggaatacactttataaatatatcaacttaattttatttgagttttgcttagcgatggcaaacaaaaatttcaataacaacaaattgaaggaacagccgatgttttctatcgatattttcgtgcttaaaattttagggagtttcccctgaagtattttcttaagagtcctgttgttcttaaaaaagaacagtagtttccaaatgtattctctaaactttccgctataccagtaaatcttcatttgttaactagtaagcgatatattaatgcccaacgtaatataatatatatttaacattttcgatcccatgcagacacaaccggcggggaatagtaattgcccagcgtccagataccatagtgaattgttggttatcagcgataagtgtctgatttcgtaacatttatttcatatttaaatttaaattttaatacgaacacatctgtgatgcgaaattgatgtgagctttttgactgcgctttacgtgaactggtctggatagctgtggcgcatctctaaaatctaacgtgttcgatcaggtggcaacacccaccgtaaaaaacgattttagtcgcagtcgcagagattttggttttggtaagctctagtaatttattggaaattacgatccaaaatacaccgttttaagagacgtttcaatcggccattaaagtaaataataagcgcgacgaagactaaacatcaaaagtgttgaaactagaacgagagtgcaaagtcggtcgccagcaaaacgcgtagtttgcttattttaacgaaaagcggccagtgccattaaaatattactcaatttcacagagaattttggccgaaaacggatgcaatatatggatatatagaccctgtttcctgaaagttaacttcctttttgttctacgcccaacacggtcgtcaactgcgctgccatcgtcgacgtcggcagaggccattcttgttgttgctattctcgacatatgattcaatagagcgatcgcctctctctttctccctcccacggacaatttcagttttttgtaatatttctgttagctgtgttttagttgcccatgtttgtttgttcttgttgttg

SEQ ID NO: 39374 - DNA, 1576 bp, DROSOPHILA
ttcaatttgttgttattgaaatttttgtttgccatcgctaagcaaaactcaaataaaattaagttgatatatttataaagtgtattcccactctctaaggtgcgagatgtctgaaaacggggacgtggaggcggcaccagaggattccaaggaagtcgttccggagtccggcaaagatgagcctgaaactaagccgctgaaaatgtcgtttgcagattggaagaaatgcaaggatgcactgaaaccggataccaaaagcggactacaacggagcaacaataacaatagtaacaacaacaacaataacaacaacggcaacggacgtaaacattggtcttcgaatagcaacaatgcctttcatggaggcggaggtccgcaaagctaccaggacaggaactatcctccgatgaatcgaccgcctccacttcctatgcagctgatgaacatgggctttggaggcaattttgggcctggacccggacaatgcggtccccccatggggccaatgggaccaggaggacctcgcggtcccataagcaatatgggtccctgtggtcccatgagcagtatgggccccggtggtccagtgggctttggaggaccacgtggttctgggccccgccggaatcacaatcaccgacctctgcagccgcctccgttctgggaggacatgatgtcgccacaacatagaccaccaccaatccaaccgcccatgcccaagtgccccagcttgtggaatctggtacccaaggagcagggagcacaaaacaatcgcagcaatccaaaccagaataacaagaaattcaaggtaaaccatcgcggcaacagtgacaaagatacgaggcttatgcctccgcccccaccgccaagcaatggcaacaattcgccgtcaaacggggaagcgcagccctccaagaagcccaagcgctgcggcacatttgtccaggtcaatggccaatggatacagaagccagaggcaccaccgccgctcgaggatgcaccgcctggtacgaaggaggagcgccagcgccagtggaaggagtaccgtatggccatgaagccctttaaaaaccgtgagttccacaactggaagcgaacggtgcagcgtttggggaagctgccgcgcgaccagctggacgagcagcaactggaacgactacagaaggccgaggagtatatagttgcgcacaaggcgatgctgacggtgaagcatgcagagcgctgggtggagcaggacaagaatgaaaagggccaagtgttcgtgcgcaagtcatccagcatcggctcgtgggacatgtccaaggagaggccgccgaatggttttgcgtcgatgcatgatttcaagaagcagcaaatggatacgttcttcggtcccggccgtgccatcaaaggcggtacggatctctccatcattggtacctcagcgccgcctccgccgccacctgacaccccaccacagattaccaactactggccctctggaagttccaacaacacggggtccaactccaatccctcgtatttcagccactacagcaacaactttgtcaagggtgccactctgctgccgccctag

SEQ ID NO: 39375 - protein, 489 aa, DROSOPHILA
MSENGDVEAAPEDSKEVVPESGKDEPETKPLKMSFADWKKCKDALKPDTKSGLQRSNNNNSNNNNNNNNGNGRKHWSSNSNNAFHGGGGPQSYQDRNYPPMNRPPPLPMQLMNMGFGGNFGPGPGQCGPPMGPMGPGGPRGPISNMGPCGPMSSMGPGGPVGFGGPRGSGPRRNHNHRPLQPPPFWEDMMSPQHRPPPIQPPMPKCPSLWNLVPKEQGAQNNRSNPNQNNKKFKVNHRGNSDKDTRLMPPPPPPSNGNNSPSNGEAQPSKKPKRCGTFVQVNGQWIQKPEAPPPLEDAPPGTKEERQRQWKEYRMAMKPFKNREFHNWKRTVQRLGKLPRDQLDEQQLERLQKAEEYIVAHKAMLTVKHAERWVEQDKNEKGQVFVRKSSSIGSWDMSKERPPNGFASMHDFKKQQMDTFFGPGRAIKGGTDLSIIGTSAPPPPPPDTPPQITNYWPSGSSNNTGSNSNPSYFSHYSNNFVKGATLLPP

SEQ ID NO: 39376 - DNA, 2882 bp, DROSOPHILA
gtttaataaaatttcgtaatagtaaaatatatatttattttgtatttttgtttggttttcgcttcgtttcgtattcccttcatggggttttgggtttatatgtatatatataaatttgaaaaaagcctataaatccaaatatgtttggttggtacgcgaccatttaaaatcaaagcacttcgtttgggtcatcgaaagtattcaatatagtttgaaaaatatatatatgtagtattctgaaacggcttctttaaatagaggaaattgtgcatagctctgttccatggcccaagcgagagattttcgtgtgtttttcggttttcggttgtttcgagattattcgagattatcctgttcagagattttgcgtggcgagccagtagagagaagtagttggtgtatgttgcttgtttagttcgtttaacaatttgatatatagagttaatatatataatagttttaataaattgatgcgctccttgatttgcatttgcattgagccaccccactcggcttttgttctctgctcgttcttggagctcacttttgtaaaagcatttttagcaaaaaattaaaaatgttctctctttgtcctcgattccccatttaaaatgtctgacttcagcgcctcacttgatcgtttaaattcccctggttaaggtttagttcttgtcaccgaatcctaatcaatacccatataaaataaatcccttgattattctggccgaaatatccgcattcaccaatcgacgccgccgcttttttctgtttgaggaagcttcatataccatctataaatatactcgtacaatttcttggttttctcgttaatataattgtttaaaaaatcaacgccacctgatgtgtgccatgtcctgtctgtcctaaagagtcctaatgggtgcttacagctttaagcataagttctgcgtgggcgtagcgctccgatcgatctctaatctcattcaactcgcatctcgtatccctaacccaacctggcctacttgtcctccccgatgccctcgtcggtcgtggtcttgcgctccctcgcctcgtcgccgctgatatcacatttttcagccaacatatcctcgatgccctcgtccaccgtctggctctcgccgggcacatgcttgcgccgcaacttggtcaccaccacgcagtcgccctgcggcagcggcggaaactttccgtaggacgtgttgctaatggtgcccacggtgctgtcctcgtagcagtccggtgtcatccgcactcggcacgtctcgaatgccttctcgtagcccagcttcgtgtacagactgcgggacgcatcgttaccaggacgtatcaccacgaagggcgtgtagccgcgctcgatcaccagttgggtcagcgacttggccagacggattccatagctgtgcgaaaataaatgcattgtttgatcagtaaatgagcagtttacagaaggaatctgtagctctactcaccccatgcgcctgaagtctggacgtgtttgcattgagaacatggcaccgtagtatgaatggaccatccaggcggctagctctccggtttccttgcgaaagatgcccaggccgggtagcttgcgcacgaggatgtcaaacagctggacgcactcgatttcattggcaggatatagatcatgtatgccctgcacgttatccagattgagcagacgcatctcggcgtcctccggcagcggctccagttccaggtcggcgttcagcttgttgcacacgtagatatcaccactgagtcgttccatcacaccgaacttcgagtagaagtcatccaggcgattcataatggcgatgtgcgtaaagttcaggtacataggcttctgccaatctataagtacatcttcggtgcgcagcatatcgacatgctcgatgtgtgcggatggacaaaatatgcctagcgtttggtatatattgttgtgcggctaaaagatatagtttattagttaaactaggtcttagggatgaccaaaggatcaaactcaccgcaagcgtgcatcctgggaaatggagaattatcggtttgtcgggccaatctttagcaacatagaacttaaaatcccaaatacgatcattcaggtacgtttttatggtttgatgaaactgcaaatatcaaaaaaatcaagttttattaaaatatattttatttataaacttcatttcattcatcaaatatgagtgatgaaagtcttcatcatatatttacaggaaggatctgacgaacttacagtgcgaaatggttcgtgctttttattaataacttgagagcgcaattaatgaaatgaaattaccctagtttactactttaagcactccccatattttgcaattacaaaagcaatttcccagtcttgggcatcgcattcccttagctggttgctaaccgccccggcaaaaagttgcctcgctgaaaatcgaaacttaaggcaactccggcggtggccaaatccttgagtccttttgccaaaccatagatatagccagcaaaagtacaaaagcacgtgatgttcggggtggaatggcattaaaaattgaacaaaaatacgagtgtaaacagtgaaaacaggtcaacaaacacaaaaaaaaaaaaaaaatgcgagaccagttttgagggtttgggattgcatgactagtggtctcggtaacgccttctgactacaggaaagcccccccccctccatttgctccttcaactgcaggtaattgttggtaaattatctgaaaattgggcgtggcacctggggaatatatatcttggtgtcaagtcgggcgggcatgcaaaagtttgagggtgccaagttatggatgcaaaagagtgatgacatttacgatacgcacctttaacgattccggcagata

SEQ ID NO: 39377 - DNA, 810 bp, DROSOPHILA
atgctgcgcaccgaagatgtacttatagattggcagaagcctatgtacctgaactttacgcacatcgccattatgaatcgcctggatgacttctactcgaagttcggtgtgatggaacgactcagtggtgatatctacgtgtgcaacaagctgaacgccgacctggaactggagccgctgccggaggacgccgagatgcgtctgctcaatctggataacgtgcagggcatacatgatctatatcctgccaatgaaatcgagtgcgtccagctgtttgacatcctcgtgcgcaagctacccggcctgggcatctttcgcaaggaaaccggagagctagccgcctggatggtccattcatactacggtgccatgttctcaatgcaaacacgtccagacttcaggcgcatgggctatggaatccgtctggccaagtcgctgacccaactggtgatcgagcgcggctacacgcccttcgtggtgatacgtcctggtaacgatgcgtcccgcagtctgtacacgaagctgggctacgagaaggcattcgagacgtgccgagtgcggatgacaccggactgctacgaggacagcaccgtgggcaccattagcaacacgtcctacggaaagtttccgccgctgccgcagggcgactgcgtggtggtgaccaagttgcggcgcaagcatgtgcccggcgagagccagacggtggacgagggcatcgaggatatgttggctgaaaaatgtgatatcagcggcgacgaggcgagggagcgcaagaccacgaccgacgagggcatcggggaggacaagtag

SEQ ID NO: 39378 - protein, 269 aa, DROSOPHILA
MLRTEDVLIDWQKPMYLNFTHIAIMNRLDDFYSKFGVMERLSGDIYVCNKLNADLELEPLPEDAEMRLLNLDNVQGIHDLYPANEIECVQLFDILVRKLPGLGIFRKETGELAAWMVHSYYGAMFSMQTRPDFRRMGYGIRLAKSLTQLVIERGYTPFVVIRPGNDASRSLYTKLGYEKAFETCRVRMTPDCYEDSTVGTISNTSYGKFPPLPQGDCVVVTKLRRKHVPGESQTVDEGIEDMLAEKCDISGDEARERKTTTDEGIGEDK

SEQ ID NO: 39379 - DNA, 4867 bp, DROSOPHILA
tgcccgtcagcaaggcgtcggccatccagagagcaggacgagcgggtcgtatgcgtcccggcaaggtctatcgtttgtacactaaatcagactatgaagcactagctcctcggcagccacccgaaatgcgacgcagcgaattgagcggcgctatcttgcagttaaaggcgctgggcatcgggaacatattgcgctttgatttcccatcgccaccaccggcacagaatctactttccgcactggagagtctatttgccttggacgccatcgatgagcagggcaatctgacgaagcccgtgggttacctgttggccgaactccccttcagcgctatgctctccaaaatgctctatgtttccggtcagatgggctgctccgaggagatcataaccatcattgcgttgctgcaggtgcagtctatattttcgcgcccagcttcagcggttgcccaacaaagtggacgcattgcacatcgaaaattcgaagttgcggaaggggactttattacgatgttgaacgcttacactggcttcgtggaggagggcatgaccaaggagttctgtggccaatacttcctcatctacaggaatcttaagagggcccactcgctgagggagcaactcatcacagtggccagaaagaagtacggcattccaatcttctcgtgcaagggcgatgtggaaaagttgtgcaagtgcatcaccgccggcttcttcacacaggtggcctatctgcatcactctggagtttatagacaaatcagcagcggcactgaactggccattcatccgaactccactctctacacacttcctcaagctcagtacgtggtctatggggaactgctccaaacgacgaaattgttcatgaactacgtgaccgtaatcaagagagagtggctgacggagctggcgccgcattattaccaacagaccacagtgcgggattagcaggaactaaagccttaatgataggtgtaagtctattaaaatagttcattaaatcaaataactaagtttattgtaaaattataggtgaaacgatgccgcctcttgaaaaagaacttaagcttaggtaatggattccatatgatgattcctattgtgtgtttaaccagcggcgacgcgccctcgtccctgaaacatcatcatagactcgggtccacggatgacacgcgacatcagctcccagcacattttggcgggcaaaagactgagaaaaccagcattaattacattgtatataactatgttaaatagactacttaccatttgagaggagtgagcaggcgaatagagttgggcagcacgcaccacacctcgttgcagcgcacggcgttctcgatgcgatccgccacatactgcggctccagcatgggcatcatccgcggccgaacacccgaaaacatgcccgtgttgatgtagtacgggcagatcaaactcatttggatttgatcatagccatgggccttcagatcggtgagcaaactctcgtggaaaccgatgcaggcgtatttggtggccgcgtagtcactgcatccgtaggtgcccagcattccagttaccgagcccacagtaacgatatgaccacgattattgcgcatcatgtgaggcagaaacgctttcacggtccagtagtgcgatatgatgttaatgttgtacgtgttctggatgacccgatcgtgcagctcccagaagggtttgcagcacacgataccggcattgttaatcaatatgtcgacgggaccaacctcctcggtcacctggctggcacgctggtagatctgctcccgatctgagatgtccacaacgtagcccttgcagttgtcataaccatgtttggccaacaaatccacagttgtctttatggctgtgcggaaaattatgatcaaatattgtttagctaatcaaattgtaaatgtaacagctttcactagccgtcgggttttttgacccgcctggcagaagctgtgacggcgtcattagcaactaggtgtgattttaccttcttgatttatatcccagatgacaatgcgggcctgaaggcgagcaaagtttagggcaatcaaacgtccaacaccaccgcctcctcctgtgatgagcaccacctggccggagatgtcctgttatggataataatgaacaagcaatcgtttattataatattgaatttcgcatacatacatatgtaagcaaacctatttagcatacgaaaaaggtgcgacagactggtaatagtgcatgtggaatgacttttgcataatttaagcttaagtttgttactttggccaacgaatgtcttgccacatatgcttgaatcataatataaaacagatgttgcaagactgtcaccagcttttacaacaaagttcaatcaatttgagctgggttcaatcccctacagcagggcatatcggtttccatcgctgaaatgcagcaaaggaagctattttctgctgtctgctagtcagatctcaactttttcttttgaattgctggtaatttatatgtacttctctatgcaatttatttttgtttttttttttggtgtgcgtagagcgtgcattttgcaacaacagcagtgactagggaaaaggcaatgttttgaatgaggaaaaacttgttgtcatactaagttggttactgctcatgggactcatcggactgtcaagtcacggatatttttggccacaatccgaagatgcgtttaacttggacaaacataaatagccaaaatgtaaatggctcaaattcaatgtcagccatggactttgggtaattgaagacaaagctccattaaggcaaatatttaaacaaaatagtttaactttgcagaagccaataaatatttaaagtagaagagggttcattcatgaatagctagcaaagcgtgtgaacaaaattgtttgccatccaagcgtatcaaaacaaagaaaggggtttgttcaaacgctttttacgacaattttataaggcttgcaagcggagtaagtaaattggaaagttttcagacttcgtacaaaatatttgaattaaaatataagtttttcaagctgagagtattgtatattcggctgcttcgaaaatagcaaatagcgatttgttttcattaccgccaaactgcgcgtggctcattaagatttgtgaaatggccaaaactgacggtttgcaaaataaagcaaaaaaaaaaacaaaagacttggctttaaggtagctctacctatgattgatttcgagtggcgcactggaagctgctttaaaaaattataggtatattttttgtgggtgttcatggacatggtgttgtgtaatccgctggactcaatcgggcaaagaaagtctatcaaattaaaaactaatatatatgcacatttccgttgtacctttaactttcgaaagcgctgcggcaacagactgtagtaaatcgattcgagtacgtagtacaccgatttaatcgtaaacactagcaagtcgagtaagaattgatagatggctctgagcggttgatccatgtgcagaagacccggtgaggcggtcatgatgatgactattttggcttatatcgcgcccttggcaattcaattcgtcgtgggacacacgtgtgcgctgcggtttcaaatggggttcggttcgaaaatttaatttttaaaattcactgcgcatgcgcggcttgaatggctgattagggctgtggcacaccacacaaatggcactgggcctgcgcaatttgttcacttttaatcgcgccgctcgaatgcaaatgaaattcgctggaatttctccgtcttcctatatgttcgtttcttctcggatttcgactcgcactcagtgcgatcctaagcactcacgtccgtctggcctgaactcacaatccccactggtgatctgctgctgttggtctggcgaaaagccgaaaacctcgagcccaagccaacgctttttctattttgttgcctttttccattgtgcgacgagattcacacattcacacaatcgcagtagaaatgctcggccagcataaacatcagccgaattgagcactttcttaacgtggcttttgctctttctagccaaacacaaacagctgctgcttgctgtttgtggcccactcgacctgtttcctcgctcattttattgtcttagtcggccagcatttgattacgtctcatttgatgttgattccgcttctatttccatgctacagtgcctatttaaatcgggccaataccaaataccaactggaccagtcttgaagatacttagttttcaagaattttgttagaagcttaaagcaatatacctaatcaagttggtcctcttgcctgcgcaatttgatctgtttcagatcgaatattagaacattgtttatatgtagcgtttttctgtgaataataaaatctaaacatttcccgaaaatatacagtggctgcatggaaatcatattcgatcaacaccgaaaagtatgcaacaatctactaaagaatacaaatttaaattattacaaaaattttctcagtgtcttgtaaaacagtacggaatagaatcatatatatattacaggtgtactgttactttcgttactcgttgcacttaagagtattcttttcaatcaccatttaatatatagaattgatgtcgtatataaaactagtacccaaatatttactaatgttaccaatgttttgtattttaatatacaaacagtttggacatgaaggactcgttatttgttctataagaaatctttgctattcaactatatttgccacaattcttcagtgatttttggctatatctctagccaaatgtataagttttgattagtaccaggtgtatccttaatttgctttgctgatcgacaggatagg

SEQ ID NO: 39380 - DNA, 1416 bp, DROSOPHILA
tgagttcaggccagacggacgtgagtgcttaggatcgcactgagtgcgagtcgaaatccgagaagaaacgaacatataggaagacggagaaattccagcgaatttcatttgcattcgagcggcgcgattaaaagtgaacaaattgcgcaggcccagtgccatttgtgtggtgtgccacagccctaatcagccattcaagccgcgcatgcgcagtgaattttaaaaattaaattttcgaaccgaaccccatttgaaaccgcagcgcacacgtgtgtcccacgacgaattgaattgccaagggcgcgatataagccaaaatagtcatcatcatgaccgcctcaccgggtcttctgcacatggatcaaccgctcagagccatctatcaattcttactcgacttgctagtgtttacgattaaatcggtgtactacgtactcgaatcgatttactacagtctgttgccgcagcgctttcgaaagttaaaggacatctccggccaggtggtgctcatcacaggaggaggcggtggtgttggacgtttgattgccctaaactttgctcgccttcaggcccgcattgtcatctgggatataaatcaagaagccataaagacaactgtggatttgttggccaaacatggttatgacaactgcaagggctacgttgtggacatctcagatcgggagcagatctaccagcgtgccagccaggtgaccgaggaggttggtcccgtcgacatattgattaacaatgccggtatcgtgtgctgcaaacccttctgggagctgcacgatcgggtcatccagaacacgtacaacattaacatcatatcgcactactggaccgtgaaagcgtttctgcctcacatgatgcgcaataatcgtggtcatatcgttactgtgggctcggtaactggaatgctgggcacctacggatgcagtgactacgcggccaccaaatacgcctgcatcggtttccacgagagtttgctcaccgatctgaaggcccatggctatgatcaaatccaaatgagtttgatctgcccgtactacatcaacacgggcatgttttcgggtgttcggccgcggatgatgcccatgctggagccgcagtatgtggcggatcgcatcgagaacgccgtgcgctgcaacgaggtgtggtgcgtgctgcccaactctattcgcctgctcactcctctcaaatgtcttttgcccgccaaaatgtgctgggagctgatgtcgcgtgtcatccgtggacccgagtctatgatgatgtttcagggacgagggcgcgtcgccgctggttaaacacacaataggaatcatcatatggaatccattacctaagcttaagttctttttcaagaggcggcatcgtttcacctataattttacaataaacttagttatttgattt

SEQ ID NO: 39381 - protein, 325 aa, DROSOPHILA
MTASPGLLHMDQPLRAIYQFLLDLLVFTIKSVYYVLESIYYSLLPQRFRKLKDISGQVVLITGGGGGVGRLIALNFARLQARIVIWDINQEAIKTTVDLLAKHGYDNCKGYVVDISDREQIYQRASQVTEEVGPVDILINNAGIVCCKPFWELHDRVIQNTYNINIISHYWTVKAFLPHMMRNNRGHIVTVGSVTGMLGTYGCSDYAATKYACIGFHESLLTDLKAHGYDQIQMSLICPYYINTGMFSGVRPRMMPMLEPQYVADRIENAVRCNEVWCVLPNSIRLLTPLKCLLPAKMCWELMSRVIRGPESMMMFQGRGRVAAG

SEQ ID NO: 39382 - DNA, 3922 bp, DROSOPHILA
tctcgccattgcagctgtcgcctgggccaaccaccatgagagcctttccctcagtccggcggagcacagcgtggtgcggtacacaaacgaatccctcatcgtccagtgccgcagtcccgatcccaaagtggagctccattggaaatcgccgaaaggcgaaattatacgcgagcacaaaggacgcattcacattgagcaaacatcgacaggtaaggatcagatgggatgtgactgcaccagatggggatgggctgggctagataaaacaaaagaaaaagctgcaggggaaaggatagaacagggggcatggggtcatagttcagtgttcagggttcagggggttgttcagtgtatacaaggccactggcacaacaaacgcaattaaatgcaattctctgcacattctttgtaaccgagtgctcagtactagccacattaatggaatatttccttggaatgcccaagtcatttaaatttcagcaataactaccaattcaaaagagtactttacttacttaggaagcatatagtaacattcaaataacatatcttaatggattcaatatttacatacacataagatttatttacatcacagcggtatcagatagtccgcacatttggccccattttatatatcgctttgttttgcgaactccgtttaaactttttcctatgtattccttactcaatttcccattttccattttctctgcccactccgttgcgtttcgccgtttattttccgagctcagaacaattgaaaatcgttttcgcccacatcgcactggccgacaagggcaattggagctgcgaagctgctgatggaagtctgcatagtaaatccttcgatttgattgtgtaccgtaagtggtggagtcgctggcgggcatgaggtcagtcattaatattgcattgttttccctcctcgcacacacacacacacacacacacacacgcacgcacagagaaaattacattcacggaaaatgccaccgtgatgacggtcaaggagggcgagaaggccaccatcctgtgcgaggtgaagggcgagccccagccgaatgtcacctggcacttcaatggacagcccatcagtgccggcggtaagaataccatccccccacctccctcgataatgagcattttgcattccaatctgctccaccaccatcaccatcagccaactggcaaatgccgaacccgactgccactacatatctgcccttttccaccttctccattccgcgtgtgcagcggccgacgactccaagttccgcatcctggccgatggtttgctcatcaacaaggtaacacagaatgacaccggcgagtacgcgtgccgggcataccaagtcaactcgattgcttccgatatgcaggagcgcaccgttttgatgaaaatcgaacgtgagtatgatttacgatttccaaaacgtagaaaactgatccacagtgggaacctactttgaaatttgggttgccaagtcgtgattatttaaaaaaaagcccttccattttactagtgtgtacaatttccttgaataatacattgtaaattatatcaaacttaaagttgagcataacatttttgatcctaccaagtcccagtgtgcaaagtggtggggtaaacagtcgaaattacttgagcaccgttttgttccaaatttcgagttggcgcttagtatgcagcgcagtgagcggtaaatagtttttgagcacgaaaaattctggaattacactcgcggcatgcctttgatgcttttgatggatcccaatgtcgaccggtgttcctgatgtgtggccagtgggcgtacgagtgccagtgcgagtgggcgtggcgcacatgcagctaatggcttaacttggccgggtcctgatttatggttagcgcacatggtttttccatttccatggcctacctttaagcgctgccgcggtttcagctgtctcctgcggcgctatgcatgctcatttcgattttaggcacttttaattgccttaaaatgggagatagaacagaaatcttcatcaatttttttttgcttaaatatttcgaaacagtccctattcctttttaaatactttagttttttttatatcatccttgatattttcccctgtgcagacaagcccatttggtccaagactccatttgttagtctaaagtacgcctacataaacggaactgcgactcttatgtgcgaggcactggcggaacctccagcgaattttacatggtatcgcaaacacaacaagctgcacagcaacaacagactgtacacgatccagtcggacagctactggtcgagtctgaccatccatgtgctgaacaccagcgccttcgataactacaggtgtcgcgccaggaacgatctgggcaccatcgagaggaccacgcgactggagcagggcgagaagcctccgtcaccggccaacttccagctgcgtggcttcaattcaaacaccttcgatgtggtactgagtgctccacgaggtcctcccgacagtcccatgggggtcaatggattccgcatcgagtacatgaccgaaatggagttcaagacggatgcgggcaagtggaccaatgccaggcggaaggattatgctttcgaggagggtgagttaagctttaaaatatagataaaagctatctcttgctacattcgatatgtaaactcatggattctataaattttaggggctaccttccttctgacgaacttagagccagataccgtttacctggtgcgggccgcatcacggaatctggccggattcagtgacttcaccaaggtggagaagtacaagacactttcgctggagccccgagtctcttcgggagtcaaggagaccagaaatatgtgcgtggaactgggtgtgatgacactaatggtcctgatgcggccgttcctgggatgaatctgaatctgcaggcggatgaaggatgacaggtgatgcacctagcggaaccggaaaccaggaccttaaaccccatgtgctttgtatagctataaggcgtgtccacacggcgacacttttctgtctgatttgctcggtctaagtaatttggtttactcttaagttcagtgcgttaatgtaaccttaaagaatgttaagtttagtaagaatttctattacgctttcagtgcttcgatttgaatgatattagtggatcacttataggatatttatatgtatttaaacaaatcctcatagcagttagacataatcaatggtttgctggccttggctccccaaaattatgcaaaactaaagctttgctcaacattccagtatatattttaacgtgaattggaagttttccctgcaactttgcatctcgttgccaaatctttaagatataatcagacagttgccaaaactaaaaaagtacattagtttagtatatacaaacaaatgccttccgtcattcgatataactaacaatcttttcaactaaactacataaatatataaagttttggaataccattaaacgcatcaaacaattaatataaatatcaaggagcttaacgacagcatttaaaagttttatatgtcacataattctttttaatagtcaaaggccaataaaaacaattccacgtgtaaatttccagggctaaaaaatacagaataaaatatagatgtaaaaataagtttaaacactttgccacaatacaaatattatgcaaacgagagaaaaacaaacacatattttacaaaagttatttatattcaataaaattaaatgtatttcagctaaagtggtgtaaaatctaaaccataatacctagccaaagatttaatattttccaactttcgtttgccaattgtgtgtgagccataataaaagttatgaatatcaaaccagaaccgtttgtgcttcgatttattgatgtataaatcagtaagtaaa

SEQ ID NO: 39383 - DNA, 972 bp, DROSOPHILA
atgacggtcaaggagggcgagaaggccaccatcctgtgcgaggtgaagggcgagccccagccgaatgtcacctggcacttcaatggacagcccatcagtgccggcgcggccgacgactccaagttccgcatcctggccgatggtttgctcatcaacaaggtaacacagaatgacaccggcgagtacgcgtgccgggcataccaagtcaactcgattgcttccgatatgcaggagcgcaccgttttgatgaaaatcgaacacaagcccatttggtccaagactccatttgttagtctaaagtacgcctacataaacggaactgcgactcttatgtgcgaggcactggcggaacctccagcgaattttacatggtatcgcaaacacaacaagctgcacagcaacaacagactgtacacgatccagtcggacagctactggtcgagtctgaccatccatgtgctgaacaccagcgccttcgataactacaggtgtcgcgccaggaacgatctgggcaccatcgagaggaccacgcgactggagcagggcgagaagcctccgtcaccggccaacttccagctgcgtggcttcaattcaaacaccttcgatgtggtactgagtgctccacgaggtcctcccgacagtcccatgggggtcaatggattccgcatcgagtacatgaccgaaatggagttcaagacggatgcgggcaagtggaccaatgccaggcggaaggattatgctttcgaggagggggctaccttccttctgacgaacttagagccagataccgtttacctggtgcgggccgcatcacggaatctggccggattcagtgacttcaccaaggtggagaagtacaagacactttcgctggagccccgagtctcttcgggagtcaaggagaccagaaatatgtgcgtggaactgggtgtgatgacactaatggtcctgatgcggccgttcctgggatga

SEQ ID NO: 39384 - protein, 323 aa, DROSOPHILA
MTVKEGEKATILCEVKGEPQPNVTWHFNGQPISAGAADDSKFRILADGLLINKVTQNDTGEYACRAYQVNSIASDMQERTVLMKIEHKPIWSKTPFVSLKYAYINGTATLMCEALAEPPANFTWYRKHNKLHSNNRLYTIQSDSYWSSLTIHVLNTSAFDNYRCRARNDLGTIERTTRLEQGEKPPSPANFQLRGFNSNTFDVVLSAPRGPPDSPMGVNGFRIEYMTEMEFKTDAGKWTNARRKDYAFEEGATFLLTNLEPDTVYLVRAASRNLAGFSDFTKVEKYKTLSLEPRVSSGVKETRNMCVELGVMTLMVLMRPFLG

SEQ ID NO: 39385 - DNA, 3722 bp, DROSOPHILA
ttgctggccttggctccccaaaattatgcaaaactaaagctttgctcaacattccagtatatattttaacgtgaattggaagttttccctgcaactttgcatctcgttgccaaatctttaagatataatcagacagttgccaaaactaaaaaagtacattagtttagtatatacaaacaaatgccttccgtcattcgatataactaacaatcttttcaactaaactacataaatatataaagttttggaataccattaaacgcatcaaacaattaatataaatatcaaggagcttaacgacagcatttaaaagttttatatgtcacataattctttttaatagtcaaaggccaataaaaacaattccacgtgtaaatttccagggctaaaaaatacagaataaaatatagatgtaaaaataagtttaaacactttgccacaatacaaatattatgcaaacgagagaaaaacaaacacatattttacaaaagttatttatattcaataaaattaaatgtatttcagctaaagtggtgtaaaatctaaaccataatacctagccaaagatttaatattttccaactttcgtttgccaattgtgtgtgagccataataaaagttatgaatatcaaaccagaaccgtttgtgcttcgatttattgatgtataaatcagtaagtaaatagaatataaatattttagtaaaaaaaatgcctattagttggcgtagcttttagtgttaatttctaatattcggctcaaaaattatatacaaaaagtacaaagcataaaaatgttgcaagatggaaaaacgagctcattattttagtcagaactcgaaccagccgctaaatgcagactttaatttagaagatcaaattatgaggaattcacaaaaaatatataggtttagctcagatccgggtgagtaaagcttgctaataatgaatacataaaattaaaatttttatttagaatacaatagagtatatcagcggtatatggcaaccctcatccgtgtgcaaaattccatgcatagaagatttcaatccaggaccactctaaaattgcagggctcacatagccgcctctcagctggcggattctgtacgaaattcaataaatccggaaaggagaaaaaaaataaacacaaccaaagccacgaccagcaaaatgatacctgtaagccttcttgctcgaagccaactgattgcgccacaaatgatgaaccttcctgccggggcaataaaagtgcatccgataaaagcctgaaaatcacccgctgttccataccggaacccaataagtccccacgcagcgatggacacgagaaccagcgtcagagctgtgtgtcctttgaagagcccgcggccaaggatattcccacatttgatctgcacttccgggacacctcatgtacggtgtcccatgattccagcctgtcctccatcaacgtttgctatagccaagagcaacagagggatattacaaaatcttgtcccgctcaaacgccgaaagagccagcccctcaacggatgaaggagtcgtccaggaatcaaacagcttcacgattttgcatgagaccgttgattgtggtgcccacaggtggaggaattaaacaattaaagaaggatcaatctgagaattccaaaatagttagcacagatcactccaagtcgaagtctgcacaccacacgaatagttctcgaaaatccacaaagaagcaagcaaagagtcaccgccttattaagtctcacagctctaaagattctttagcaaatcgtggtcagcctacagtggaaattgaagaaacttttccaaattcaatctgcacttccgatacccacgaatcctgtgactgcaagagcgaagaccaattttgctgttactatataccagaggagccccattgctcgcagaatccaccgccatgttccaactgcccggctatatgcgacttatccaaccaattggaggagatgaatcgacgtttggagggccttcacagccaggaactctgcgatatccgcacgcaggtgaatagcctcaatgccaatgttcagcatttggccaaagagtgcattcagaaaatggatggcgccaaaaggctggacaagaagacctcgagcacctgtcagttctgtcatgggcagtgtttgaaaatacttgatagcttctataggcaactgctggactcactttgggatcgttccctgacagacatagtaatatccatatttctgcgagcagacaatgtctatcacgtaaatgtgcgggatctgagctcggactgttcccttggttgttacctggtcactgatgcggccatagaggaggccatcgagttgggagtttttcagaacatactcacatttagtgtaattgatgtgcggaataccatcaagtcgaagaactgcgacttgggcatcgtctttgaataccatcattcaaagcggcagaccggtggttgcgattctccacttcgtggctcctgcatggtgggcaaggaatatatcggcagggttctcggacttcctttggagcagctgaaatacctgtactccgttccgcgatcctataccaaaatcactgagcacgacactaggagtgtaactggaagtcagttacactcagtttccactcaaacgactttgatggatatgcagacagaaatgaagataagatataagaaaagtgcccgtacaaaactaccatcagtttgaaagatatcagttttaataatatatagcaaaagttatagttaagccaacttacaacgtatttctaaaattttgtaataaaagaccttataattttaaaagccagcatagatcaaaggaaattctgattagtttcaataaagctaaccgtacaggttgcactgccatttgcacaaccgacggaccgcatggcaaatggttcatttgttcaacgggcgcggtttgtcaatcagccacatcaactggggctcaactaaggacccgcatatgcgcttttggccggaatgcctttttgggggggctttttggggcaaggaataggagcactgcgttgacagccgcataaatcagttgaatgccaaacgtcggattcggatgcagatgcggatgctgttgcgtatgcggatatgcattgcgactgggcgccatattgtgcgtggtgacttttattgcccgaccgcgcgttaaatatttttctgtctacacacatggacatggatgctccgctcatcattgacatttaccattggccatcgtcattcgcatcacaatgagcagcaatgagcgtggccgttatttgggtgcggttcaaaacaatcagcccggctatttaatttccaaatgagaggagcattattcggcacagcatgagttcaaatcacttgccccatgtgcccgccagctttcaatatcaacactttaagtcaacgatttgagcgacgacagctgaatcagcagcgaagagaagaggacaaataaatactgcgaaaaaaaatgcagaattcggccattttaggcctgcaaccgccaatccgccaattcaccaatccaccggcaagtgggtcagtttcgcacgggcttttagagcaaatcaacgcgaaatccgctccaggtcatatgccacccgactcgatggggggggggcgagaccattcgtgcaatgcaatttccatgtcagcgaagagttttacccctttttttttcgcccacatatctgtttcct

SEQ ID NO: 39386 - DNA, 1722 bp, DROSOPHILA
atggcaaccctcatccgtgtgcaaaattccatgcatagaagatttcaatccaggaccactctaaaattgcagggctcacatagccgcctctcagctggcggattctgtacgaaattcaataaatccggaaaggagaaaaaaaataaacacaaccaaagccacgaccagcaaaatgatacctgtaagccttcttgctcgaagccaactgattgcgccacaaatgatgaaccttcctgccggggcaataaaagtgcatccgataaaagcctgaaaatcacccgctgttccataccggaacccaataagtccccacgcagcgatggacacgagaaccagcgtcagagctgtgtgtcctttgaagagcccgcggccaaggatattcccacatttgatctgcacttccgggacacctcatgtacggtgtcccatgattccagcctgtcctccatcaacgtttgctatagccaagagcaacagagggatattacaaaatcttgtcccgctcaaacgccgaaagagccagcccctcaacggatgaaggagtcgtccaggaatcaaacagcttcacgattttgcatgagaccgttgattgtggtgcccacaggtggaggaattaaacaattaaagaaggatcaatctgagaattccaaaatagttagcacagatcactccaagtcgaagtctgcacaccacacgaatagttctcgaaaatccacaaagaagcaagcaaagagtcaccgccttattaagtctcacagctctaaagattctttagcaaatcgtggtcagcctacagtggaaattgaagaaacttttccaaattcaatctgcacttccgatacccacgaatcctgtgactgcaagagcgaagaccaattttgctgttactatataccagaggagccccattgctcgcagaatccaccgccatgttccaactgcccggctatatgcgacttatccaaccaattggaggagatgaatcgacgtttggagggccttcacagccaggaactctgcgatatccgcacgcaggtgaatagcctcaatgccaatgttcagcatttggccaaagagtgcattcagaaaatggatggcgccaaaaggctggacaagaagacctcgagcacctgtcagttctgtcatgggcagtgtttgaaaatacttgatagcttctataggcaactgctggactcactttgggatcgttccctgacagacatagtaatatccatatttctgcgagcagacaatgtctatcacgtaaatgtgcgggatctgagctcggactgttcccttggttgttacctggtcactgatgcggccatagaggaggccatcgagttgggagtttttcagaacatactcacatttagtgtaattgatgtgcggaataccatcaagtcgaagaactgcgacttgggcatcgtctttgaataccatcattcaaagcggcagaccggtggttgcgattctccacttcgtggctcctgcatggtgggcaaggaatatatcggcagggttctcggacttcctttggagcagctgaaatacctgtactccgttccgcgatcctataccaaaatcactgagcacgacactaggagtgtaactggaagtcagttacactcagtttccactcaaacgactttgatggatatgcagacagaaatgaagataagatataagaaaagtgcccgtacaaaactaccatcagtttga

SEQ ID NO: 39387 - protein, 573 aa, DROSOPHILA
MATLIRVQNSMHRRFQSRTTLKLQGSHSRLSAGGFCTKFNKSGKEKKNKHNQSHDQQNDTCKPSCSKPTDCATNDEPSCRGNKSASDKSLKITRCSIPEPNKSPRSDGHENQRQSCVSFEEPAAKDIPTFDLHFRDTSCTVSHDSSLSSINVCYSQEQQRDITKSCPAQTPKEPAPQRMKESSRNQTASRFCMRPLIVVPTGGGIKQLKKDQSENSKIVSTDHSKSKSAHHTNSSRKSTKKQAKSHRLIKSHSSKDSLANRGQPTVEIEETFPNSICTSDTHESCDCKSEDQFCCYYIPEEPHCSQNPPPCSNCPAICDLSNQLEEMNRRLEGLHSQELCDIRTQVNSLNANVQHLAKECIQKMDGAKRLDKKTSSTCQFCHGQCLKILDSFYRQLLDSLWDRSLTDIVISIFLRADNVYHVNVRDLSSDCSLGCYLVTDAAIEEAIELGVFQNILTFSVIDVRNTIKSKNCDLGIVFEYHHSKRQTGGCDSPLRGSCMVGKEYIGRVLGLPLEQLKYLYSVPRSYTKITEHDTRSVTGSQLHSVSTQTTLMDMQTEMKIRYKKSARTKLPSV

SEQ ID NO: 39388 - DNA, 2477 bp, DROSOPHILA
ggcaggagcgcagcaaaggcacatggcacaccattttagaatgacaaaaacgggcactgtggcaccggtttaagcatcttaaatttgaatattagttattattaattacaatatacaagatcatgttttttccattagaagtagatgtgaatattaagaagagcttcctttttcaatggtgtttaaattaagattatttacgtttaagcccctcactaggcatataaattatagccgcacgtttaaatcagttttccgagttggcttaagttgcagcctgaattctgaaacccgaagctcccaaggtggccttaaatttgcgcggtgcttcgctgaagcgaaattcccactgtgcattaagggtttgcaaaaagaacaaacggcataataggctggcaggacacctgggcacgtgtgtgctgttgttttgactggccttgccagtactcacctggcataaaattaagccatgacgacgcgcttgtcgcctggcctggcttcttattccggggcaaaggtcgtttacggcacggccacaatttgttgctttttgatatttatttagacggcgctggcgcatgagaagtgaaaagcgcacagcccagtcggaacataaatcaaaagcagaagacggcggaaaaaccgtgaaggaaaagccgcagcggaaagggtaaacgctgcggcaacaatggaaatcgttttcagctgcagagcttgcgacttaaactggttatttatggcaggccaagggcgaagagttgaggctgcaaagcccagctgggttttcccgatccaaactattgccgggtaaaaaattgagagaaagtgtaatgtcccacgacaccaagaaaaaactttttgctttttgaagaaagacacaggacccgaaaagtatgcattagctcacaccttatgttcctataatttccaaccagttcaagccactttcttacctagtgcatgtggcattaacgggaaaggacattaaattaattgaatcatggatagtaacatggaaccttggtcctttgccctcaatttcgatgacagcgataaatcgtcggataacgagagccactcttcgaccagatcctcgagccgctccagtgacaccagcatagacaccagctccgtggagaaggagccagctagcgtaattgagagccagtctgtccctggcggaagctacgatgtacgtaacgacttccccaattaggacgcattaatcgatccgtacttttccccctatcagattatctccaagaccaacatgctgcaatttgtgcagaaaatcgatgcaaattcatcgctggacgatcaaggttgcgatatgatggccagaatagccgatgcctttgttaacgacatatccatgcgcatagttaagttggccaagtatcgaaagagcgacgttagcgtgctggacctgaagttcatcctcaagcgggagttcaacatggagttcccaattgaataaatgtccaataaagggaaaaataatgtagaatttgaaaattgtggaatgaataaaatgtatgaataacttggtttaaaactgtcagaaaggcaacaagaataattgttttctgcacctaattaccaatgttaaccagtgcaattactttttggtcaataaaaaaaattttatttttgggtcagttttgcattttttataaggggtaccatcatcaaaatttgcaaaaattggcaaaaaattaaaatttccaaattggaatgccaattgatttggggataaaatacaagctaaacgaggtatggcattccatatttggacaattgttttaagatttatgatgaaaaaactgaatatatttgggcgaaaaatcaaaaaggtctcttttggcaaaaacgcaatatttaagagtggtattttcttcacaactcgcctaaaaatagtcagataagtacaggaataactgttttctgcacctaattaccaatagcaacaattgctattactttttggtcaataaaaaaaattttatttttgggtcagtttttgcattttttataccatcatcaaattttgcaaaaattggcaaaaaattaaaattgccaagtttgaatgccaatcgatttggggataaaatacaagctcaacgaggtatggcattccatatttggacaattattttaagttttatgataaaaaaaaggcctccttttagactgaaaaacgtgttttgccaaaatatggtttcatcgtgaatttaaagaatacacaaaactcgtgtttaatacaaatttgttagctgacgaaagaattttattgaacataattgtgaatacccattgaggtatcaatgagaaaaggtgcacgcctggtgataaattgcaaaccggatcatcatgattaagcaattaataaattcaatggccgctgtcaagagccggactcacattcaatagcccctgcaaagcggtcatcatggtctcggccacactttcccgaggac

SEQ ID NO: 39389 - DNA, 417 bp, DROSOPHILA
atggatagtaacatggaaccttggtcctttgccctcaatttcgatgacagcgataaatcgtcggataacgagagccactcttcgaccagatcctcgagccgctccagtgacaccagcatagacaccagctccgtggagaaggagccagctagcgtaattgagagccagtctgtccctggcggaagctacgatattatctccaagaccaacatgctgcaatttgtgcagaaaatcgatgcaaattcatcgctggacgatcaaggttgcgatatgatggccagaatagccgatgcctttgttaacgacatatccatgcgcatagttaagttggccaagtatcgaaagagcgacgttagcgtgctggacctgaagttcatcctcaagcgggagttcaacatggagttcccaattgaataa

SEQ ID NO: 39390 - protein, 138 aa, DROSOPHILA
MDSNMEPWSFALNFDDSDKSSDNESHSSTRSSSRSSDTSIDTSSVEKEPASVIESQSVPGGSYDIISKTNMLQFVQKIDANSSLDDQGCDMMARIADAFVNDISMRIVKLAKYRKSDVSVLDLKFILKREFNMEFPIE

SEQ ID NO: 39391 - DNA, 2842 bp, DROSOPHILA
taaataattaaatttctacattgttggtctcatctatttcgttctggataaagaataaaataccttttactctaaactctgattgtgtttggatctaacaattattagaaattaatcctttatgctgaaacgaatatttattggttggctgattgaaattctttgttggcttaaacacattcacagaattcattattatcattggagaatggaatattgatttgttattgaaccttgttttttaaacagattgatctggttcaattgtgttttcattggtcacacgttgctttgtttttaggtactgtgcagagttctctgtgaaaaccgtgaaatgaataaacggaaacctagagacatttcaattacatttctaatttggttaaatatacgtacatacatagatttctgtttgagtaacacgtttgttattgcttctgtttagcacttgcctggccaggcttttaacttaattacgaaggctacatcgttatcgttatcgttatcaactacctttactatgccatttgctcccagcacccttcacatcctcggcccagcctctgtctaatcttagtgttaactccagggtgacaccattccatttccatttccggataatgtatgtgtgtgtagttttgctctggtctatacattgactacattttaatggcctaaaaagtcttaactggctgcgatccattgtgtattatggtctgcacaccatattcatattgtgtgattggttttacgttttaaattaatattgtttatgcagcataattaactttgattatacacatgtctccgtcgacctttgattaatttacaatgctaattgagtgttccgctcctcggcttaaaatctagaatttcctcaacgtgtatgcaggctcagcttaggcgctagtaattgatataagtagtggttgagtgcgttgactggctcgcatcctggctccgactagtccgcatcgggctacacaccatccgcctgctctcagagatagttcggcctggagacgcagcagagcaggctcatgttcttgcagatgtagttctgacgccgcttggcctgccaaggtccagttgtgtccagcgccgcgttgcgttctgcaaacatggatatgaaagagcaaacagttggcttgattaattaatggattcggcgggaaaatacccatgtgtggataacatagaatatttaagatatttcagcaaaaacaagaaaaacactttattggctgacagtactcagtggtccagaagccaggctacaaaacctctgcagcccaaatagcctgtccatattttgtgcgcagctttgcccttttttgtatgctacacaattttgcttgctcgacgggccttggccaaataccaaagtgcacggcaatggaagtgcaggcagccaagtcaccggaccactgggagcccgtgagtccgggagcctgcgcagttggagcactcacccaagtacgcctcgtgctgcggcatatactcctgcatctcggccagaagcacggcaatgtcctgcgaatccttggtgatgctgcataattcctcctcgttgaagtcgggcgtgaactgtttgcacaacaatatctggctgatgacattgcccaggttcgagggaccggctcggttctctgaaagtagtaaaaaaaaaaagaaataaacttagaagccaagggataaatcggaatcaagtgataagccgccaccaggttaaggtgcagtggggtcaagctgagggcagaacatttggtcggaatggcaataaaacaaaccatgttgtttgagttggccgcagagagcggaagccgcatttatttgtttcattcatttgtatgcaaacattttcctttgacgtttgcatttcccgctttttatttatttccgtgcttttgctgcttcattagcttttcgcttttcattttgggacgccctttgatgtctgtccgtttgtaactgaaataaacttttgggcttcaacgttttctaatttaatgaacggaaaaattgaataaagtacttctcgaagtgtatgcgaactttgtcaattattcgacccacaatctaggcgaaaagttttgcgtatttctataatctatttgttcaacagtgtcttcattgctttgatattggacctttgattgattgcaatcaatatccgatcagccatcaatcttcatcagccgcattgaaattaattacttagtgaaacttgctgagctgcatgcctcggtgcattgcaatctattcgatcagccaatgcggcgtatgcgcaatattcatattttatcgaggatgcatgaccagcgttcatcgttcgccatttcgatgcagggcatcagctgagttagagggtctattggtttacaatcgaacatatacatatacatatatatggcactgaagtacaaagtatttccactcatatggtgttgagcagtcctggcaacgaataccatttcgcttaaatctcggaaagagataaattttcgctggcaatgcaataattaaaggtccacataaagctgtcatcccatacatactatcacactgccatgtcgattttgcgcatattttggtttgtaattataacagccaaacaccaggcaggaaaaacgttttcaatttttgcactttttattgcttattctgcgctgatggcattttcatggcactgcagatattgtttgcttgttcccacggttggtcgcgggtgcgttgtaaattcgctgcatccagaggcccaccagccagaaactcgggcactgtggctttggtaaatatttaccacccattccggccaaatttgccggcgtgttgacagtga

SEQ ID NO: 39392 - DNA, 342 bp, DROSOPHILA
atgaaacaaataaatgcggcttccgctctctgcggccaactcaaacaacatgagaaccgagccggtccctcgaacctgggcaatgtcatcagccagatattgttgtgcaaacagttcacgcccgacttcaacgaggaggaattatgcagcatcaccaaggattcgcaggacattgccgtgcttctggccgagatgcaggagtatatgccgcagcacgaggcgtacttggaacgcaacgcggcgctggacacaactggaccttggcaggccaagcggcgtcagaactacatctgcaagaacatgagcctgctctgctgcgtctccaggccgaactatctctga

SEQ ID NO: 39393 - protein, 113 aa, DROSOPHILA
MKQINAASALCGQLKQHENRAGPSNLGNVISQILLCKQFTPDFNEEELCSITKDSQDIAVLLAEMQEYMPQHEAYLERNAALDTTGPWQAKRRQNYICKNMSLLCCVSRPNYL

SEQ ID NO: 39394 - DNA, 2522 bp, DROSOPHILA
cacttcagagtgacatttaaagcttctgctcgataataaatcacattgtcatatggcagcgtggtgtgcttaaaaagttcctagccgcaaacaaaattttgacagataccccatgtctgaaattacaaatatgccattgtgtgtgaattcctcctcaagatgttcactaaaaaaaaaaaagaagaaagaggcgtgcgataatggcacatgtgtggcatccacaagggatttcgcctttgaaactttttggaggcataaatcaataaattgaattcggtaaacagacaggcaccgaaaaagtcaacagggacgttaaggtttagtgcctttctgggctctccagagtaaatccatatcacactggtggaagctcatgccacatcattcagtgcggtctttcaaaccacatttgtgcagttttcgctaactctactcgttgttatttcgaaacaaatgagaaaaacaatagcacacaggtcctttcatcaggtttaatgaataaaaattgcccaatatgctcgcagccccggaggcagctcgaaaaaatgttattaacttttgccgtttcgaatggaagggatcgggaagttgaagtgctctgataaattatgcagcactttgaaattgaatttcaaactgagccactaactcattttggaaagcattccaaggaccttcaatccgagtccaacaaattgttatttatgttatctcaacgcaacccaaccgcttttctcttaccaatttggctgcaattagatttgcatacatttccataaggaagggacagccacatgaaggatatgccccaaatgtcacacacacgttgctgtttatgtttatgttaatgctatctatccctttgggcgtccttcgcttagatacactgcagaaaattgctgtactcattggatatacatatgtacatatatatgagaaactagctttacaacgatttcttcccgtgcacatggacaatggaagggaatgtgatacgaactcacctcttgacttgaggcatcaggatctgggcggtgtgcttgagtgcctccacgcaggtgcgacgcaacttgcggatcttctcccggagctcggggcaatccttggcctggccgacgtgtatcagcatatcccggaacagtgccacatggctgttgatctccacgatgagctggaatcagacggagtgaaggaagtgaatgagagattcatatcagggtcatcggcggcaactgatgcttaatttatgcgagagctctattagcccgggcacatagcacattagatattttaatttatgcacaaccccatctaaggacttaatatatacgtatttttgtttgccctgctgggttgttggcccatcaaaatttctgggaaattcttggccagataaaatgttggctgctgctgccgttttacggcccattgccgaaatggaggcggcaaatgagtcgtgcaatcgagacctaattccttggccgacgccttcgtctttcgccagcggcggaatcaggctcataaaacttaaaatgcccgcaatgcaaaggattattcgagctcatttttatggctttttgggttggctagccacgttttttggagtggcagaagggtcaagctgttggcggaaaatatgttaagttaattattattgactgaattctttaagttattccttaagttaattttatgcgtgtgtgctctttagaaatgctctaaatggctttaatagcatgattgttttaactagatttttatacagcatgcttgcatgtaggattataaccaattaaaactgctgtttcaccgctctatttttaagtaaatttcgctttgtttttatccctccaccgccaccaagttaatttcacagtcagtcataagcttaatatcgcgagtaaatcccacgcccacaccctcacacacacaaaccaatgccgcaaatcccacgcacacacgcatgcgagtggcacgtttaaatattaatggttgactctggcaacctcatttcgcaaccagcccccgccccaaaaatccactcccccatttggtcgcgcacttcatttgaaacgcggcgtatgcgtaattttaataatcctcgaatcctcgaaagtctgaaacgcccccggcgaatgcaaagtgaattctgtggcttgactcaatttgggacgacagctgtgccgatgaagagatccgtaaggaggctggaagatttgcagctttatgaaatatatgcatgattagtcatattgatggcatcggcttgacaatgccacaaagacagggccaaaagagggcgtaggcgtagcggggcggggcacttagccaaattgcttattgaaagtgctgtgagtgcgctgtttcctcccctcaaaaactttatccaataaatgggcggggccaaatgggggcgggatcatggttttgtaatcattcctcttggcttgggcatagccgaaacttttccaccatcagctgttgttgccctctctcctcgtcgtcaattttattggatacat

SEQ ID NO: 39395 - DNA, 363 bp, DROSOPHILA
atgagcctgattccgccgctggcgaaagacgaaggcgtcggccaaggaattaggtctcgattgcacgactcatttgccgcctccatttcggcaatgggccgtaaaacggcagcagcagccaacattttatctggccaagaatttcccagaaattttgatgggccaacaacccagcagggcaaacaaaaatacctcatcgtggagatcaacagccatgtggcactgttccgggatatgctgatacacgtcggccaggccaaggattgccccgagctccgggagaagatccgcaagttgcgtcgcacctgcgtggaggcactcaagcacaccgcccagatcctgatgcctcaagtcaagaggtga

SEQ ID NO: 39396 - protein, 120 aa, DROSOPHILA
MSLIPPLAKDEGVGQGIRSRLHDSFAASISAMGRKTAAAANILSGQEFPRNFDGPTTQQGKQKYLIVEINSHVALFRDMLIHVGQAKDCPELREKIRKLRRTCVEALKHTAQILMPQVKR

SEQ ID NO: 39397 - DNA, 3262 bp, DROSOPHILA
atccttctggaggagaacaacattcccttctcctatttggtagccaagtcaatggatccctgtaggtatcgtaacgtggagctgactagcgcgattgaagctcgtcgtgaagcgtatgaatttggtatttacataggcgactataacttcaaggtgggagctaagtgccaggtgcagttggataccaatagacgcgatctgctcagcgcttgttacatccaatcgatcgataagaagaagtccgtttgtaaagtgtttatcgaggagcagggaaaactggttgatgtgccctccgataatctacatccactgccaccagatgaattcaaggcctgggactttgctcgcaagcggccccaacgtctccacaatagccaaatggggagacagtcggtacaaggtgatcagcaaggattcgtccctgacccgatgcctggtacggctccctcgatgccaccaccaccggtggccgatcctcgtccggttaacgtaacagcacagcagccacctgttttcgggccctctagatggatggaacccacccggccgttgatgcctaatcctttgatgatacatcagacaggatcgttcgttttcgtccaacaaccacgagttggtccgccgtcggtcatgatgcacgttttgataattgtacacaacgcaccatacatgcttgcgtttgatcatgccccccacccgcctgcaccccagtgcactgccccattttaatatatttttttcttgtttttacaaatatgtcaatttaaatatttatatttaacatgtttaacatgtcgaaaatcagaataaaacgtgaaaaacagaaatatttatacgtttatcatttgcagatctttatatatttattcaaattacctaaacatatagtttacaattagtatttaattctagcctaataatatttaccatttaagttttaaactttcaacgaaacttagtagactatatatgtataaagaaaatgtgatgtgtttgccaactaatgaagttcgtctccggatgtgacctccactaccgatcgcacctctccggacaaacgactctgcagattcttgttgatattgtccaccatgtcgaaggcatctatgatcatttgggcctcgccctgcgccttttcgctcatctgttccagactttttcgcaactccctgtgctctccagtagtgtcccgctgctccgccttctgatacaagctggttcgcgagaagagggcggtggacgtcatgtgatcggggtgcttctccagttcttcgggcagtggaaagtcaatatcaaaagagaatcgttgcaactcctcatacttcgcgtcctggacctctttgtcctggccatagctgatgaccaccgcctggaggacgatgtcgctaccaggaagttgcatgtaggcaataacgtccttaaagagattctctttcctccacacggtttgtctgtactgcaccacctggtataccaccatctccggttcgggactgtattgcaccagcatccaagtgtcatcattcatggcctccggttcagcttccaaattatcatcgaaggcgagatcaaagcttcgcgctttcaggtgcagtagtatcttttccatataatcacgactttcgtaggcatataggatgtgggcaatgcagccgggagccaacctcaccagaggattacccttcagctcgggcttggtgctcagcagcattacattgtttggagaaacaagtttctggatgaggcgctcgcccgccttttcattctcggtgtactggaccaacagttgctggccgccggcatcttccctctcctccttgctcatggacagcaatgctgcatccaccaggcgcctctcatccgctgccagtatgagtttcgcctccagcaccattccattgacccggaattctacgaatcgggtcatgtatttgtctgaaacatctgactctaggagttccatcgaatggagaacgcagagacggcgtcgaccatttggcttcccatccttcatcaagccgtcatcgacttcggccaggaaccaggataaccgagtcgctgccaatggtccattggcgctgacaacggctccactgttcgcggagtcatccaatccactgtcgttgctgatgttgctcatgatggcggatgtgttttaaatatgttcggaaaagatttgaacaaagttttaattgatataattggcttggctttggttcttttctacgcgtcttgtttgaatgtcttgataggtgaagagttcttggcaaactgatgaactcctcctcgctgcaagctattttatagatgtaaatgggtttagttaaatggttctacctgccgtaaactccatacttttatctaggctttctaatgtctaacatctgtcagttcgaagggattaaaacttggtccggctcatactgggatctaatgttctaattgtgtattacctgcgaaggacgctgattgagcggattttcccaatgtgcagctgcttagtggcaataaatgcgaattgcaagtttgcgacatttctacataggaaaataatttaataaaataagacaatatattttcataaaaaaaaattctagaaaaatgttgttacaaagtcttaagggaaatttaaatggtatgaaagctaaagtgcattatggctatcgaacccatatgatgaatcctattcatcatcttgaacgtcattacactggccagaaataatgcgtaggaataaactggatgtcttggccacatcgctcaaatccttagaagaaaaattgtcaaccaagctactagtgaccgctcctcggccagttagttctcgatttcccattttgagggcattggtcacggagaagaagcgggacgcttgtccagcgggcagaccgagcacacgagtgcaaaattcgacgaccctttccttgtcggcacttccatctggtgcaatctcaccgccgcactgccgacggcaaagttcgtccagtggacagtccctgggatcgtactgcctgtttttgtccagctcacagaacgtgggaatgtcctcgaataatcctatcccgatagcttggttgatggccctcccacttcccagaatgcagcctaggtccttgccggttgccatctcacgcaccttgatgtggtagacattatcctcttgacgcagtatggtaaggaccacgtcatcgaagggccgctgcccaattagccgaaatatttcatccatcaaggaatccagaatgggcagactgccatcgcc

SEQ ID NO: 39398 - DNA, 1262 bp, DROSOPHILA
aactcttcacctatcaagacattcaaacaagacgcgtagaaaagaaccaaagccaagccaattatatcaattaaaactttgttcaaatcttttccgaacatatttaaaacacatccgccatcatgagcaacatcagcaacgacagtggattggatgactccgcgaacagtggagccgttgtcagcgccaatggaccattggcagcgactcggttatcctggttcctggccgaagtcgatgacggcttgatgaaggatgggaagccaaatggtcgacgccgtctctgcgttctccattcgatggaactcctagagtcagatgtttcagacaaatacatgacccgattcgtagaattccgggtcaatggaatggtgctggaggcgaaactcatactggcagcggatgagaggcgcctggtggatgcagcattgctgtccatgagcaaggaggagagggaagatgccggcggccagcaactgttggtccagtacaccgagaatgaaaaggcgggcgagcgcctcatccagaaacttgtttctccaaacaatgtaatgctgctgagcaccaagcccgagctgaagggtaatcctctggtgaggttggctcccggctgcattgcccacatcctatatgcctacgaaagtcgtgattatatggaaaagatactactgcacctgaaagcgcgaagctttgatctcgccttcgatgataatttggaagctgaaccggaggccatgaatgatgacacttggatgctggtgcaatacagtcccgaaccggagatggtggtataccaggtggtgcagtacagacaaaccgtgtggaggaaagagaatctctttaaggacgttattgcctacatgcaacttcctggtagcgacatcgtcctccaggcggtggtcatcagctatggccaggacaaagaggtccaggacgcgaagtatgaggagttgcaacgattctcttttgatattgactttccactgcccgaagaactggagaagcaccccgatcacatgacgtccaccgccctcttctcgcgaaccagcttgtatcagaaggcggagcagcgggacactactggagagcacagggagttgcgaaaaagtctggaacagatgagcgaaaaggcgcagggcgaggcccaaatgatcatagatgccttcgacatggtggacaatatcaacaagaatctgcagagtcgtttgtccggagaggtgcgatcggtagtggaggtcacatccggagacgaacttcattag

SEQ ID NO: 39399 - protein, 379 aa, DROSOPHILA
MSNISNDSGLDDSANSGAVVSANGPLAATRLSWFLAEVDDGLMKDGKPNGRRRLCVLHSMELLESDVSDKYMTRFVEFRVNGMVLEAKLILAADERRLVDAALLSMSKEEREDAGGQQLLVQYTENEKAGERLIQKLVSPNNVMLLSTKPELKGNPLVRLAPGCIAHILYAYESRDYMEKILLHLKARSFDLAFDDNLEAEPEAMNDDTWMLVQYSPEPEMVVYQVVQYRQTVWRKENLFKDVIAYMQLPGSDIVLQAVVISYGQDKEVQDAKYEELQRFSFDIDFPLPEELEKHPDHMTSTALFSRTSLYQKAEQRDTTGEHRELRKSLEQMSEKAQGEAQMIIDAFDMVDNINKNLQSRLSGEVRSVVEVTSGDELH

SEQ ID NO: 39400 - DNA, 4586 bp, DROSOPHILA
tcagctcgggcttggtgctcagcagcattacattgtttggagaaacaagtttctggatgaggcgctcgcccgccttttcattctcggtgtactggaccaacagttgctggccgccggcatcttccctctcctccttgctcatggacagcaatgctgcatccaccaggcgcctctcatccgctgccagtatgagtttcgcctccagcaccattccattgacccggaattctacgaatcgggtcatgtatttgtctgaaacatctgactctaggagttccatcgaatggagaacgcagagacggcgtcgaccatttggcttcccatccttcatcaagccgtcatcgacttcggccaggaaccaggataaccgagtcgctgccaatggtccattggcgctgacaacggctccactgttcgcggagtcatccaatccactgtcgttgctgatgttgctcatgatggcggatgtgttttaaatatgttcggaaaagatttgaacaaagttttaattgatataattggcttggctttggttcttttctacgcgtcttgtttgaatgtcttgataggtgaagagttcttggcaaactgatgaactcctcctcgctgcaagctattttatagatgtaaatgggtttagttaaatggttctacctgccgtaaactccatacttttatctaggctttctaatgtctaacatctgtcagttcgaagggattaaaacttggtccggctcatactgggatctaatgttctaattgtgtattacctgcgaaggacgctgattgagcggattttcccaatgtgcagctgcttagtggcaataaatgcgaattgcaagtttgcgacatttctacataggaaaataatttaataaaataagacaatatattttcataaaaaaaaattctagaaaaatgttgttacaaagtcttaagggaaatttaaatggtatgaaagctaaagtgcattatggctatcgaacccatatgatgaatcctattcatcatcttgaacgtcattacactggccagaaataatgcgtaggaataaactggatgtcttggccacatcgctcaaatccttagaagaaaaattgtcaaccaagctactagtgaccgctcctcggccagttagttctcgatttcccattttgagggcattggtcacggagaagaagcgggacgcttgtccagcgggcagaccgagcacacgagtgcaaaattcgacgaccctttccttgtcggcacttccatctggtgcaatctcaccgccgcactgccgacggcaaagttcgtccagtggacagtccctgggatcgtactgcctgtttttgtccagctcacagaacgtgggaatgtcctcgaataatcctatcccgatagcttggttgatggccctcccacttcccagaatgcagcctaggtccttgccggttgccatctcacgcaccttgatgtggtagacattatcctcttgacgcagtatggtaaggaccacgtcatcgaagggccgctgcccaattagccgaaatatttcatccatcaaggaatccagaatgggcagactgccatcgccacagtattgacaaccacgtggcgggttattcatccgctgggtgttcctaaaaattgcacttggtttagattctccttctagttgacaggaacccctacgtccgttcgcatccaattccatatccgacgtcttaagttccgatttcagtgcagtggatttaatattatgaggagttttcgaacaattgaagctggtcatcggattggcacccaaaatggttttcttctctgatatgctcacttttttgggtctgtcctcctcgaggctgttggatctcgtaaacatttttacgaattccggcagtaagcgatcgaatgagtaggactctgattgggcattctgcgcctgattattttcacacgacttggattttgtgaaatgactaataagctgttcaataaaggatttgtataattccttctctacacttttattggattgttcggaactctttgcctccaagcaagatgtggaggaaacctttgatttgggttttttaacaatttcacccagtaagttttcaaccccatgttcagtatcattttgtttcgtgggatttgcagagaaagctgaagtatttctagacttgtcggaaagtgtttcttcgctttttgttttagcaaaaacccgattaaattgttctagaaaattttcggtatcttttaagcattgtttagcagttgggaattggtcacctttcagatgcatttcatatccattcgccttacaacatctccgattgtctttgctagaacttccattacattctctactgcattgtagaccagttgagttttccgagtttattggggtatctgtggtgcgttgagaattatttgatttctgcttttcttgagcagtttcaggcttcaaaaatatttgaataaattctttggatagcgttttgcactcgcaattagctgtatcttttttttgtgtagcctgatcaacattttcaggttttcttggcaattttcgctcctcggaacgagctgtatatattttctgggatgactggttaaaaggttcaggttttattggcaacttttgttcctcggaacgagctgtatatttcttctgggatgactggttaaaaggttcaggttgtattggcaacttttgttcctcggaacgagctgtatattttttctgggatgactggttaaaaccttccggttttattggcaatttgcgttcctcgtgtatatcgtttatctgtgatgcctgatcagatgtttctagtttttttggcaattcacatgcttccggtttaccttgaaatatgatcctacaatcagagggtttgcattcctggaccttccacgatttcacagagccctgtagatcccttagaaaaagctcctgtctcttcattatggcttccagtttctgaactctatcgaggatttttgaacacgttgaaggatctgaaggctgatcgtctgaactatttgattgtgtcccaaaatggttttcatattgtgtttctttatcttcttttctggtagtgacagatacgttctccattctactttgatggatattggctgtaaaatcggaagatataagagcgccgcctttgactacgattaatgggcgcttgaaaaaacatttgcgcaatgaagtattcgattttctaggtcttttttcttcatgctcagtcttcgaatattttttcaacggaaaacggacagtttttggttcttcatagtccgtttgcgtttgtatgctgttaaggtttttggacgatactggaatcgattgagtctctacatcatgcatattaagcatcgattgggtggatgcatcttggccacaatcgaaatcctcattgggatccgtttggaagacggtttgagtgcccatgtcctcggtggaagctatggtttgggttgattccgaggcgatggcagcgggtttcgggcgtcccgaaatggaacgacagctgcaagttgctccggcaggtaggcgagttgcagtcgccccggtgggcagcgaatcggccatggaagcatctgcaaaattaaaaagggtaataaaaggattaatcagtatttggaagaaactacctgtaaaggttttcgcattggtggtatataaggtgttgacttattagcagtaattcagtttgcaagtggacaacaagcagcacaatggtaagttaaatagaagcaaataccaagcattttaaaataaaaaatcatttccttgtagattaaccgccgtcagcgtttggaattcgccctgaccctattgccctatgatcccgagacagttcagttgtctgaaacgcagaaaaaagtggaggcgatcatcgcccgcctgcgaacggatgactcctttacggaggaggagagcgatgactgcaaggtgcggcgcattcaagatgcaaatgagtttgccgattccgccatgcgacacatcgaaatgtccgatagtggcaagctgagcactctggaaactcttacactggctgctgagaagctgctaaggacacagcgttcaccggatcaggatttcgatgacatggtgcaggatgtggagtactcgcagctgatgaggaacaccatccaggcggtaaatgaggcgcgtttgaagcttctccagcaatgggagcgcagtaagcgcaaggctctcgatctcctcaccatcgaaattgaaaaggtccaggaaatggatcaggagccagagcacaaacagtctcatgagcaggaccaggatcaggagcagagttcggagccttttaacgcgtttcgcgatggagccgatgagcacaacacctcgacgccgaaaacaaacgacgaagatcttggtttggacgatgacgatgaggactatgtgcccggcggagaagagacaatgggtaacaagaggaagcgtatcaagaaaccggtgacctccactccgaatgcgaaacggcggtgtcctggtttcgaattcgacctggacggcgaatcgccgatggtgacgatcggtcccaatggcaccgaagtttcccgcattagcc

SEQ ID NO: 39401 - DNA, 2586 bp, DROSOPHILA
atggccgattcgctgcccaccggggcgactgcaactcgcctacctgccggagcaacttgcagctgtcgttccatttcgggacgcccgaaacccgctgccatcgcctcggaatcaacccaaaccatagcttccaccgaggacatgggcactcaaaccgtcttccaaacggatcccaatgaggatttcgattgtggccaagatgcatccacccaatcgatgcttaatatgcatgatgtagagactcaatcgattccagtatcgtccaaaaaccttaacagcatacaaacgcaaacggactatgaagaaccaaaaactgtccgttttccgttgaaaaaatattcgaagactgagcatgaagaaaaaagacctagaaaatcgaatacttcattgcgcaaatgttttttcaagcgcccattaatcgtagtcaaaggcggcgctcttatatcttccgattttacagccaatatccatcaaagtagaatggagaacgtatctgtcactaccagaaaagaagataaagaaacacaatatgaaaaccattttgggacacaatcaaatagttcagacgatcagccttcagatccttcaacgtgttcaaaaatcctcgatagagttcagaaactggaagccataatgaagagacaggagctttttctaagggatctacagggctctgtgaaatcgtggaaggtccaggaatgcaaaccctctgattgtaggatcatatttcaaggtaaaccggaagcatgtgaattgccaaaaaaactagaaacatctgatcaggcatcacagataaacgatatacacgaggaacgcaaattgccaataaaaccggaaggttttaaccagtcatcccagaaaaaatatacagctcgttccgaggaacaaaagttgccaatacaacctgaaccttttaaccagtcatcccagaagaaatatacagctcgttccgaggaacaaaagttgccaataaaacctgaaccttttaaccagtcatcccagaaaatatatacagctcgttccgaggagcgaaaattgccaagaaaacctgaaaatgttgatcaggctacacaaaaaaaagatacagctaattgcgagtgcaaaacgctatccaaagaatttattcaaatatttttgaagcctgaaactgctcaagaaaagcagaaatcaaataattctcaacgcaccacagataccccaataaactcggaaaactcaactggtctacaatgcagtagagaatgtaatggaagttctagcaaagacaatcggagatgttgtaaggcgaatggatatgaaatgcatctgaaaggtgaccaattcccaactgctaaacaatgcttaaaagataccgaaaattttctagaacaatttaatcgggtttttgctaaaacaaaaagcgaagaaacactttccgacaagtctagaaatacttcagctttctctgcaaatcccacgaaacaaaatgatactgaacatggggttgaaaacttactgggtgaaattgttaaaaaacccaaatcaaaggtttcctccacatcttgcttggaggcaaagagttccgaacaatccaataaaagtgtagagaaggaattatacaaatcctttattgaacagcttattagtcatttcacaaaatccaagtcgtgtgaaaataatcaggcgcagaatgcccaatcagagtcctactcattcgatcgcttactgccggaattcgtaaaaatgtttacgagatccaacagcctcgaggaggacagacccaaaaaagtgagcatatcagagaagaaaaccattttgggtgccaatccgatgaccagcttcaattgttcgaaaactcctcataatattaaatccactgcactgaaatcggaacttaagacgtcggatatggaattggatgcgaacggacgtaggggttcctgtcaactagaaggagaatctaaaccaagtgcaatttttaggaacacccagcggatgaataacccgccacgtggttgtcaatactgtggcgatggcagtctgcccattctggattccttgatggatgaaatatttcggctaattgggcagcggcccttcgatgacgtggtccttaccatactgcgtcaagaggataatgtctaccacatcaaggtgcgtgagatggcaaccggcaaggacctaggctgcattctgggaagtgggagggccatcaaccaagctatcgggataggattattcgaggacattcccacgttctgtgagctggacaaaaacaggcagtacgatcccagggactgtccactggacgaactttgccgtcggcagtgcggcggtgagattgcaccagatggaagtgccgacaaggaaagggtcgtcgaattttgcactcgtgtgctcggtctgcccgctggacaagcgtcccgcttcttctccgtgaccaatgccctcaaaatgggaaatcgagaactaactggccgaggagcggtcactagtagcttggttgacaatttttcttctaaggatttgagcgatgtggccaagacatccagtttattcctacgcattatttctggccagtgtaatgacgttcaagatgatgaatag

SEQ ID NO: 39402 - protein, 861 aa, DROSOPHILA
MADSLPTGATATRLPAGATCSCRSISGRPKPAAIASESTQTIASTEDMGTQTVFQTDPNEDFDCGQDASTQSMLNMHDVETQSIPVSSKNLNSIQTQTDYEEPKTVRFPLKKYSKTEHEEKRPRKSNTSLRKCFFKRPLIVVKGGALISSDFTANIHQSRMENVSVTTRKEDKETQYENHFGTQSNSSDDQPSDPSTCSKILDRVQKLEAIMKRQELFLRDLQGSVKSWKVQECKPSDCRIIFQGKPEACELPKKLETSDQASQINDIHEERKLPIKPEGFNQSSQKKYTARSEEQKLPIQPEPFNQSSQKKYTARSEEQKLPIKPEPFNQSSQKIYTARSEERKLPRKPENVDQATQKKDTANCECKTLSKEFIQIFLKPETAQEKQKSNNSQRTTDTPINSENSTGLQCSRECNGSSSKDNRRCCKANGYEMHLKGDQFPTAKQCLKDTENFLEQFNRVFAKTKSEETLSDKSRNTSAFSANPTKQNDTEHGVENLLGEIVKKPKSKVSSTSCLEAKSSEQSNKSVEKELYKSFIEQLISHFTKSKSCENNQAQNAQSESYSFDRLLPEFVKMFTRSNSLEEDRPKKVSISEKKTILGANPMTSFNCSKTPHNIKSTALKSELKTSDMELDANGRRGSCQLEGESKPSAIFRNTQRMNNPPRGCQYCGDGSLPILDSLMDEIFRLIGQRPFDDVVLTILRQEDNVYHIKVREMATGKDLGCILGSGRAINQAIGIGLFEDIPTFCELDKNRQYDPRDCPLDELCRRQCGGEIAPDGSADKERVVEFCTRVLGLPAGQASRFFSVTNALKMGNRELTGRGAVTSSLVDNFSSKDLSDVAKTSSLFLRIISGQCNDVQDDE

SEQ ID NO: 39403 - DNA, 2213 bp, DROSOPHILA
acccgctgggacgcgtgcaaatctaaaagtaaagcgagaaaaatgtagacaacgcgtcaggcctggtcagcccagagaattctagggctaaactggcagatccgaaggtgtctggacgctctgattagcttcagtcgcacacactttgctgcttcaaggtcactgcgatgacgtcatcgtggggcaagaccattccattccattcgatggggcaaacaaagctttcttagaatttcacacaaagaaattactgaagcgttttgggcataacgagctgtggctccaaaaatattgtattagaaaccaaaagcggtaggcaattgccttaaactacactcagaaaaatgtttctttattcgtctatcttttttaaaatccaatctaatcaattgcaaatttttaaaaaactttttttttcgaatacagctaaccccattttctgtgtgtacccaaactcatggctaatatgtcaagatattcttatatggcttaggcccaaaagtagtgactaacccgcgacaagatgttagctcaattgcccacgctggccatttgttaatgcatatattctattctggtttagcgcctcatcaaatttctaatttatgagccggagtttctcaggctttgtgcgcaattgaatggccgacggcaatttagcaattataaaatgattaatttttgtgcattttctcaacaccttccacttagcggccgctaactaaaccggagcccagcggctccaacttggagcccaaaatgagttgcgagctggggagttgggagcttccagccgctatctgcgggctgagggcagggcgttaaagcccaactactgtcgattaaggtgccgctgccccgttgccgtgtagggtatcattaggccagacaaaacaatttaaaataactacagcaactagcataataatgtaaagaagcagcggccatcgcagtccagaaacgggcgatggcgatggcgatgccatagacaattttcataatggacagaaataaatctgaagagcagaagctacagctgaagctgaaggaacagcagcagcagcagcagaagcagctgcagcctgggaaactgatcgacgagcacaacttaattaataaactaatgagcagtttgcagccaagtccaccgaagttccaagaccccccttccaacccggtggagttcatctgcgagattatctacataaagtagtccccgacgcggacgtgcatcgtgctcggatatggctaaaaagcccagcctatttgctaagagatcgtccagaaattaaaataaatgtgcaacgtgcaaaaatgccaaagaccccaaccgaaagtaaaaccggaacgtgttcagcgccaaaatacggcgaaacggaacgaaacgaaaagtaaggcgggcaaaaaactgatttatgcatatggcaacgggacggactgtacgtggaaatcccgatgaggcatcttgtggaaattcgttttgcatattataattgtgttcaaatgatggcaagattttcattcagttaatagtttagtatcatatagaatgtctaattacattttatatatccacaacttttaagaacttacaaaagtaaataaaaaacaaattgttggtgcttagcagaatcataattggctttctgcagaagagagcagacataaaaaaatcaatttgaaataaaatatttgaaatcttcagaccgtaataaaagtgttttacaactgcctggttgcacttacctttttgttcagatgcatacttaccactttattaggcttaaaaatgatttaaagttttgaatactcttccgacttgccataaacggtctttttaagcggcttttcacacttcctcggccagattgtaaagcgaaaagcgcccacttggcatttatgcaaaggggttctataaatgtgagcgatcttctaatgggtttagcgaaagccttgggattgtcgccatcttggcgaaattaatgccaaccaataaagatcggctaatgaagttgattttttatgcgcatcttggccactaaactgactaaacagccgtaattacagggtcattatttagaaggcatcgacggccaagttcgccaagtcggcgactaagacaaatgagattaggcccggccaactggcagaggccaaaaataaaagtgagcactgacacgactgtagtaagtgaagtgcaagtgaggccttga

SEQ ID NO: 39404 - DNA, 213 bp, DROSOPHILA
atggacagaaataaatctgaagagcagaagctacagctgaagctgaaggaacagcagcagcagcagcagaagcagctgcagcctgggaaactgatcgacgagcacaacttaattaataaactaatgagcagtttgcagccaagtccaccgaagttccaagaccccccttccaacccggtggagttcatctgcgagattatctacataaagtag

SEQ ID NO: 39405 - protein, 70 aa, DROSOPHILA
MDRNKSEEQKLQLKLKEQQQQQQKQLQPGKLIDEHNLINKLMSSLQPSPPKFQDPPSNPVEFICEIIYIK

SEQ ID NO: 39406 - DNA, 2665 bp, DROSOPHILA
caaattagtaacaggccggcacgaagaaaaggagaaaaggcgatcagaagaaagaaagagacgtgcggtgcggaagaatcgtcttcggctaccggagaatcgtcccctgcagtgccaactggcaacatcttcttcctcaatgacattaattcatttcgtatgcaaagcaatcagtgaactcttctcctccagaaccagctcgtcgtctcgatctcggtcttggtcttggtctcggtcttggcaattagaaaagagttggaaaattgtatgcggctgcagatcggactgcagcttcgactgcgactccgacttggacttggactgacttttccggctggcactgcgcactgatttgcattgcacgattctcaacttaatttaacataaagtaaacaagcgcagttaacaagccaaatacaagccatgagcgtgcgggtgccggcgcagcttccagccatccagtcatccagctatccaaccatccaggttcaggttcagattccgaccctccctccatctacagttcccaatccctcagcctgccaagggccttaggtccgagaccatccacgtatgccctcttcttcctgggcctgctgtcgtgtgacgtgttgtgaaaattctaaaatatttcgcccagctttctcacaagtcaacgcgagacactctaggatcgcacagtggtcgtgaaataatcaaaaaaaaaaaaactaaatagcacgtggttaacaaattcgaagtattcctttaacgttacagccaaataaatttgtggtattagtatttgtaaactttgctaattgaatcaaataactaattcttcttatcattccttgaattgtttgttttcattgtaaaatatatattttcaatatctataaattataatataattactctttatacatcatggctaaaaaagtttatgttttgtatcacatattcctcgtctgagccagttgggcctggtgtggaggtaggatccacaaatggattagttttaggagaagtagtagtagtaggagtagtagtagtagcaggagtagtaggagtagtagtagtagtagtagtagtagtaggagtagtagtagtagtagtagtagtagtagtagtagtagtagtaggagtagtagtagttgtagtacgagtagtagtagggcttaatccccaattatgatcatattctggtacataagcaaaatgaaatggtttatattccgagcgtactcttaagatttcccgatgatattcatttgggcagctagtattaaaaagtcgtatcaaaaaaagtatttgcttttctgtgctttccagcaaaagggaaccgttggccagaccattgacttgaattaagctaaaaattattacgaaagaataaatacatatagatagattaaagattaaagaactgtataccttttaccttttgttacatgactgccgatttatgcggagagccctatgatttgtttctatttccgataatagcttatcgactttatcaaaaggcactgaaggtatatacttgtccacctattccaagaatatggttaataacgatacagtattgatttataacgatcttaccgaggaatcccgtctttcaagtccatgtccatgtggcactaaggaaatcaatataaagatatgctgccatttgcacatttagtgcactttctgaatacgcttgtacgtaagtgaaccacatttcattttcaatgcatctttaggaaggcgtttgtatggttaatactaaaacgaatcggcttgacaatttttgttaagcgattttacgtgcaattaatatgtatatgtatttactttaattattgattgtgtacaacacataaccaatgcgatacatcctatcctattttataaatttaaagacaataacaatacttttaaaaacatttgaaatacgattttttccaaactgtttaactaaaaaatatttaaaagctgctggtctcttttattacaacctgattcaaagaatatccaggataatggttttgaagattatctacgtatagggggaatcccattagcacgtaggaactttagaaactcttcttggagtggatatgaataccatggaaagcaggaggggaaccattgtatacctacgtggcttacttgctataaaaagttagctgttatgatggaacaatttgttagaactaaataaaaaaaatatgtcaagtattcatttttacgagcatcgcttgtttattagtttatcgattgaaaatggaaaatgtaattcttttcaattttgttgcacaatttttaattgggacggtcgatgcgtatgtcatttacatttaagtttcctcctgcaggtggatttttaactggctgcttgggcacattgtccgggttttgaggttcagaaggtggtggaggacgtattttggaactagcaggcttctgtgatcctactggacgtccaatttgaatcggtgatccaagaggcggaatagagcccggtggcaatacagaattaggaggcacctgtgatcctggtggatgtcgaccttgatttggtggtcgaaggggcggaatagagcccggtggcaatccagtattaggaggcaacagtgatcctggtggatgtccaccttgagttagtggcccagatggcggaatcgagcccgtggat

SEQ ID NO: 39407 - DNA, 237 bp, DROSOPHILA
atgtgcaaatggcagcatatctttatattgatttccttagtgccacatggacatggacttgaaagacgggattcctcgccctactactactcgtactacaactactactactcctactactactactactactactactactactactactactactcctactactactactactactactactactcctactactcctgctactactactactcctactactactacttctcctaa

SEQ ID NO: 39408 - protein, 78 aa, DROSOPHILA
MCKWQHIFILISLVPHGHGLERRDSSPYYYSYYNYYYSYYYYYYYYYYYYYYSYYYYYYYYYSYYSCYYYYSYYYYFS

SEQ ID NO: 39409 - DNA, 2279 bp, DROSOPHILA
aggtgtcgtagttggtgtaggtgttgtagttggtggacgtgttgtagttggaggtggtggaggtggaggtggcggacgtggttttggtggaggggcaggagccgaaggtgttgggaagttatcgggaacatagggaaaatgaaatggtgtgtaggactccccggatcttattcgatcgaaactgaattccatattccccttaaattggattaaataaacttgactttcttctatacgttcatataagtcggacttaccggtacaaagaggaaaatcacaattaccatataattccatttcgacatttagtatagtctctaatatggtcaactttaaaataatttaaaatatattaagttcctcagttttgttgaactattttatgaattgattaattataaacgccttaatgaaattagtaacagttacgctttcagtccgacaaactttgcaaataagtttaataaaaagcttgaaatggagtgcgcggttttcgaaagattatataattagtatagtttcattcctagctatgaagcgtaaaaacagtttctttttttatattttttttaatgccacatatatttttaaatacatatttttgcttgttgctattttgttacttaactcaatagctgtttttcattggtggcacagttgttttctacctctagattgtttgtattcacctatggcggtgatccggcggatcgtgttttctgatttggggagatatcaggtatactctcacttggtggtgcgggtaatcctggagggtaaagaggcgaattcggggatcccgatgaacgccaatttggttttgcgggcaagggctgaaggacagaattcgaagatccagatggactcaaacttggtggtgccattaattctggacgttggacaagaggatttgaagattccaatgaactccagctaggtggcgctggtagccctggaggtagttgggagggtccaagagatcccaagggtgcctcttgtaatggtggaagttgggcggaaggattcgaagatctacgcgaattccaaactggaggtatgggcatttccggaggatagacaggacgattggcagactccaattgattccaatttggtggtcccggtggtcctgattggggagagggaggaaaagatgatcctggtggactccaacctggttgtatgggcgatgccggaggatgggcgggacgatcagcagatccccatggattctgatctggtgttcccggtagtcctggtagtgaagggggaggaataggtgatcctggtgagctccaacctgccggggcggaacttggaggtttgataggagcatgtggatattctactggacttgagcctggttgctgttgtattcctggcagttggtaggaaggaatcgaagatccaggtgaactccaacctggagaggcatttgtcccgggaagatttggtattcccgatggacccgagcccgttgatcccagtaatcctggaaattgggcgaaagatggtggcgcaaataatcctggatattggtgggaaggaatgggagaggcaggtgggattaagcttggtggggcgggtaaagtgagaagttgaacaaaaggaatttgaaagttgggatggtggaaggatgaaatctgagatcccgtcgaaagttgtgcatataatccatttcctgtttgatatccttgatatcctacccattggctccacggtgggtaccataggtatttattaatttcattttgaggataacaaaggtatcctgagtttggatacttttgggaaaattgggttagtggatgtggggagttacacggatacggttgaagtattttttgggaagttgttctctgcggattttggtacagaccattagaaatgagatttactcgctgcaaaatttcttactggagatatttgtccatcgacttttttgctggcttgcaccactgataataatatgatattgattatccacttccacattttgtgtgggggcttttcaattgccagaactgaaatgattccagaaaatgtatttggttctagacctggcatgtggctcatttaaaagtagaacaaatgcattaccgagaatatatataattaatttgtcatatttgacgaaagactgattagataacatagttacagtgtcattttgttggcatctatcttgcatatatttaagctaagccatgcttgcatgcattttttttctctgtagctttttgtgtgatagatttggatatttataccactgtgcagcg

SEQ ID NO: 39410 - DNA, 279 bp, DROSOPHILA
atggtggaagttgggcggaaggattcgaagatctacgcgaattccaaactggaggtatgggcatttccggaggatagacaggacgattggcagactccaattgattccaatttggtggtcccggtggtcctgattggggagagggaggaaaagatgatcctggtggactccaacctggttgtatgggcgatgccggaggatgggcgggacgatcagcagatccccatggattctgatctggtgttcccggtagtcctggtagtgaagggggaggaatag

SEQ ID NO: 39411 - protein, 92 aa, DROSOPHILA
MVEVGRKDSKIYANSKLEVWAFPEDRQDDWQTPIDSNLVVPVVLIGEREEKMILVDSNLVVWAMPEDGRDDQQIPMDSDLVFPVVLVVKGEE

SEQ ID NO: 39412 - DNA, 5360 bp, DROSOPHILA
tttgcttttctgtgctttccagcaaaagggaaccgttggccagaccattgacttgaattaagctaaaaattattacgaaagaataaatacatatagatagattaaagattaaagaactgtataccttttaccttttgttacatgactgccgatttatgcggagagccctatgatttgtttctatttccgataatagcttatcgactttatcaaaaggcactgaaggtatatacttgtccacctattccaagaatatggttaataacgatacagtattgatttataacgatcttaccgaggaatcccgtctttcaagtccatgtccatgtggcactaaggaaatcaatataaagatatgctgccatttgcacatttagtgcactttctgaatacgcttgtacgtaagtgaaccacatttcattttcaatgcatctttaggaaggcgtttgtatggttaatactaaaacgaatcggcttgacaatttttgttaagcgattttacgtgcaattaatatgtatatgtatttactttaattattgattgtgtacaacacataaccaatgcgatacatcctatcctattttataaatttaaagacaataacaatacttttaaaaacatttgaaatacgattttttccaaactgtttaactaaaaaatatttaaaagctgctggtctcttttattacaacctgattcaaagaatatccaggataatggttttgaagattatctacgtatagggggaatcccattagcacgtaggaactttagaaactcttcttggagtggatatgaataccatggaaagcaggaggggaaccattgtatacctacgtggcttacttgctataaaaagttagctgttatgatggaacaatttgttagaactaaataaaaaaaatatgtcaagtattcatttttacgagcatcgcttgtttattagtttatcgattgaaaatggaaaatgtaattcttttcaattttgttgcacaatttttaattgggacggtcgatgcgtatgtcatttacatttaagtttcctcctgcaggtggatttttaactggctgcttgggcacattgtccgggttttgaggttcagaaggtggtggaggacgtattttggaactagcaggcttctgtgatcctactggacgtccaatttgaatcggtgatccaagaggcggaatagagcccggtggcaatacagaattaggaggcacctgtgatcctggtggatgtcgaccttgatttggtggtcgaaggggcggaatagagcccggtggcaatccagtattaggaggcaacagtgatcctggtggatgtccaccttgagttagtggcccagatggcggaatcgagcccgtggatgggggatatattccagaattaggaggcttctgtgatcctggtggatgtccaatttgattcggtgatccaagaggcggaatagagcccggtggcaatccagtattaggaggcacctgtgatcctggtggatgtcgaccttgatttggtggtcgaaggggcggaatagagcccggtggcaatacagaattagaaggcacctgtgatcctggtggatgtccaccttgagttagtggcccagatggtggaatccagcccgtggatggggggtatattcccacattaggaggcttctgtgatcctggtggatgtccaccttgatttggtggtcgaagaggcggaatagagcccgtggatgggggatatattcccacattaggaggcttctgtgatcctggtggatgtccaatttgattcggtgatccaagcggcgaaatagagcccggtggcaatccagtattaggaggcaacagtgatcctggtggatgtccaccttgagttagtggcccagatggcggaatccagcccgtggatgggggatatattccagaattaggaggcttctgtgatcctggtggatgtccaatttgattcggtgatccaagcggcggaatagagcccgatggcaatccagtattagaaggcaacagtgatcctggtggatgtccaccttgagttagtggcccagatggcggaatcgagcccgtggatgggggatatattccagaattaggaggcttctgtgatcctggtggatgtccaatttgattcggtgatccaagcggcggaatagagcccgatggcaatccagtattaggaggcaacagtgatcctggtggatgtccaccttgtagttagtggcccagatggcggaatccacgcccgtggatggggggtatattcccacattaggaggcttctgtgatcctggtggatgtccaccttgatttggtggtcgaagaggcggaatagagcccggtggcaatccagtattaggaggcaacagtgatcctggtggatgtccactttgagttagtggcccagatggcggaatccagcccgtggatggggggtatattcccacattaggaggcttctgtgatcctggtggatgtccaatttgattcggtgatccaagcggcggaatggaacccggtggcaatccagtattaggaggcaacagtgatcctggtggatgtccaccttgagttagtggcccagatggcggagtccagcccgtggatggggggtatattcccacattaggaggcttctgtgatcctggtggatgtccaatttgattcggtgatccaagcggcggaatagagcccggtggcaatccagtattaggaggcaacagtgatcctggtggatgtccaccttgagttagtggcccaaatggcggaatccagcccgtggatggggggtatattcccacattaggaggcttctgtgatcctggtggatgtccaccttgatttggtggtcgaagaggcggaatggaacccggtggcaatccagtattaggaggcaacagtgatcccgttggatgtccaccttgagttagtggcccagatggcgggaatccagcccgtggatgggggatatattcccacattaggaggcaacagtgatcctggtggttgtccaatttgatttggtgatccaagaggcggaatagagcccgctggcaatacaaaattaggaggcacctgtgatcccggtggatgtccaccttgagttagtggcccagatggcggaatccagcccgtggatggagggtatattcccacattaggaggcaacagtgatcctggtggatgtccaccttgatttgatggtcgaagaggcggaatagagcccggtgccaatacagaattaggaggatacagtgatcctggtggatgtccaccttgaattagtgacccagatggcggaatccagcccattgatggagggtatattcctaaattcgaaggcatctgtgatcctggtggatctccaatttgattcggtggtcgaagcggcggaatagagcccggtggcaagcctgaattaggaggcaactgtgatcctggtggatgtccaccttgacttagtgacccagatggcggaatccagcccgtggatggagggtatattcctgaattaggaggcttatgtgatcctggttgatgtccaatttgattttgttgtccaaaaggcggatagcagatcgctaggggagggacgaatcctgaatttgatggagcctgtgattcaggtggatgtccatcttcactcgttggtccaacagaaggactccagatcgctgggggagggacgaatcctgaattgggaggcgtctgtgattcaggtggatttccatctgggtttggtggaccataaggcggattccaaatggctgggggagggacaaatcctgaattggtaggcgcctgtgattctggtggatgtccaatttgattcggtggttcataagccggattccagattgctgggggaggaaccaattctgaattgggaggcgtctgtgatccaggtggatttccatcttgattcggtggtccataaggcggactgcagatcgctgggggaaggacgaatcctgaattgggaggcatctgtgatcctggtggatgtggttttcctgaattggaaagcaagtgcgatccaggtggatctccaaattgtggtgcgttcccatatatggggagtggataccatactccaggggttgctggatcaggaggtggtggtgcagagggtggaggcggtggaggtgtcgttattggtgtaggtgtcgtagttggtgtaggtgttgtagttggtggacgtgttgtagttggaggtggtggaggtggaggtggcggacgtggttttggtggaggggcaggagccgaaggtgttgggaagttatcgggaacatagggaaaatgaaatggtgtgtaggactccccggatcttattcgatcgaaactgaattccatattccccttaaattggattaaataaacttgactttcttctatacgttcatataagtcggacttaccggtacaaagaggaaaatcacaattaccatataattccatttcgacatttagtatagtctctaatatggtcaactttaaaataatttaaaatatattaagttcctcagttttgttgaactattttatgaattgattaattataaacgccttaatgaaattagtaacagttacgctttcagtccgacaaactttgcaaataagtttaataaaaagcttgaaatggagtgcgcggttttcgaaagattatataattagtatagtttcattcctagctatgaagcgtaaaaacagtttctttttttatattttttttaatgccacatatatttttaaatacatatttttgcttgttgctattttgttacttaactcaatagctgtttttcattggtggcacagttgttttctacctctagattgtttgtattcacctatggcggtgatccggcggatcgtgttttctgatttggggagatatcaggtatactctcacttggtggtgcgggtaatcctggagggtaaagaggcgaattcggggatcccgatgaacgccaatttggttttgcgggcaagggctgaaggacagaattcgaagatccagatggactcaaacttggtggtgccattaattctggacgttggacaagaggatttgaagattccaatgaactccagctaggtggcgctggtagccctggaggtagttgggagggtccaagagatcccaagggtgcctcttgtaatggtggaagttgggcggaaggattcgaagatctacgcgaattccaaactggaggtatgggcatttccggaggatagacaggacgattggcagactccaattgattccaatttggtggtcccggtggtcctgattggggagagggaggaaaagatgatcctggtggactccaacctggttgtatgggcgatg

SEQ ID NO: 39413 - DNA, 3144 bp, DROSOPHILA
atggaattcagtttcgatcgaataagatccggggagtcctacacaccatttcattttccctatgttcccgataacttcccaacaccttcggctcctgcccctccaccaaaaccacgtccgccacctccacctccaccacctccaactacaacacgtccaccaactacaacacctacaccaactacgacacctacaccaataacgacacctccaccgcctccaccctctgcaccaccacctcctgatccagcaacccctggagtatggtatccactccccatatatgggaacgcaccacaatttggagatccacctggatcgcacttgctttccaattcaggaaaaccacatccaccaggatcacagatgcctcccaattcaggattcgtccttcccccagcgatctgcagtccgccttatggaccaccgaatcaagatggaaatccacctggatcacagacgcctcccaattcagaattggttcctcccccagcaatctggaatccggcttatgaaccaccgaatcaaattggacatccaccagaatcacaggcgcctaccaattcaggatttgtccctcccccagccatttggaatccgccttatggtccaccaaacccagatggaaatccacctgaatcacagacgcctcccaattcaggattcgtccctcccccagcgatctggagtccttctgttggaccaacgagtgaagatggacatccacctgaatcacaggctccatcaaattcaggattcgtccctcccctagcgatctgctatccgccttttggacaacaaaatcaaattggacatcaaccaggatcacataagcctcctaattcaggaatataccctccatccacgggctggattccgccatctgggtcactaagtcaaggtggacatccaccaggatcacagttgcctcctaattcaggcttgccaccgggctctattccgccgcttcgaccaccgaatcaaattggagatccaccaggatcacagatgccttcgaatttaggaatataccctccatcaatgggctggattccgccatctgggtcactaattcaaggtggacatccaccaggatcactgtatcctcctaattctgtattggcaccgggctctattccgcctcttcgaccatcaaatcaaggtggacatccaccaggatcactgttgcctcctaatcgggctctattccgcctcttggatcaccaaatcaaattggacaaccaccaggatcactgttgcctcctaatgtgggaatatatcccccatccacgggctggattcccgccatctgggccactaactcaaggtggacatccaacgggatcactgttgcctcctaatactggattgccaccgggttccattccgcctcttcgaccaccaaatcaaggtggacatccaccaggatcacagaagcctcctaatgtgggaatataccccccatccacgggctggattccgccatttgggccactaactcaaggtggacatccaccaggatcactgttgcctcctaatactggattgccaccgggctctattccgccgcttggatcaccgaatcaaattggacatccaccaggatcacagaagcctcctaatgtgggaatataccccccatccacgggctggactccgccatctgggccactaactcaaggtggacatccaccaggatcactgttgcctcctaatactggattgccaccgggttccattccgccgcttggatcaccgaatcaaattggacatccaccaggatcacagaagcctcctaatgtgggaatataccccccatccacgggctggattccgccatctgggccactaactcaaagtggacatccaccaggatcactgttgcctcctaatactggattgccaccgggctctattccgcctcttcgaccaccaaatcaaggatcactgttgcctcctaatactggattgccatcgggctctattccgccgcttggatcaccgaatcaaattggacatccaccaggatcacagaagcctcctaattctggaatatatcccccatccacgggctcgattccgccatctgggccactaactcaaggtggacatccaccaggatcactgttgccttctaatactggattgccatcgggctctattccgccgcttggatcaccgaatcaaattggacatccaccaggatcacagaagcctcctaattctggaatatatcccccatccacgggctggattccgccatctgggccactaactcaaggtggacatccaccaggatcactgttgcctcctaatactggattgccaccgggctctatttcgccgcttggatcaccgaatcaaattggacatccaccaggatcacagaagcctcctaatgtgggaatatatcccccatccacgggctctattccgcctcttcgaccaccaaatcaaggtggacatccaccaggatcacagaagcctcctaatgtgggaatataccccccatccacgggctggattccaccatctgggccactaactcaaggtggacatccaccaggatcacaggtgccttctaattctgtattgccaccgggctctattccgccccttcgaccaccaaatcaaggtcgacatccaccaggatcacaggtgcctcctaatactggattgccaccgggctctattccgcctcttggatcaccgaatcaaattggacatccaccaggatcacagaagcctcctaattctggaatatatcccccatccacgggctcgattccgccatctgggccactaactcaaggtggacatccaccaggatcactgttgcctcctaatactggattgccaccgggctctattccgccccttcgaccaccaaatcaaggtcgacatccaccaggatcacaggtgcctcctaattctgtattgccaccgggctctattccgcctcttggatcaccgattcaaattggacgtccagtaggatcacagaagcctgctagttccaaaatacgtcctccaccaccttctgaacctcaaaacccggacaatgtgcccaagcagccagttaaaaatccacctgcaggaggaaacttaaatgtaaatgacatacgcatcgaccgtcccaattaa

SEQ ID NO: 39414 - protein, 1047 aa, DROSOPHILA
MEFSFDRIRSGESYTPFHFPYVPDNFPTPSAPAPPPKPRPPPPPPPPPTTTRPPTTTPTPTTTPTPITTPPPPPPSAPPPPDPATPGVWYPLPIYGNAPQFGDPPGSHLLSNSGKPHPPGSQMPPNSGFVLPPAICSPPYGPPNQDGNPPGSQTPPNSELVPPPAIWNPAYEPPNQIGHPPESQAPTNSGFVPPPAIWNPPYGPPNPDGNPPESQTPPNSGFVPPPAIWSPSVGPTSEDGHPPESQAPSNSGFVPPLAICYPPFGQQNQIGHQPGSHKPPNSGIYPPSTGWIPPSGSLSQGGHPPGSQLPPNSGLPPGSIPPLRPPNQIGDPPGSQMPSNLGIYPPSMGWIPPSGSLIQGGHPPGSLYPPNSVLAPGSIPPLRPSNQGGHPPGSLLPPNRALFRLLDHQIKLDNHQDHCCLLMWEYIPHPRAGFPPSGPLTQGGHPTGSLLPPNTGLPPGSIPPLRPPNQGGHPPGSQKPPNVGIYPPSTGWIPPFGPLTQGGHPPGSLLPPNTGLPPGSIPPLGSPNQIGHPPGSQKPPNVGIYPPSTGWTPPSGPLTQGGHPPGSLLPPNTGLPPGSIPPLGSPNQIGHPPGSQKPPNVGIYPPSTGWIPPSGPLTQSGHPPGSLLPPNTGLPPGSIPPLRPPNQGSLLPPNTGLPSGSIPPLGSPNQIGHPPGSQKPPNSGIYPPSTGSIPPSGPLTQGGHPPGSLLPSNTGLPSGSIPPLGSPNQIGHPPGSQKPPNSGIYPPSTGWIPPSGPLTQGGHPPGSLLPPNTGLPPGSISPLGSPNQIGHPPGSQKPPNVGIYPPSTGSIPPLRPPNQGGHPPGSQKPPNVGIYPPSTGWIPPSGPLTQGGHPPGSQVPSNSVLPPGSIPPLRPPNQGRHPPGSQVPPNTGLPPGSIPPLGSPNQIGHPPGSQKPPNSGIYPPSTGSIPPSGPLTQGGHPPGSLLPPNTGLPPGSIPPLRPPNQGRHPPGSQVPPNSVLPPGSIPPLGSPIQIGRPVGSQKPASSKIRPPPPSEPQNPDNVPKQPVKNPPAGGNLNVNDIRIDRPN

SEQ ID NO: 39415 - DNA, 3141 bp, DROSOPHILA
aaatatattaagttcctcagttttgttgaactattttatgaattgattaattataaacgccttaatgaaattagtaacagttacgctttcagtccgacaaactttgcaaataagtttaataaaaagcttgaaatggagtgcgcggttttcgaaagattatataattagtatagtttcattcctagctatgaagcgtaaaaacagtttctttttttatattttttttaatgccacatatatttttaaatacatatttttgcttgttgctattttgttacttaactcaatagctgtttttcattggtggcacagttgttttctacctctagattgtttgtattcacctatggcggtgatccggcggatcgtgttttctgatttggggagatatcaggtatactctcacttggtggtgcgggtaatcctggagggtaaagaggcgaattcggggatcccgatgaacgccaatttggttttgcgggcaagggctgaaggacagaattcgaagatccagatggactcaaacttggtggtgccattaattctggacgttggacaagaggatttgaagattccaatgaactccagctaggtggcgctggtagccctggaggtagttgggagggtccaagagatcccaagggtgcctcttgtaatggtggaagttgggcggaaggattcgaagatctacgcgaattccaaactggaggtatgggcatttccggaggatagacaggacgattggcagactccaattgattccaatttggtggtcccggtggtcctgattggggagagggaggaaaagatgatcctggtggactccaacctggttgtatgggcgatgccggaggatgggcgggacgatcagcagatccccatggattctgatctggtgttcccggtagtcctggtagtgaagggggaggaataggtgatcctggtgagctccaacctgccggggcggaacttggaggtttgataggagcatgtggatattctactggacttgagcctggttgctgttgtattcctggcagttggtaggaaggaatcgaagatccaggtgaactccaacctggagaggcatttgtcccgggaagatttggtattcccgatggacccgagcccgttgatcccagtaatcctggaaattgggcgaaagatggtggcgcaaataatcctggatattggtgggaaggaatgggagaggcaggtgggattaagcttggtggggcgggtaaagtgagaagttgaacaaaaggaatttgaaagttgggatggtggaaggatgaaatctgagatcccgtcgaaagttgtgcatataatccatttcctgtttgatatccttgatatcctacccattggctccacggtgggtaccataggtatttattaatttcattttgaggataacaaaggtatcctgagtttggatacttttgggaaaattgggttagtggatgtggggagttacacggatacggttgaagtattttttgggaagttgttctctgcggattttggtacagaccattagaaatgagatttactcgctgcaaaatttcttactggagatatttgtccatcgacttttttgctggcttgcaccactgataataatatgatattgattatccacttccacattttgtgtgggggcttttcaattgccagaactgaaatgattccagaaaatgtatttggttctagacctggcatgtggctcatttaaaagtagaacaaatgcattaccgagaatatatataattaatttgtcatatttgacgaaagactgattagataacatagttacagtgtcattttgttggcatctatcttgcatatatttaagctaagccatgcttgcatgcattttttttctctgtagctttttgtgtgatagatttggatatttataccactgtgcagcgatgttggcaccgtgaagagtttattaaatgccacgacaacagcggctgttctcagccgtcccctacacaaaatcctttgtaaggtaattgctcatttgagttataaacacgcacacagccgctgctggaaccgcagaacccctgggatcctcccagttccccggtccagagatggcaatcggggctgcccagaaagggctgtgccatggattgtgggcaacgtccccgctttgcatgtctaacaattgttcttctaattgcgtttatggccaggcgagagaactggccggacgcagtccacccgaggcctccgatgccttgtaaacgcaatcggacaagataatctcggcatcgcagcgtgcgcaatgatttgccgggaccccaaaaagggcttaccccatggtcatgtccgatcctctccagcttccacttccaccgcatctatgtggcatggcatggatggcatagcatggcatggcatgcgctctagcttgcatttgggtgcaacaaattggcgcaacgcatctgccagacgctgaattgagtcgagttcctcaaattggcactggcgttgggggagaaatgcgttgcatatcgcatttatgggctgcttattaagtggtgcaacaaattgacagcaacaaagagcacctctagagcaccttcaacatcaattacccacagcgattcgcagaagaaaccgaatggcgactgccgaccaacacttcattaaaagtaaataaggtgtccatgagatattgagataagtcggtgaacgagggtgttgttgttctgtctaaagttcttagggttcttgtgattcttcactcttgctctgatcattgaaaacagaaagcttatgaggatttcattgataaatctaaagaatggaatggacttattagttgggtgtgccttgattaatgtgtacttgcacaatttcaaaggattcatatgcccccatatataaaggtagcgcactacagtcacatgctcaactatgaaagccctcgacagatcctaagtcctaaggaataagcagcaaatagttcgtgcaattgccagttatggccgaaagtggaaaaaaaaggcgcgcgtcaaatggtggagtgaaaaaacaaggcgaatagcctgcagatgtggaccgccggttacaataacaatctgccaggaaggaataaagtttggaatggcgatgtggcacata

SEQ ID NO: 39416 - DNA, 276 bp, DROSOPHILA
atggcacagccctttctgggcagccccgattgccatctctggaccggggaactgggaggatcccaggggttctgcggttccagcagcggctgtgattatttgcgccaccatctttcgcccaatttccaggattactgggatcaacgggctcgggtccatcgggaataccaaatcttcccgggacaaatgcctctccaggttggagttcacctggatcttcgattccttcctaccaactgccaggaatacaacagcaaccaggctcaagtccagtag

SEQ ID NO: 39417 - protein, 91 aa, DROSOPHILA
MAQPFLGSPDCHLWTGELGGSQGFCGSSSGCDYLRHHLSPNFQDYWDQRARVHREYQIFPGQMPLQVGVHLDLRFLPTNCQEYNSNQAQVQ

SEQ ID NO: 39418 - DNA, 2378 bp, DROSOPHILA
agaaagtgtgtcagtttggaatcagtgcagcaggcactgtaattggaaatgggaaaaatatattacagattatctgaacttttatggctgccatttattcaatttgtttaataggctcggcatagcaaaagctgcaatgctttgctcacgttgtgcaattttatattatgaacaaatttcttggtaatccaattggtagtgtaagcgaattcgaacggaattactgaatcgactttattggtagggtattatttttgagatgtcaaaataaaacctgattaaattacattcaccttttcatggatttattttattaccgctttgcaaaaacacttacaagtaagtggaatggatgggtaatcatttgcgaaagccaaaatattgactctgacttggtgtaatagaataaccagtttccacacctcttctcccataataaagggcatgtccttggcatatatatgcactttgtagccgatattcaccaaagtgtgggccacaatttacggcgatccggacatttacgaggctcggcttagacacattgtgcagcaaaatgtggccgcaatccagaatccccgtcggaggccagccttttcaattaaaaactggaaataaattgcgaccgcagaggcgtaaataaatattgacatttatgtttagcgaggttccccgaagattgctttgccaataatgtggcacagagattcgtagactataaaaagcctaattaacacctctgtccctccaccgatcttcggatatgccaatcctcctactcctactccagctcctcacatttgaggcattgaaggtgcattaaagagttgccaccacatctttgggttagcggctaatttctgggttaaatgtgggggaaaaaaaacgaaaagaacaccgtcatggctggcaatgaaagcgaaatttttagagtccgccgaaagagtagttctccagtctggcgaaataaaagaacaaaatgggaggaaaataagaaaacatgcgtcgcccggagtcgacattctttttaacaagttgcccgcagagaccagaaaagggcctagagctgcagttggagccagtcaaagtcaagttaaatacgcccgccgtgcgtcgggaagtcgtcgggaatgggggactggtcattttggcatgtccgctgggctctctgggttctctgggcaccgcgagtccaggccagggccaagaaatatcagaagatcaaaggcattttaacagccagcgtccaacgcaaacaatcaacacggcccaaagagccagaagacaaccagaagaccttaaaggccaacatggggatgaggacgaggagcaggaggatgaggatgagggtcagcggagcggtaacgtgccggcttaaggcccaaaacctgtgcacttagttggaggacacgtacaggataaattagcaaatatttgtttctttcttctttttttttttgtagctctgcagatgtttgcctagctggagattttatttcttatttaagcaaaaattgcatttaaattgtttcgtgctcggccaaaggtcggcaatgtaaccttgacatttccagccgatcatcgctggacatttctccccttggcagcaaatagagtccgccaatgaggccatcgataatgtctcaattatgtcaatgcgacaccagtgaccagctggaccaacttggcctcctcttaggtgccatctcttaacaaatcgaaacgtatcgacttgatctcattgggagcatgtgcataaacaaaacagtacaccagcacaccataaacaaggggactagaccaaactgaaaaagaaaagaaaaataaataaatacaaaaaaggggggataagccttataaaaacaatacatcaggcatacggtgcgtagtggctgtagctactacaaataagtcggcgtctccagttcagttcccccattgtgttgccactgggcaataaagagatttagtagctcgtaccatccagccatctagcctcctgctgctccagctcctccagaattcctcatcctttccctggccagccgggcatgtccttctgagcggtcaatgcttccagctggaccactgccatcgccaccgcttgatttgcatgcttaacctttaagctcgtgcggcatattaatcttatcagaaacttgtcaacagtcagctaaagtcaatcggatcgagccgcatccctgctgacaagatatatacattgttctcggacatcgcttgtaatgtctcactcgcctggtcgcatatatatcaatatattgtaccattgaggtgaagatctgcgaaataaagggataagatggagattttgtttaaagctcttatttttcacatgcccatgcgaaaaacctaccttc

SEQ ID NO: 39419 - DNA, 378 bp, DROSOPHILA
atgcgtcgcccggagtcgacattctttttaacaagttgcccgcagagaccagaaaagggcctagagctgcagttggagccagtcaaagtcaagttaaatacgcccgccgtgcgtcgggaagtcgtcgggaatgggggactggtcattttggcatgtccgctgggctctctgggttctctgggcaccgcgagtccaggccagggccaagaaatatcagaagatcaaaggcattttaacagccagcgtccaacgcaaacaatcaacacggcccaaagagccagaagacaaccagaagaccttaaaggccaacatggggatgaggacgaggagcaggaggatgaggatgagggtcagcggagcggtaacgtgccggcttaa

SEQ ID NO: 39420 - protein, 125 aa, DROSOPHILA
MRRPESTFFLTSCPQRPEKGLELQLEPVKVKLNTPAVRREVVGNGGLVILACPLGSLGSLGTASPGQGQEISEDQRHFNSQRPTQTINTAQRARRQPEDLKGQHGDEDEEQEDEDEGQRSGNVPA

SEQ ID NO: 39421 - DNA, 2321 bp, DROSOPHILA
tcatacatcactttcctcagtgtatgcaactgcatctgagcgggcagcgaaacgagttgaaagccgttttccctgtttgccagccagctcttgaaagtggtttgttgtctaactgcgttagttgctgctttaaattgtgcgcccaagcagctccagcggcgtttaatggctccaactggcgaccggagacctcggctttaactggccaccccgccaccgacttctgtttctgtttctgattccgaatcggattctttttgttgctgcagcgggttctcaggcggcgttggctaaatgtcatagcggcggatgcaccgagcagattaatcattaatcacatgcccatctgagagtacgagacttccaatatgcggaaattactggcagctagctgtagtatccatatgccccattcccaccatccccatcacctggtggccgatcatttccgccgacgagttgggttcctttattttgcctttattttgacactgggccagcaacggcaattactggcggcggtgccaccgaaaaccctcctcccttccgccctgatttatgagtttttaatgagcggccactttacacgaattcaagttaacaagtggagccgcgtaagaggccaatatcgcaagtagtatcgccggcaatcgcgccttgacattcgagtcgtgcgaaatgtcagatgaagatgcaccaatgatacgctcaatgggcgttggaatgcacaataccctaactaaatctgaaagaatatgtccagtcaaggggagtgtacaattttatttccattttctctaacgcttttcaaattaatcatttagggctgccacatcgaaagggttgccaaagcatgtcgatacctacagttatcgaaactgaaaaataatatctcggtgtgtaaacacttgacaaaacgtgacaattggctacgcgcgtcgaaaaaagaaaaatagattacattgaaataaatcccacgatatctaaaaccaaacggaagatgcccagctccactttgacgtcctctactgctcttccggtgaagcaacgaaatggatttgatcttggactcgaaccgttgcggatcttaggagcctgcaactggtccggtaagctgacctttttgatgcagtggaagggttgcgacgaagccggcctggtgcccgccgaagtgctcaacgttcggtgcccccaaatggtcatctcgttctacgaggagcgtattgtgttcacggatgagggcgatgaagaagacttggagtcggacaatgggtatgagaccactccgagtcccaggaagaaacgatcacgaaatgcctagtccataaaactattgtgcaccgaagacattgcggtgcaatgtcaataaagagtattgactcttctgccacgagtttttcttcattttctggtcgccgttgtcgctggtgattgattatgcattttcatgcgaactggttgctgatgctgcactttgttggcatgcgggcaggtgaataagtgagtttagctcggcccagccacgccctccgcctcctagacgcagcttgatgttggagacaggccggcggcattatctgccgggcgcgaaattatacgtgtatgtatacaccgagcgaaaagtctgtaggggtatttgaaagttcataaaaaaaacagttcataaatggtgcacttgcctcattaaactttttccagtgcacttaatgctgtcagtgaccttcacatcggggcgttggaaaacctgcaattagaaaagaaggttaagccgcaggatcagactcagctctcagattccatgttgcaggcgcctcaagattcacgcagtcaactaatacgtacataaaaaaaagggttaaattggtggcgcacctttcttgcagcgacattttgacattgaaaaagtataattaattgaggggcccaccagcaggtgggcgtggccaggggcagattaaatcgatttatgcaagatttatggcaaaagcgcacaagaaagagaagaagcgaaataaaatggggcgccgcctggcatttcgaaatcaatcaaagcccaattgccactcacatgcaaagtgcacgaattaacttgaaaaattcccaactactggatgcaatcgacatcgatgacgcgtcagcatccggtcgcaatctttttgggtgtgttcacactagccctctacgcttttcagctgatgcgcgctgcacaaagtgtttgctttgcgagaaacccatttttcaagctatcagcatttatttttaataaagatgccatcattaattttacgtctgtgtgttttggtgtagaatgctgttttttt

SEQ ID NO: 39422 - DNA, 321 bp, DROSOPHILA
atgcccagctccactttgacgtcctctactgctcttccggtgaagcaacgaaatggatttgatcttggactcgaaccgttgcggatcttaggagcctgcaactggtccggtaagctgacctttttgatgcagtggaagggttgcgacgaagccggcctggtgcccgccgaagtgctcaacgttcggtgcccccaaatggtcatctcgttctacgaggagcgtattgtgttcacggatgagggcgatgaagaagacttggagtcggacaatgggtatgagaccactccgagtcccaggaagaaacgatcacgaaatgcctag

SEQ ID NO: 39423 - protein, 106 aa, DROSOPHILA
MPSSTLTSSTALPVKQRNGFDLGLEPLRILGACNWSGKLTFLMQWKGCDEAGLVPAEVLNVRCPQMVISFYEERIVFTDEGDEEDLESDNGYETTPSPRKKRSRNA

SEQ ID NO: 39424 - DNA, 18337 bp, DROSOPHILA
tcctactattccatccagccgaattgccgctccattggctacgaccgtctgcgatattgaattctcaatgcgctgcgcgctattggagcagaaagttttgatcgccagctcatcctaagccagtcttccggctgagttgagctttggatttggatccagacccagggaatgcggctgagctgagctgggcttagctgaaaggttagatgggttgccgactgccggcttatgcaattcgagaattcttgtgaatgtattaaacttaatgccgatatggcggctacttattcaaaaaggtcttgtaggtagattattctataggaatattattactatggctgaggcttgcccattattagttttttttttcagttttgtatggaatatatatgttacatatttaaagatgtgctgcagtgcttacaccttctgtattcttcagagtatagaagaaaagaaagaatttaagaattcctcaataaagagatgtatttcacttgaaaattccaaacgaaaatggttcgttccattaacattgaccacacagccaattggcatgcaaagcgtatgcaactggtgcatcctgtgctgtgacattgcaaccagtggctgccacgccgctgaaacgacactgaaatgtcatgcgtaacatgcaaatctcggatgcattcactgcagttctagctacagcagtgaatccaactccaagtgcggctgcaaagcgagcaaagcgcattgaagcggcaaaatgcgtagagctctagaatgaggctgagattgctgtctgtccgactgtcggtggggggtaactacacttggagaagcaatagagccagaaatgtaggatttgataggataaaacaaatcttaaatatgtatatagaatcataacttggaaaaacatactttggatttaaaaactaggtttccaaatactaaacgttttttccctaaacatttcattataaagcccctagtgatcaaactttcacttgagtgtatgctcggaggtggagataaatggtctgcgttcggattttaattacttgtcatttgttgcgtggcacattcgattaatcaaagctccgctctccttcccccgtagacattgacgaatgccaagatcccgcgatagcagcgcgatgcgtggagaacgccgagtgctgcaacctgccggcgcacttcctctgcaagtgcaaggatggatacgagggcgacggcgaagttctgtgcacggatgtggacgagtgtcgcaatccggagaactgcggtcccaacgctctgtgcaccaacacgccgggcaattacacatgctcctgcccggacggctatgtgggcaacaatccgtatcgggagggatgccaggatgtggacgagtgctcgtacccgaatgtctgcggacccggtgccatatgtacgaatctcgagggcagttatcgctgcgactgcccgccgggatacgacggcgatggacgctcggagtccggttgcgtggatcaggatgagtgcgcacggacgccctgcggccggaacgcggattgtttgaacacggacggcagcttccgctgcttgtgtccggacggctacagtggtgatcccatgaacggctgcgagggtaagtggagtagctagagattatgcaaattaatataagctcattgttccattttggttattttttgcacttttgttttttgaacttgaattggcggcaccttcaacatacgaacaaacacctacacacacataattattattactataatcgtacattaatgcaccgcaacatgcaacattaatacaacaattaatgcctaacgccggcagatgtcgatgaatgcgccactaacaatccatgcggtttgggtgctgaatgcgtgaacctgggcggtagcttccagtgccgctgtccctccggctttgtgttggagcacgatccgcacgcggatcagttgccccagccgctgaacacccaacaattgggctacgggccgggggcgacggacattgcgccctatcaaaggacctccggcgccggtctggcatgcctggacatcgatgagtgcaatcagccggatggagtggccaagtgcggcaccaatgccaagtgcattaactttcccggctcataccgctgcctgtgtccgagtggattccaaggacagggctatttgcactgcgagagttagtatcctgcctgctttttgcctttgcctgggttctataaacagtgctttaaaatttcgagaaaataggatcctgttaagcaggccatatattttaaagacagtaacttagtttttgaaatggtaatattaacatatattccttgaacgattttattaaattcctatctaaaacgtatcttaagttcatgcaaatcctgctgtttatagagcccatgcgtttgagtagtttacaatgatggcaaatccccaagtttcttaaagtacctttgccatccttgtttcttgcttccttccctgctttccaccacctagctgttttgcaagcttccagcttggcttatttgcttttccagcagatgcatgcttttcagacagcttccttttgtattcccgtagtcccatctttcagtactcgtctctatatctgtgaaccccgcccgatcccgctcccccacttcacgctgtgctccctcgcctatcattcgattttgtattgttttgcatactaattaaattaattataatatatttaactcacccccaaaaacccgcaaacgaacacgcgcgcccctactccaatcaaccatcacccctgtccctgcaccaactggaaatcgcgtagacatcaacgagtgtcaggataatccgtgtggggagaatgcgatctgtacggacaccgttggcagcttcgtgtgcacatgcaaaccggactataccggtgatccgttccgcggatgtgtggatatcgatgagtgtaccgcgttggataagccctgtggacagcatgcggtatgcgaaaataccgttcctggctacaattgcaagtgcccgcagggatatgatggcaaacccgatcccaaggtggcctgcgaacaggtggatgtcaatatactgtgcagcagtaacttcgattgtaccaacaatgcggagtgcattgagaatcagtgcttctgcttggatggattcgaaccgattggatccagttgtgtggacatcgatgagtgtcgcacccatgccgaggtgtgtggtccccatgcccagtgcctgaatacgcccggatcgtacggctgtgaatgcgaggcgggatatgtgggtagtccgccaagaatggcgtgcaagcagccatgcgaggatgttcgctgtggagcccacgcctactgcaaaccggaccagaatgaagcctactgtgtgtgcgaggatggatggacctacaacccgagcgatgtcgctgcgggctgtgtggacatcgatgagtgcgatgtgatgcatggacctttcggaagctgtggccaaaatgccacgtgtacaaacagtgccggaggatttacatgtgcctgcccacctggattctcgggagatccgcactctaaatgcgtcgatgtggatgagtgccgaaccggagccagcaagtgtggagctggagctgaatgtgtgaacgtacccggtggtggatacacctgtcgttgccccgggaacaccattgccgatccggatcctagtgtgaggtgtgtgcccattgtcagctgctccgctaacgaagactgcccgggtaactccatatgtgatgctacaaagcgctgcctgtgtccggaaccgaatattggtaatgactgccgtcatccgtgcgaagccctcaactgtggagcacatgcccagtgcatgctggccaatggacaggctcagtgcctgtgtgctcccggatacacaggaaactctgcccttgcaggaggctgtaatgacatcgatgaatgtcgcgccaatccctgcgccgagaaggcaatctgttcgaatacagccggagggtatctatgtcagtgtccaggaggatccagtggagatccataccgcgaggggtgtattacctcaaagacggtgggctgctctgatgccaatccttgcgcgactggcgagacttgcgtccaagactcatacacgggcaatagcgtatgcatttgtcgacagggctatgagcgaaattccgagaacggacagtgccaggatgtggatgaatgctcggtgcaaagaggaaagcccgcttgtggactaaatgctctctgtaagaatttgcctggcagctacgagtgccgctgcccacagggtcataacggaaatcccttcatcatgtgcgagatctgcaatacgcctgagtgccagtgtcagtcaccgtacaagcttgttggaaatagttgtgttctctccggttgctccagtggacaggcctgtcccagcggagctgagtgcatctccattgctggaggtgttagctactgtgcctgtcccaagggttaccaaacccaaccggatggaagctgtgtggatgtcgacgagtgcgaagaacggggcgcgcaattgtgtgcttttggcgctcagtgcgtgaacaagcctggaagctatagttgccactgtcccgagggttaccagggagatgcctacaacggattatgtgcactcgcacaaaggaaatgcgctgccgatagggagtgcgctgccaacgaaaaatgcatccagccaggagagtgtgtttgcccgcctccttatttcttggacccgcaggacaacaacaagtgcaagagcccttgcgaacgcttcccatgtggcattaacgctaagtgtacgccctcggatcctccacagtgcatgtgcgaggctggattcaagggagatccactgctgggatgtacagatgaagacgagtgctcccatctcccatgtgcctatggagcctactgtgtaaacaaaaagggcggataccagtgcgtgtgccccaaggattataccggagatccgtacaagagtggatgcatcttcgagagcggcacgccgaagagcaagtgtctgagcaacgatgattgcgcaagtaatctagcctgcttggaaggtagctgcgtaagtccatgcagcagtcttctgtgtggatcgaatgcctactgtgagacagagcaacatgctggctggtgtcgctgtcgtgtgggatacgttaaaaatggcgatggggactgcgtgtctcagtgccaggacgtgatctgcggcgatggtgctctatgcattccaaccagtgagggacccacctgtaagtgcccgcaaggacagctcggcaatcccttccccggcggcagctgcagcacggatcagtgttcagccgccaggccttgtggcgagcggcagatttgcatcaatggaagatgcaaggagcgctgcgagggtgtggtctgtggcatcggagccacctgcgatagaaacaatggaaagtgcatctgcgagccgaactttgtgggtaatcccgacttgatctgtatgccacccatcgagcaggccaagtgctctccaggatgtggagagaacgctcactgcgagtacggattgggtcagagccgatgcgcctgtaacccgggaaccttcggtaatccctatgaaggctgtggagcacaaagcaagaacgtctgtcagccgaatagctgtggacccaatgccgaatgccgtgctgtgggcaaccacatatcctgtctttgcccacagggcttcagtggtaatccctacattggctgccaggatgtggatgagtgtgccaacaaaccatgtggtctgaatgctgcctgtttgaatagagccggaggattcgagtgcttgtgtctttcgggacacgccggaaatccctacagtagttgtcaacccatcgagagcaagttctgccaagatgcgaacaagtgccagtgcaacgaacgagtggagtgtccggaaggctacagttgccaaaagggacagtgcaagaacctctgttcccaggcttcgtgtggcccaagggccatctgcgatgccggtaattgcatctgccccatgggctacattggagatccccacgaccaagtgcacggttgcagcattcgcggtcagtgtggcaatgatgcggactgcctgcactctgagatctgtttccagttaggcaagggtctgcgcaaatgtgtggacgcatgctccaagattcagtgtggacccaatgccctctgcgtgtccgaggatcatcgatcttcctgtatatgctctgacggattcttcggaaatccaagcaacctacaggtgggatgccagccggaaagaacagttcccgaggaagaggataaatgtaaatcggatcaggactgtagtcgaggatacggttgtcaggccagcgttaacggcatcaaggagtgcattaatctctgctccaatgttgtctgcggacccaacgagctgtgcaagatcaacccagctgggcatgcgatttgtaattgcgccgagagctatgtctggaacccagtggtctcttcctgcgaaaagccttcactgccagactgcaccagtgacgctaattgcccggatgcttctgcctgtcgtcctgatgtcttgggagtccttaagtgcgtcgccatctgtgatgccttcacgtgcccggccaactcggtttgcgtagcccgtcagcaccagggacgatgtgattgtctcaacgggtttgtgggtaaccccaacgataggaacggctgtcagccggcacagaaacatcactgcagaaaccatgcagagtgccaggagtcggaagcctgtattaaggatgaatctacccagactctcggatgtcgtccagcttgtgatacggtgaaatgtggaccccgagccgtttgcgtcaccaacaatcatcaggcgcagtgtcagtgtccacctggacctttcgccggagatccatacgatccatttaatggctgccagagtgttccttgtgtttacaaccatgactgcccacccagccagatgtgcaaccgtatgacacacacatgcttcgatgtgtgcgacgaggagtcctgcggtgacaatgccatctgtttggctgaggatcatcgagccgtctgccagtgtccacctggatttaagggagatccgttacccgaagtggcctgcaccaagcaaggcggttgtgccgctggaacttgccacccctcagcaatatgcgaggtcactccggaaggtcctgtctgcaagtgtcctccgctatttgtgggcgacgcgaagtcaggtggctgtcggccagatggtcagtgcccgaatggagacgccgattgcccagccaataccatctgcgccggaggagtatgccaaaatccctgcgacaacgcttgcggatcgaatgctgagtgcaaggttatcaataggaaacccgtctgcagttgtcccctgcgattccagcctatctctgacactgccaaggatggatgtgcccggaccatatctaaatgtctcactgatgtcgactgcggaggagcgctgtgctacaatggacaatgtcgtattgcttgcaggaacagccaagattgctctgatggcgagagctgcttgaagaacgtctgtgtggttgcctgtctggatcacagtcagtgcgctagtggactggcctgtgtcgagggccactgcaccatcggatgtcgcagcaacaaggagtgcaagcaggatcagtcttgcattgagaacaagtgcctgaatccctgccagtctgccaacagttgtggtccaaatgccctgtgcagcattgatcagcaccatagccagtgcagctgcccggaaggtttcgagggcaaccccactccagaacagggatgcgtgcgagttccggctccctgcttagccagtaatcaatgtcccagcggacacatgtgcattggaaatcagtgtaatcttccctgcaccaaaacagcttcctgtgcagttggagaacggtgctatcaacaagtctgccgcaaggtgtgctataccagcaacaactgtttggccggagagatctgtaattcggacaggacgtgccaaccaggatgtgattcagatgccgattgtccacccaccgaattgtgtttgacaggaaagtgcaagtgcgccaccggatttataggaacacctttcggttgctcggatattgatgaatgcacggaacaaccctgccatgccagtgctcgatgtgagaacctcccgggaacctatcgttgtgtatgccccgaaggtactgtcggcgatgggtactcccagccgggttgttcgcagcccaggcaatgccacaaaccagacgactgtgccaataatctggcctgtatacatggaaagtgcacggatccctgcctacatactgtttgtggtattaatgccaattgccagtcggaaggacacgaagctctgtgcagctgtccagctggattcttgggagaccccaacgacactggagtcggatgctttaaggtggagtgcatcgaccatgtggattgcgccggagatcgtgcctgcgatgcggaaaccaatcgatgtattaaaccatgtgacctgaccagttgtggaaagggcaattgccaggtgagggatcataaggcgacatgtgcctgctacgaaggatatcaattagtgaacgatgtatgtgaggacattaacgagtgtctgtcgcagccatgccacagcacagctttttgcaacaaccttccgggaagctacagttgccagtgcccggagggattgatcggagatcccctgcaggccggttgtcgggatcccaatgagtgtttgagtgatgcggattgtcctgcctcagctagttgccagaattcccgatgccgtagcccttgcgagcgacaaaatgcttgtggattaaatgctaactgccaggcacaggcccatcaagccatttgcacttgccctctcaattcccgtggagatccaaccatcgagtgcgtgcacattgagtgcgccgacaacgacgattgctccggggagaaagcatgtttggactcgaagtgcatagatccatgttctctgcccaacgcctgtggagctttggctcgctgctcggtgcagaaccacatcggcgtctgctcctgcgaagcgggcagtaccggagatgccaaattgggctgtgtgcaactgcaatattgccagcaggacggacaatgtgcccagggaagcatatgctcccatggaatttgcagtccgctgtgcagcaccaaccgcgattgtatttcggaacagttgtgcttgcagggcgtctgtcagggaacctgcaagtcaaactcaagctgtccccaattccaattctgttcgaataacatttgcaccaaggagctggagtgccgatccgatagcgaatgtggcgaagacgaaacctgtctgagtgatgcctatgggcgtgcaaagtgtgaatccgtttgtcttggtcgcgctgcctgtggtaggaatgcagaatgtgtagcccgttcccatgctcccgattgcctctgcaaggagggattcttcggggacgccaagtctggatgccgaaagatcgagtgcaccagcgacgatgactgctccaatgacaagagctgtgacaaccacatgtgcaagattgcctgcctaattggacagccgtgcggagagaatgccctctgcaccacagaacaccaccagcaggtttgccactgccagccaggattctctggagatccgcgggttcgttgcgatgttatagacttttgccgggatgctccgtgcggacccggagcccgttgccgaaacgcgagggggtcgtacaagtgcacctgtccaccgggactcgttggtgatccgtacaacgagggctgtcgcagctccgttgagtgcgagaccaacgaggactgtcccccgcatgccgcatgcaccaaaaccaatggggtggccaagtgccgcgatgtctgtgcccagctgcaatgtggccccaatgcggaatgtgttccgaagggccacgtggcgcagtgtgcatgccgcagcggctacgatggccaacccgccgaccgggtggccggctgtaagccgctgccctctccctgtcaggtcaccggcgactgtccgaccaacacatactgctcggatagcgtctgcaaacgtaagtattaacaccaccccagcaccgggtctaaaccgactaccagacaacgtgaattggctaatcaaccttgtaacaaccttttagtactcaaaaactagcactgatttacttacctaagattttatggcactaaacaggagcttaacctttaaacaataataaaataaggatcctaatgaagctatataatagttcgagaagctcacattggaagcccaagtttcaatacttgctagtttacaacttgtgatataatatctcaaaaaatctccctctagtttatatttactgaagttctttttataaggaactaaaaagactgtattagatagcattagctctactactacaacgcaacctttgactggcttacgaacttaacctgttactcttttatatctaagactaacgcaaactaaaatgaatatacaacaagttacacatttgactacacgccacgaacaaatctagaccgcaacgccaaccgggataaatgctctgatctttcttgagttattaatttatcatccttcatccaaacagctgcctgtgttctggacaccgaatgtggagcatttgaagtgtgtcaaggtggccaatgcttcaatccgtgccttcaacctcaagcttgtggccagaatgccgagtgcgtgatgcagaatcatctgaaacagtgccattgcccggagggcttcaccggcgactcagcgaaggagtgcgtgcgtgtgccagtggcctgtgatggcgagtgtggtccaggatatacctgccgcgactccatgtgcctgcctgtttgccacaacgatctggagtgcgcctccaacgaaaagtgcctgaagggcagctgtatgcgtaagtagtctagccatatatcacaattcatggaggaatattatgagagtaggcaccaataaaccgattcagacatcgatttaatattgtgccaactttcttgttcttcagtcccaccaatctaataacaatcattcttttctagtgacctgtcgggtggacaacgattgcttcctgggtcacgtttgcctgcacaacaagtgcgtgtatggctgccatgtggacgatgactgcagtgcgtcagagtcttgtcgcaacgataagtgcgtaaacccctgtctggaaaatccctgtggtcccaatgccgcctgttcggtgtccaaccaccgggctagctgcagttgtttggagagtatggtgcccaatcccacaccccaggtgggctgcgtccgttctccccccttggaatgccgcgagaatcgcgactgtggaaatggattggcttgcttcgagtcggtatgtcgaccactatgcgccgacgatgctggctgcttgaccaacgagcgatgccagcagggagtttgcaaacccctgtgccgccacgacaatgagtgcggtcatggagagctctgtctgggcctgaactgcgtacctggatgccggtccgatcagggctgcccgccggaattgtcctgcgtgggtcagcagtgcgtggatccatgtgcagatcccactgcctgcggcaccaatgcccactgtcaaacgatcgatcacaggaaacagtgcctatgtccagagggtcttgatggcaatgccaatgtggcctgcaaggtgcctcgcattgcttgtggcaggaacgaggattgccagtcgaatcagctatgctatgccggcagctgccaaggaaagtgcagaaacgaccagaactgcttggccgatgagcgttgcatgagaggaacatgtagaaccgtatgcaacaccgatgaggcatgtgctcagggacagatttgcgagaatcgaatgtgccagactggatgtcgtaccgatttgagttgtgccaccgacgaggcctgcgtgaacaagaagtgccagaatccatgtcgtacacccggccaatgtggccagtgtgccgactgccttgtggtcaaccatggagtccagtgccagtgtcccgccgcctttatgggagacggtttgacaggctgtcaacttccgccggaacgctgtcatcctgactgtgaatgcgacgaaaatggagcctactgtgcccccaagtgctcgagaaccgaggattgcgcctgtggacaacagtgcgccagaggaaagtgccggaataagtgcggacccaagcgccagtgtacggtgggtcagctttgcgagagaggcgcatgcattgccgggtgcaagtccaacggtgattgtgccgccgaccagagttgtgtcaatggaaagtgctccgatccgtgtgcgaacgagaaggcttgcggacggaatgctctttgcactgtgtccgagcaccggatgctctgctactgcccggatggatatgaaggcgagcccagcaaggagtgcgtgcagttcgagtgccgtgtggacaccgattgcgacagcaataagcgctgcgatcaaggaaagtgccgcaatccttgcctggagtatggagcttgtggaacgaatgctcagtgtcgagttgtcggtcgcaaggcccaatgttcatgtccgccggacttctttggcaatccgactagtgagtgccgaccgctggaaggtggatgctctagcaaaccctgcggtgagaactccaagtgtactgaagtgcccggaggctatgaatgcgcttgcatggacggctgcattggagatgcccaccagggatgcctttgcggcggacctctagtgaatgcctgtcgcgatcaaccgtgcggtctgaatgccgcctgccacgtattggaaaacaatcaagccgagtgctactgcccggaggacttccccaatggtgatgcttatgtacaatgtaagtgtggttgataactgaggatatatggattgaattaataattatcattttaataaaggttacttgactacgccgaagcaggattgtcgtacccttggatgcgaagtcggcggctgtgtacgccagggctatgaatacgtttgccagcagggtaagtgcccagtttatgttcaggttatgagtgttttagaccataccgtaccgttaatgctaatcacgttaaccagcgttcttaaaagttatcgttattgtaatcagtaagcgttatatcgttgaagtttttacccttaccaatataactggaagtttgttagtaactgattgacattgactttatattgttataatattcttggtttaatcacatagttttgagttgtttaaacacaaaaacttaaaccagctaattagctaattccactaatctatcggccctggcggctgattagaacatttgcccaaaaccaatcggatttcagtgtagtgtgtgtttaaaaatataaatgctaatatattttgagttttttcttaacaacttatacacatgtgcgaagtttcaggtattagtctaatatcgacattcccagcacgtacaaaaaacacgctaagaaaccaaaaagtcaaaaaccacctacacaaccaactcccaataggcaaccatgttgctttttaagcaacagacatgccgaagaatatattacagtgcacagttcttatttgcaattttgttttatttttatttgagttttactagtttttaagcactttagtttaaaataccatcaacgcatatggagattcgtgaaatgttgctgtcgctatcgcggttacccaatctgtgcctacaattcatttttgaaacacacattacttaaagaaatacgcaacaaaattaagtttagtcataagcaagttaaaattaccttactaaaattacatacacaatcagtgcattccctaaaaaaaaatatcaagaattgatcttagttcccatttaacttgaagcttgccatctcatttcattcggctttcataaagctaagttctcattgaaatctatccttagttaccatacaattggctttcaataaccatctgtattgggacttaactatgcggcattcattaaaatttggaaacagttaacgcacagaacagtaatcaagttaattcatccctatttaacatttagtctaatgacaaatgccgcgatagcgatatgtagtctataaaatttgtagtgaaaattgaaacaactggttaatcaggaaatgtgcaaagaaggcacaccatttagaactaaacaaaaattaaaaaaaaaaaatatataaaccaaaaaagaaaacaacacataatgccacgcttatcatatagacaacaatcctcaacacatccttgatactgaaaacaaaaaaatgaacgaaatcctgacccgaaaaatcccatccttactccgattccgctctgtccaccccttttgaacctcaaatgatattttcctatcgctctgtcgtatccttttgctaatgcccttttgtcacatttcttaaatgaacaaagtctcagattgggaactgtggacgggacaattctcacacatagttcacatatgcttgaaacaatttgaaaccaattgaggaacatagttatcaagttaagatccattacaactgtgtacagaacgattaccaaaacaaaagcaacatcaacagctactactacttttcaatgcatccttaaagcaagtctactgaataaccgaaattaaaccaaccgtttattatgtaaaaagctccttctaaaatacgtattaagaaagctcctccctatctaccactctctgcatagatcgtctattggttaaaatctatataaacaacaacccgaattgatataaattgtaactaaatttaactaacatttcaattatattttggtacgtttgactagtgattaagttgtatatacagcaagttgtacatacctgtacatatattcgtaatcgaataggtcgcaccttggtggccaatcaaactaacctcaccgaatacaatctgtaaatataaaccaaatttgaaaactgtgaattatgaataacccgaataaatttagtttgacacgtatacttctaacgaacttttcaaaattgtatttacccatcgattttcaactactacttacttttcaagttcctactaaagcacccttctctacaatgctaaacttgctattgccagacttgtacctacacttcctgctcttccaatagatctttctatatctcaactctgaatcaatcactcacactcacaaatccaatcgccaataacgtgtctctcgtgagggcagagcgcatgtgttggatgtcgtgtaatttttgccattattcaaactgaacaaacaataaaccaaaatatatattagctcgaattcgcattaatcccgagataattcattgctcaactaagcctgcctttagtacagcatcaaattaatttgggcgaattgggaaagtgacaggctctatgctcgctcgcaaaatggtaaatcatcaagaattgtaactatgctcacccgatttttactgctacccccccactcgctcacttgtacgctgatcgataacctcgatcgaactcatacctatacctatacctaccaatgacaaaaactaaaagcagccaatttttattgataagcattgttttggcctgcctatagaaacatacaaccctagttattgtgagatgttcccttcacagttctgcaatttgattaagacaaaccaaataataatcagccttcgctatagttgtctgcctaaactaactgcaccaattgactaaagttagccatttaagcgaaactttataaactttttagtttcctcagttttattttctttcagttaacttatgatttctgatcgcaccgtcccctttatttttaactcgtttaaaatccccgctgaatttttcacttactttaacaaaccccatgcacaaaacccgcaaccccaaatcgagtccacaacaatcccacttacacttaattgaacacagaagccgaccaacagcaacacacacaacccaacccaaaaacacccaaaaaaaaatgaaacacacaacactcaagcaacaaaggcccaatcccaaatcaaccattataaaaaagaactgaaaaatactttttatatattttgtcgtttaagttttctccttttgtttttagaaacgtttagccttaagtcttatccgagtcacctatacttcatgtttccaaaattttgtgtttacactctctaatgcaatatcccaacgagccctgaatctgaatcttccaccagactatatagactataggctttgtccatcaagctcaagtccaaactttgactcgacgatttcaatgtcgcactttcgtttctatgtgtttccatacccacaaaaagatatatctatttagtagcgtactgtaccgtttatgccaccgaatagttgaatgcacccaccaacgattaacatttaaacaaccaaacaactcctgtctatctctctctcgttcttccctgccctggatataatgttatagacaccgaacaatgctactcagatacggattgtcccagtgaaaagtcatgcctccaaggacactgcagcgatccttgtacaatgcgtggcgtgtgtggtttgaatgctctctgcaaaaccgtactgcatcgaccgcgctgctcctgccccagttgccacatcggtcggccagagatcgagtgtaagtctgatcccaagtgcgtggccgaggacacggatccaaagaccaaggagcagatcccatgctccacagactccgagtgtccagagacattgcagtgcggccagtacggccaatgcacagatccgtgcaacaatccgctcttcatctgcgagagcaacaagaagtgcgagacgcgacgccaccagcccgtttgtatctgcaaatcgggcttcatagtgaatgagtacggagaactgacgtgcgccccggacaagcgggagtgctatcgcgacgatgactgcgcctcgaacatggcctgctccgatggcaagtgccgcaatccctgcatcgtgcccctgggccgagccgcaatctgtgccgagaacaagtcctgcgaggtgcagaaccacaagccagtctgcatttgcatgcgcgactgccagccatccatatcgatttgcctgcgcgacgccggctgtccggctagccaggcttgccggaagctcaagtgcgtcgatccgtgcgagtttgccacatgcgcacccaactcgccatgcattgtcgaggatcacaagccgatatgtaaattctgcccagctggatttatagccgatgccaagaatggatgtcaaaaaggtaaagcaccaaaagtactctctgtcactcagctctctgtcgagtgaaagtgtcttacgtttccgtctcgaatatctctgtttcctgctctttctcacacacgctctcaccttttgctagctctgtcttattgtctgtccccttacaaaaaaaaaaaaaacataaatatatcagcgataaagcacacaagcccatttgcccgacgaaatgtattgaccaaagccccgtactcctgattagtcctttgggccttgtcaatctgtttcctcgcaaggtttgtggaagtgtacataggtctgagaaattaacagcctgtagccgtatcaagctttcgcctattgatatggtcaactatccttcccaaagcttagttacaagccaagttcaagtcctgcgacttcttaaccttatggttagatgctttacgcttaacgctacaagcaaagagactgggctaaagcacttaaatgaaaagagttgtccaaacattgatcggaatgatcgtttgaagccaccaaaaataccaataacatgaagacacaattacaagaaaactcttcagaacattcacacacgctcatgctcacagttataataatcaatttattaatcaaatgcctcttgaatatttgtactatgaaattttaacctatgattctaaataaacggtaaagagatttaatactaattaataccaatccaacaccaaaatgtagctaactaataataaaggcgttcgttcctaatttgaaattgattaaccgtataatagtttatgaagcttccgatatttgtttacagttgcagtcgtacgcaagagagttagatccacacatccaaaagtatatccctaggtacacccttctgtatatatatagtgcaccttccttattgttgtagctttacactttctatcctatatttggtatatatttgtaaatattttaacgtatttttttatttcttaaatcttacacttttattttgaaatatgtacaaaatactccgctcgtatatcccaaaattatgtaaaaaaaaaaaaaatcc

SEQ ID NO: 39425 - DNA, 11043 bp, DROSOPHILA
atgctcggagacattgacgaatgccaagatcccgcgatagcagcgcgatgcgtggagaacgccgagtgctgcaacctgccggcgcacttcctctgcaagtgcaaggatggatacgagggcgacggcgaagttctgtgcacggatgtggacgagtgtcgcaatccggagaactgcggtcccaacgctctgtgcaccaacacgccgggcaattacacatgctcctgcccggacggctatgtgggcaacaatccgtatcgggagggatgccaggatgtggacgagtgctcgtacccgaatgtctgcggacccggtgccatatgtacgaatctcgagggcagttatcgctgcgactgcccgccgggatacgacggcgatggacgctcggagtccggttgcgtggatcaggatgagtgcgcacggacgccctgcggccggaacgcggattgtttgaacacggacggcagcttccgctgcttgtgtccggacggctacagtggtgatcccatgaacggctgcgaggatgtcgatgaatgcgccactaacaatccatgcggtttgggtgctgaatgcgtgaacctgggcggtagcttccagtgccgctgtccctccggctttgtgttggagcacgatccgcacgcggatcagttgccccagccgctgaacacccaacaattgggctacgggccgggggcgacggacattgcgccctatcaaaggacctccggcgccggtctggcatgcctggacatcgatgagtgcaatcagccggatggagtggccaagtgcggcaccaatgccaagtgcattaactttcccggctcataccgctgcctgtgtccgagtggattccaaggacagggctatttgcactgcgagaacatcaacgagtgtcaggataatccgtgtggggagaatgcgatctgtacggacaccgttggcagcttcgtgtgcacatgcaaaccggactataccggtgatccgttccgcggatgtgtggatatcgatgagtgtaccgcgttggataagccctgtggacagcatgcggtatgcgaaaataccgttcctggctacaattgcaagtgcccgcagggatatgatggcaaacccgatcccaaggtggcctgcgaacaggtggatgtcaatatactgtgcagcagtaacttcgattgtaccaacaatgcggagtgcattgagaatcagtgcttctgcttggatggattcgaaccgattggatccagttgtgtggacatcgatgagtgtcgcacccatgccgaggtgtgtggtccccatgcccagtgcctgaatacgcccggatcgtacggctgtgaatgcgaggcgggatatgtgggtagtccgccaagaatggcgtgcaagcagccatgcgaggatgttcgctgtggagcccacgcctactgcaaaccggaccagaatgaagcctactgtgtgtgcgaggatggatggacctacaacccgagcgatgtcgctgcgggctgtgtggacatcgatgagtgcgatgtgatgcatggacctttcggaagctgtggccaaaatgccacgtgtacaaacagtgccggaggatttacatgtgcctgcccacctggattctcgggagatccgcactctaaatgcgtcgatgtggatgagtgccgaaccggagccagcaagtgtggagctggagctgaatgtgtgaacgtacccggtggtggatacacctgtcgttgccccgggaacaccattgccgatccggatcctagtgtgaggtgtgtgcccattgtcagctgctccgctaacgaagactgcccgggtaactccatatgtgatgctacaaagcgctgcctgtgtccggaaccgaatattggtaatgactgccgtcatccgtgcgaagccctcaactgtggagcacatgcccagtgcatgctggccaatggacaggctcagtgcctgtgtgctcccggatacacaggaaactctgcccttgcaggaggctgtaatgacatcgatgaatgtcgcgccaatccctgcgccgagaaggcaatctgttcgaatacagccggagggtatctatgtcagtgtccaggaggatccagtggagatccataccgcgaggggtgtattacctcaaagacggtgggctgctctgatgccaatccttgcgcgactggcgagacttgcgtccaagactcatacacgggcaatagcgtatgcatttgtcgacagggctatgagcgaaattccgagaacggacagtgccaggatgtggatgaatgctcggtgcaaagaggaaagcccgcttgtggactaaatgctctctgtaagaatttgcctggcagctacgagtgccgctgcccacagggtcataacggaaatcccttcatcatgtgcgagatctgcaatacgcctgagtgccagtgtcagtcaccgtacaagcttgttggaaatagttgtgttctctccggttgctccagtggacaggcctgtcccagcggagctgagtgcatctccattgctggaggtgttagctactgtgcctgtcccaagggttaccaaacccaaccggatggaagctgtgtggatgtcgacgagtgcgaagaacggggcgcgcaattgtgtgcttttggcgctcagtgcgtgaacaagcctggaagctatagttgccactgtcccgagggttaccagggagatgcctacaacggattatgtgcactcgcacaaaggaaatgcgctgccgatagggagtgcgctgccaacgaaaaatgcatccagccaggagagtgtgtttgcccgcctccttatttcttggacccgcaggacaacaacaagtgcaagagcccttgcgaacgcttcccatgtggcattaacgctaagtgtacgccctcggatcctccacagtgcatgtgcgaggctggattcaagggagatccactgctgggatgtacagatgaagacgagtgctcccatctcccatgtgcctatggagcctactgtgtaaacaaaaagggcggataccagtgcgtgtgccccaaggattataccggagatccgtacaagagtggatgcatcttcgagagcggcacgccgaagagcaagtgtctgagcaacgatgattgcgcaagtaatctagcctgcttggaaggtagctgcgtaagtccatgcagcagtcttctgtgtggatcgaatgcctactgtgagacagagcaacatgctggctggtgtcgctgtcgtgtgggatacgttaaaaatggcgatggggactgcgtgtctcagtgccaggacgtgatctgcggcgatggtgctctatgcattccaaccagtgagggacccacctgtaagtgcccgcaaggacagctcggcaatcccttccccggcggcagctgcagcacggatcagtgttcagccgccaggccttgtggcgagcggcagatttgcatcaatggaagatgcaaggagcgctgcgagggtgtggtctgtggcatcggagccacctgcgatagaaacaatggaaagtgcatctgcgagccgaactttgtgggtaatcccgacttgatctgtatgccacccatcgagcaggccaagtgctctccaggatgtggagagaacgctcactgcgagtacggattgggtcagagccgatgcgcctgtaacccgggaaccttcggtaatccctatgaaggctgtggagcacaaagcaagaacgtctgtcagccgaatagctgtggacccaatgccgaatgccgtgctgtgggcaaccacatatcctgtctttgcccacagggcttcagtggtaatccctacattggctgccaggatgtggatgagtgtgccaacaaaccatgtggtctgaatgctgcctgtttgaatagagccggaggattcgagtgcttgtgtctttcgggacacgccggaaatccctacagtagttgtcaacccatcgagagcaagttctgccaagatgcgaacaagtgccagtgcaacgaacgagtggagtgtccggaaggctacagttgccaaaagggacagtgcaagaacctctgttcccaggcttcgtgtggcccaagggccatctgcgatgccggtaattgcatctgccccatgggctacattggagatccccacgaccaagtgcacggttgcagcattcgcggtcagtgtggcaatgatgcggactgcctgcactctgagatctgtttccagttaggcaagggtctgcgcaaatgtgtggacgcatgctccaagattcagtgtggacccaatgccctctgcgtgtccgaggatcatcgatcttcctgtatatgctctgacggattcttcggaaatccaagcaacctacaggactgtagtcgaggatacggttgtcaggccagcgttaacggcatcaaggagtgcattaatctctgctccaatgttgtctgcggacccaacgagctgtgcaagatcaacccagctgggcatgcgatttgtaattgcgccgagagctatgtctggaacccagtggtctcttcctgcgaaaagccttcactgccagactgcaccagtgacgctaattgcccggatgcttctgcctgtcgtcctgatgtcttgggagtccttaagtgcgtcgccatctgtgatgccttcacgtgcccggccaactcggtttgcgtagcccgtcagcaccagggacgatgtgattgtctcaacgggtttgtgggtaaccccaacgataggaacggctgtcagccggcacagaaacatcactgcagaaaccatgcagagtgccaggagtcggaagcctgtattaaggatgaatctacccagactctcggatgtcgtccagcttgtgatacggtgaaatgtggaccccgagccgtttgcgtcaccaacaatcatcaggcgcagtgtcagtgtccacctggacctttcgccggagatccatacgatccatttaatggctgccagagtgttccttgtgtttacaaccatgactgcccacccagccagatgtgcaaccgtatgacacacacatgcttcgatgtgtgcgacgaggagtcctgcggtgacaatgccatctgtttggctgaggatcatcgagccgtctgccagtgtccacctggatttaagggagatccgttacccgaagtggcctgcaccaagcaaggcggttgtgccgctggaacttgccacccctcagcaatatgcgaggtcactccggaaggtcctgtctgcaagtgtcctccgctatttgtgggcgacgcgaagtcaggtggctgtcggccagatggtcagtgcccgaatggagacgccgattgcccagccaataccatctgcgccggaggagtatgccaaaatccctgcgacaacgcttgcggatcgaatgctgagtgcaaggttatcaataggaaacccgtctgcagttgtcccctgcgattccagcctatctctgacactgccaaggatggatgtgcccggaccatatctaaatgtctcactgatgtcgactgcggaggagcgctgtgctacaatggacaatgtcgtattgcttgcaggaacagccaagattgctctgatggcgagagctgcttgaagaacgtctgtgtggttgcctgtctggatcacagtcagtgcgctagtggactggcctgtgtcgagggccactgcaccatcggatgtcgcagcaacaaggagtgcaagcaggatcagtcttgcattgagaacaagtgcctgaatccctgccagtctgccaacagttgtggtccaaatgccctgtgcagcattgatcagcaccatagccagtgcagctgcccggaaggtttcgagggcaaccccactccagaacagggatgcgtgcgagttccggctccctgcttagccagtaatcaatgtcccagcggacacatgtgcattggaaatcagtgtaatcttccctgcaccaaaacagcttcctgtgcagttggagaacggtgctatcaacaagtctgccgcaaggtgtgctataccagcaacaactgtttggccggagagatctgtaattcggacaggacgtgccaaccaggatgtgattcagatgccgattgtccacccaccgaattgtgtttgacaggaaagtgcaagtgcgccaccggatttataggaacacctttcggttgctcggatattgatgaatgcacggaacaaccctgccatgccagtgctcgatgtgagaacctcccgggaacctatcgttgtgtatgccccgaaggtactgtcggcgatgggtactcccagccgggttgttcgcagcccaggcaatgccacaaaccagacgactgtgccaataatctggcctgtatacatggaaagtgcacggatccctgcctacatactgtttgtggtattaatgccaattgccagtcggaaggacacgaagctctgtgcagctgtccagctggattcttgggagaccccaacgacactggagtcggatgctttaaggtggagtgcatcgaccatgtggattgcgccggagatcgtgcctgcgatgcggaaaccaatcgatgtattaaaccatgtgacctgaccagttgtggaaagggcaattgccaggtgagggatcataaggcgacatgtgcctgctacgaaggatatcaattagtgaacgatgtatgtgaggacattaacgagtgtctgtcgcagccatgccacagcacagctttttgcaacaaccttccgggaagctacagttgccagtgcccggagggattgatcggagatcccctgcaggccggttgtcgggatcccaatgagtgtttgagtgatgcggattgtcctgcctcagctagttgccagaattcccgatgccgtagcccttgcgagcgacaaaatgcttgtggattaaatgctaactgccaggcacaggcccatcaagccatttgcacttgccctctcaattcccgtggagatccaaccatcgagtgcgtgcacattgagtgcgccgacaacgacgattgctccggggagaaagcatgtttggactcgaagtgcatagatccatgttctctgcccaacgcctgtggagctttggctcgctgctcggtgcagaaccacatcggcgtctgctcctgcgaagcgggcagtaccggagatgccaaattgggctgtgtgcaactgcaatattgccagcaggacggacaatgtgcccagggaagcatatgctcccatggaatttgcagtccgctgtgcagcaccaaccgcgattgtatttcggaacagttgtgcttgcagggcgtctgtcagggaacctgcaagtcaaactcaagctgtccccaattccaattctgttcgaataacatttgcaccaaggagctggagtgccgatccgatagcgaatgtggcgaagacgaaacctgtctgagtgatgcctatgggcgtgcaaagtgtgaatccgtttgtcttggtcgcgctgcctgtggtaggaatgcagaatgtgtagcccgttcccatgctcccgattgcctctgcaaggagggattcttcggggacgccaagtctggatgccgaaagatcgagtgcaccagcgacgatgactgctccaatgacaagagctgtgacaaccacatgtgcaagattgcctgcctaattggacagccgtgcggagagaatgccctctgcaccacagaacaccaccagcaggtttgccactgccagccaggattctctggagatccgcgggttcgttgcgatgttatagacttttgccgggatgctccgtgcggacccggagcccgttgccgaaacgcgagggggtcgtacaagtgcacctgtccaccgggactcgttggtgatccgtacaacgagggctgtcgcagctccgttgagtgcgagaccaacgaggactgtcccccgcatgccgcatgcaccaaaaccaatggggtggccaagtgccgcgatgtctgtgcccagctgcaatgtggccccaatgcggaatgtgttccgaagggccacgtggcgcagtgtgcatgccgcagcggctacgatggccaacccgccgaccgggtggccggctgtaagccgctgccctctccctgtcaggtcaccggcgactgtccgaccaacacatactgctcggatagcgtctgcaaacctgcctgtgttctggacaccgaatgtggagcatttgaagtgtgtcaaggtggccaatgcttcaatccgtgccttcaacctcaagcttgtggccagaatgccgagtgcgtgatgcagaatcatctgaaacagtgccattgcccggagggcttcaccggcgactcagcgaaggagtgcgtgcgtgtgccagtggcctgtgatggcgagtgtggtccaggatatacctgccgcgactccatgtgcctgcctgtttgccacaacgatctggagtgcgcctccaacgaaaagtgcctgaagggcagctgtatgctgacctgtcgggtggacaacgattgcttcctgggtcacgtttgcctgcacaacaagtgcgtgtatggctgccatgtggacgatgactgcagtgcgtcagagtcttgtcgcaacgataagtgcgtaaacccctgtctggaaaatccctgtggtcccaatgccgcctgttcggtgtccaaccaccgggctagctgcagttgtttggagagtatggtgcccaatcccacaccccaggtgggctgcgtccgttctccccccttggaatgccgcgagaatcgcgactgtggaaatggattggcttgcttcgagtcggtatgtcgaccactatgcgccgacgatgctggctgcttgaccaacgagcgatgccagcagggagtttgcaaacccctgtgccgccacgacaatgagtgcggtcatggagagctctgtctgggcctgaactgcgtacctggatgccggtccgatcagggctgcccgccggaattgtcctgcgtgggtcagcagtgcgtggatccatgtgcagatcccactgcctgcggcaccaatgcccactgtcaaacgatcgatcacaggaaacagtgcctatgtccagagggtcttgatggcaatgccaatgtggcctgcaaggtgcctcgcattgcttgtggcaggaacgaggattgccagtcgaatcagctatgctatgccggcagctgccaaggaaagtgcagaaacgaccagaactgcttggccgatgagcgttgcatgagaggaacatgtagaaccgtatgcaacaccgatgaggcatgtgctcagggacagatttgcgagaatcgaatgtgccagactggatgtcgtaccgatttgagttgtgccaccgacgaggcctgcgtgaacaagaagtgccagaatccatgtcgtacacccggccaatgtggccagtgtgccgactgccttgtggtcaaccatggagtccagtgccagtgtcccgccgcctttatgggagacggtttgacaggctgtcaacttccgccggaacgctgtcatcctgactgtgaatgcgacgaaaatggagcctactgtgcccccaagtgctcgagaaccgaggattgcgcctgtggacaacagtgcgccagaggaaagtgccggaataagtgcggacccaagcgccagtgtacggtgggtcagctttgcgagagaggcgcatgcattgccgggtgcaagtccaacggtgattgtgccgccgaccagagttgtgtcaatggaaagtgctccgatccgtgcgagcccagcaaggagtgcgtgcagttcgagtgccgtgtggacaccgattgcgacagcaataagcgctgcgatcaaggaaagtgccgcaatccttgcctggagtatggagcttgtggaacgaatgctcagtgtcgagttgtcggtcgcaaggcccaatgttcatgtccgccggacttctttggcaatccgactagtgagtgccgaccgctggaaggtggatgctctagcaaaccctgcggtgagaactccaagtgtactgaagtgcccggaggctatgaatgcgcttgcatggacggctgcattggagatgcccaccagggatgcctttgcggcggacctctagtgaatgcctgtcgcgatcaaccgtgcggtctgaatgccgcctgccacgtattggaaaacaatcaagccgagtgctactgcccggaggacttccccaatggtgatgcttatgtacaatgttacttgactacgccgaagcaggattgtcgtacccttggatgcgaagtcggcggctgtgtacgccagggctatgaatacgtttgccagcaggatacggattgtcccagtgaaaagtcatgcctccaaggacactgcagcgatccttgtacaatgcgtggcgtgtgtggtttgaatgctctctgcaaaaccgtactgcatcgaccgcgctgctcctgccccagttgccacatcggtcggccagagatcgagtgtaagtctgatcccaagtgcgtggccgaggacacggatccaaagaccaaggagcagatcccatgctccacagactccgagtgtccagagacattgcagtgcggccagtacggccaatgcacagatccgtgcaacaatccgctcttcatctgcgagagcaacaagaagtgcgagacgcgacgccaccagcccgtttgtatctgcaaatcgggcttcatagtgaatgagtacggagaactgacgtgcgccccggacaagcgggagtgctatcgcgacgatgactgcgcctcgaacatggcctgctccgatggcaagtgccgcaatccctgcatcgtgcccctgggccgagccgcaatctgtgccgagaacaagtcctgcgaggtgcagaaccacaagccagtctgcatttgcatgcgcgactgccagccatccatatcgatttgcctgcgcgacgccggctgtccggctagccaggcttgccggaagctcaagtgcgtcgatccgtgcgagtttgccacatgcgcacccaactcgccatgcattgtcgaggatcacaagccgatatgtaaattctgcccagctggatttatagccgatgccaagaatggatgtcaaaaaggtaaagcaccaaaagtactctctgtcactcagctctctgtcgagtga

SEQ ID NO: 39426 - protein, 3680 aa, DROSOPHILA
MLGDIDECQDPAIAARCVENAECCNLPAHFLCKCKDGYEGDGEVLCTDVDECRNPENCGPNALCTNTPGNYTCSCPDGYVGNNPYREGCQDVDECSYPNVCGPGAICTNLEGSYRCDCPPGYDGDGRSESGCVDQDECARTPCGRNADCLNTDGSFRCLCPDGYSGDPMNGCEDVDECATNNPCGLGAECVNLGGSFQCRCPSGFVLEHDPHADQLPQPLNTQQLGYGPGATDIAPYQRTSGAGLACLDIDECNQPDGVAKCGTNAKCINFPGSYRCLCPSGFQGQGYLHCENINECQDNPCGENAICTDTVGSFVCTCKPDYTGDPFRGCVDIDECTALDKPCGQHAVCENTVPGYNCKCPQGYDGKPDPKVACEQVDVNILCSSNFDCTNNAECIENQCFCLDGFEPIGSSCVDIDECRTHAEVCGPHAQCLNTPGSYGCECEAGYVGSPPRMACKQPCEDVRCGAHAYCKPDQNEAYCVCEDGWTYNPSDVAAGCVDIDECDVMHGPFGSCGQNATCTNSAGGFTCACPPGFSGDPHSKCVDVDECRTGASKCGAGAECVNVPGGGYTCRCPGNTIADPDPSVRCVPIVSCSANEDCPGNSICDATKRCLCPEPNIGNDCRHPCEALNCGAHAQCMLANGQAQCLCAPGYTGNSALAGGCNDIDECRANPCAEKAICSNTAGGYLCQCPGGSSGDPYREGCITSKTVGCSDANPCATGETCVQDSYTGNSVCICRQGYERNSENGQCQDVDECSVQRGKPACGLNALCKNLPGSYECRCPQGHNGNPFIMCEICNTPECQCQSPYKLVGNSCVLSGCSSGQACPSGAECISIAGGVSYCACPKGYQTQPDGSCVDVDECEERGAQLCAFGAQCVNKPGSYSCHCPEGYQGDAYNGLCALAQRKCAADRECAANEKCIQPGECVCPPPYFLDPQDNNKCKSPCERFPCGINAKCTPSDPPQCMCEAGFKGDPLLGCTDEDECSHLPCAYGAYCVNKKGGYQCVCPKDYTGDPYKSGCIFESGTPKSKCLSNDDCASNLACLEGSCVSPCSSLLCGSNAYCETEQHAGWCRCRVGYVKNGDGDCVSQCQDVICGDGALCIPTSEGPTCKCPQGQLGNPFPGGSCSTDQCSAARPCGERQICINGRCKERCEGVVCGIGATCDRNNGKCICEPNFVGNPDLICMPPIEQAKCSPGCGENAHCEYGLGQSRCACNPGTFGNPYEGCGAQSKNVCQPNSCGPNAECRAVGNHISCLCPQGFSGNPYIGCQDVDECANKPCGLNAACLNRAGGFECLCLSGHAGNPYSSCQPIESKFCQDANKCQCNERVECPEGYSCQKGQCKNLCSQASCGPRAICDAGNCICPMGYIGDPHDQVHGCSIRGQCGNDADCLHSEICFQLGKGLRKCVDACSKIQCGPNALCVSEDHRSSCICSDGFFGNPSNLQDCSRGYGCQASVNGIKECINLCSNVVCGPNELCKINPAGHAICNCAESYVWNPVVSSCEKPSLPDCTSDANCPDASACRPDVLGVLKCVAICDAFTCPANSVCVARQHQGRCDCLNGFVGNPNDRNGCQPAQKHHCRNHAECQESEACIKDESTQTLGCRPACDTVKCGPRAVCVTNNHQAQCQCPPGPFAGDPYDPFNGCQSVPCVYNHDCPPSQMCNRMTHTCFDVCDEESCGDNAICLAEDHRAVCQCPPGFKGDPLPEVACTKQGGCAAGTCHPSAICEVTPEGPVCKCPPLFVGDAKSGGCRPDGQCPNGDADCPANTICAGGVCQNPCDNACGSNAECKVINRKPVCSCPLRFQPISDTAKDGCARTISKCLTDVDCGGALCYNGQCRIACRNSQDCSDGESCLKNVCVVACLDHSQCASGLACVEGHCTIGCRSNKECKQDQSCIENKCLNPCQSANSCGPNALCSIDQHHSQCSCPEGFEGNPTPEQGCVRVPAPCLASNQCPSGHMCIGNQCNLPCTKTASCAVGERCYQQVCRKVCYTSNNCLAGEICNSDRTCQPGCDSDADCPPTELCLTGKCKCATGFIGTPFGCSDIDECTEQPCHASARCENLPGTYRCVCPEGTVGDGYSQPGCSQPRQCHKPDDCANNLACIHGKCTDPCLHTVCGINANCQSEGHEALCSCPAGFLGDPNDTGVGCFKVECIDHVDCAGDRACDAETNRCIKPCDLTSCGKGNCQVRDHKATCACYEGYQLVNDVCEDINECLSQPCHSTAFCNNLPGSYSCQCPEGLIGDPLQAGCRDPNECLSDADCPASASCQNSRCRSPCERQNACGLNANCQAQAHQAICTCPLNSRGDPTIECVHIECADNDDCSGEKACLDSKCIDPCSLPNACGALARCSVQNHIGVCSCEAGSTGDAKLGCVQLQYCQQDGQCAQGSICSHGICSPLCSTNRDCISEQLCLQGVCQGTCKSNSSCPQFQFCSNNICTKELECRSDSECGEDETCLSDAYGRAKCESVCLGRAACGRNAECVARSHAPDCLCKEGFFGDAKSGCRKIECTSDDDCSNDKSCDNHMCKIACLIGQPCGENALCTTEHHQQVCHCQPGFSGDPRVRCDVIDFCRDAPCGPGARCRNARGSYKCTCPPGLVGDPYNEGCRSSVECETNEDCPPHAACTKTNGVAKCRDVCAQLQCGPNAECVPKGHVAQCACRSGYDGQPADRVAGCKPLPSPCQVTGDCPTNTYCSDSVCKPACVLDTECGAFEVCQGGQCFNPCLQPQACGQNAECVMQNHLKQCHCPEGFTGDSAKECVRVPVACDGECGPGYTCRDSMCLPVCHNDLECASNEKCLKGSCMLTCRVDNDCFLGHVCLHNKCVYGCHVDDDCSASESCRNDKCVNPCLENPCGPNAACSVSNHRASCSCLESMVPNPTPQVGCVRSPPLECRENRDCGNGLACFESVCRPLCADDAGCLTNERCQQGVCKPLCRHDNECGHGELCLGLNCVPGCRSDQGCPPELSCVGQQCVDPCADPTACGTNAHCQTIDHRKQCLCPEGLDGNANVACKVPRIACGRNEDCQSNQLCYAGSCQGKCRNDQNCLADERCMRGTCRTVCNTDEACAQGQICENRMCQTGCRTDLSCATDEACVNKKCQNPCRTPGQCGQCADCLVVNHGVQCQCPAAFMGDGLTGCQLPPERCHPDCECDENGAYCAPKCSRTEDCACGQQCARGKCRNKCGPKRQCTVGQLCERGACIAGCKSNGDCAADQSCVNGKCSDPCEPSKECVQFECRVDTDCDSNKRCDQGKCRNPCLEYGACGTNAQCRVVGRKAQCSCPPDFFGNPTSECRPLEGGCSSKPCGENSKCTEVPGGYECACMDGCIGDAHQGCLCGGPLVNACRDQPCGLNAACHVLENNQAECYCPEDFPNGDAYVQCYLTTPKQDCRTLGCEVGGCVRQGYEYVCQQDTDCPSEKSCLQGHCSDPCTMRGVCGLNALCKTVLHRPRCSCPSCHIGRPEIECKSDPKCVAEDTDPKTKEQIPCSTDSECPETLQCGQYGQCTDPCNNPLFICESNKKCETRRHQPVCICKSGFIVNEYGELTCAPDKRECYRDDDCASNMACSDGKCRNPCIVPLGRAAICAENKSCEVQNHKPVCICMRDCQPSISICLRDAGCPASQACRKLKCVDPCEFATCAPNSPCIVEDHKPICKFCPAGFIADAKNGCQKGKAPKVLSVTQLSVE

SEQ ID NO: 39427 - DNA, 2324 bp, DROSOPHILA
acccactgactatgcccacatatctttcagttttccccaggccaggacatccttaacccgttggcgttggaaattcgagttcatggcatgttcatgcatgttgccggttgttcgtcctgtgcgcgttcaaaggcgcacacaaatttaatttatacacacacacgaacgagtaggtatacctatatatatatatatatatatatatttcttttttttctttcttttaaatacaagcttgcacatttttttcctgggcccacactcacactcacacaaggggcaatatgcaatgatgggtggagcaaaaaaatatgcaataaatttttaatttaaatcaagccatcacgctttccccaaccaaattcccaagtgcgaaagggatttggggccgggaattatgagaaagcacagtctgcacacctccatttatgtacatattaacatatgaatgcaactcgcatatatcgcatatgtatatgtatacatcacatatctatgtacatacatacctgtctctctttgttgacttcgtggaacaacagccaaatgctttttggtgggcttcgaatgagcttcgtctgttgcagtgctaaaactcataaatgaatttgacatgggatccatgcagcctgcaatgagaaacggaattaaattcgttagtattttgattgtcataattcggtcattggtgatttcgcaaatatgcgtggtatatgtatgtatatatgttttgtatggactagcattaaaagttttataatcttatgattttttatagcattcatgttgcatcaaaaattaaagtatcaagcaaataaataaatagtattttgtgagcccaacataaaacatcttcgttaaaagaggaagaaaattgagatccaaatgacattatgtacattatttctttttatctttatttcatcgttagcacttgaatttggcaccacctaaaccgaatgattatgcatttgcaaaggaattcttcagccaggacccttcactcagcatccacattcaaccgcacctgctggcagaggtccttcagctgcttgcccgactcctccattgcggttcgcagctgggagagactgatctgcagccgggccatgcgcatgtcgccggcttttagccgcacctcctggttggacgtaaagccggtggcatctcgacgagctcgctgtgggcgtgggtgctgtggacgtgggtgcaattggaggttcctttgggtgaccagattggcagccagacgagtgtcggactcctccgtctggtcgaggccattgctgggtcggcagtgcgtcttgggtttcgtttccggcattctagcttgggcggtggattataatctccgttctagtcgattgttgtcacaaaaatttggcttgggaaattgacatctatgaatacgtatgtatgtatgtatgtcgaagtgtttcaaattgtgacatcatgagcatgaaattctgagctccgcacaggatgcgatatggttcggtattttgtggtggccacccggaaaagttagccggcagaaggggcaacatgtgtgctttggagcataccactgaactttaattacaattaaccgcaaatgatgtagcgctgctggtgacttgcggtcatatgcgaaaaaattatgataacaaaatgttaaaccttctttatgcgactttaaaatgccctttaataaattaaattgtttataatatcaattttaaaccataaagaaaggctacacaatatagacagctatcttaaaaaagttaaatcatatattttatactgttgctttggccctgaatatcaaattcgacttgttcaatgaaataactaatttaaatcaattacttaagttgagagcaataattaattcatgtcttccataattgaaatcgacatccctggtagcatcgccaatgcaggatactgcaaaaaagtggaagtaaacctattattgtgccaggagtgcccaggcacacagacacactccttccaggaggcaggaatccaggagtaacacggacacgaacgtggaacgagaaaggaagggaggacgaggaatggggctgaccacatgggaggacgaaatggcatgcgatggccgggcaaaaccagctcctgttaccttgcggaaaatgtaggggatggggcgggggtcttgcaattaattaaaaatacatgcaccgtgaacgagttgcagacatcctggccctggtcctcctgcctcctgcagctgcattaatttgaccgcaaaataagccaagtattcggtgcaaggcgaaaccatatcggcagagcgaatattttccgtgccaccgctc

SEQ ID NO: 39428 - DNA, 324 bp, DROSOPHILA
atgccggaaacgaaacccaagacgcactgccgacccagcaatggcctcgaccagacggaggagtccgacactcgtctggctgccaatctggtcacccaaaggaacctccaattgcacccacgtccacagcacccacgcccacagcgagctcgtcgagatgccaccggctttacgtccaaccaggaggtgcggctaaaagccggcgacatgcgcatggcccggctgcagatcagtctctcccagctgcgaaccgcaatggaggagtcgggcaagcagctgaaggacctctgccagcaggtgcggttgaatgtggatgctgagtga

SEQ ID NO: 39429 - protein, 107 aa, DROSOPHILA
MPETKPKTHCRPSNGLDQTEESDTRLAANLVTQRNLQLHPRPQHPRPQRARRDATGFTSNQEVRLKAGDMRMARLQISLSQLRTAMEESGKQLKDLCQQVRLNVDAE

SEQ ID NO: 39430 - DNA, 2906 bp, DROSOPHILA
caaccagcattgcgcattctaatttatctcaacatattgggtgtgcaacaacacatgatggcgagactacaatatagtgccgaagcgaaatcggttagcatatagcaaaaacgatcggccagcggtggtcgacctagtgcatttggaatctgcatggaaacggcatcgatgaatatcgtgtgacgtgtcgattcgcagggtgccaaagccggggcaaagtccacaggacaaactctaatgcgccggcgcggctgttccgtctgcacgccgatcgagtggatgtccttgagcacatcgctatccttcttcctgaagatctcaacatcgtcttccgaattttctgcgggttgatacagttatagtaactatactaaataaatgcgggtgacatctggtttcaccaaaatgaaactgtttatggatttatgacagtagtgttatttttcagagttttcaaggacaactccaagagacagttcctatcttttttttatagattggtttatgcattattttgatattttttaccttccgccaatgccttggacatccatccgtaccaattccgtttgtttgctccgcctagattcgattttgaattggtgcgtacggtgatcgagctgtgtgttgcagccggatcactatcttccaaatcctcaaaacattcgtcggcttgaaagcccaaaatatcgaagagccgctggcaggtgttcttctgctcggacagtttgcggggctcgttaacggcatcctgaaccaaatcgccaattagcaagttaatgacgatcgcagtctgcggtggctccctgcacgccattaagtttacagcgtccacagatcaaatttggaaaagtatcgaaaaatgtcttacaagctactgaagtcaacataatttcggcatatacaaaacgatgttgacaactatcacaccggaactgaatttatcactcaaattttgtattagctggtcaaaaaaattcccagttttcaacacaacgcaatggataatcatatggataagaacgatgaggacaagaggtcgtcatccccggattctcaacgtcaagttataatatatatgccacccgccgttgaacatggtcatgttgtgtatctaaaagatgcgaatttaggcgccacagagacggaggcttctgcacaactcgacccacaggagcatctttcgaatgcggatcggttggagaacaatcgggtgatttcagagctggatgatgagccgagcacgagtgctcagtccgcagttaagggtcagaaatcagaagatgatcagggtcaccagaccaagacaggtatttcaaaaatgccaggatctcctaagcagttgcacaatgtattggaagtaatctgtcgcttctcacgcgagattcctgatgcaatggagggccgggagcaactccagccggcagtgattgtccaaattccaaaatatcgcgaactgggaacccagaccgctgagttgccatcgcagtcgcagcgattgcgtttggatctgaccgacctgagaccagatccgaatccaccgccctgcgaacgcacgctgcacacattcacgattagtggcaacaatctgccgggcaatcctcgccagcttcgtcaaacgatctgcgcgcgaattggacgctccatctgtgattttgtggcagccttttgtctttgtctgcaagtgaacaaggattgtgtcttctgtctgggtttttttgtggcctttgtgatcagtgccagcttcctgactgccttcttctaccgcactcttaccttctcctcgtcgccggtgcgagtggtggccaatccggtgagcggcaccatgcgctatgaacttgccacactgcgattcaacggagggtactactacatctataatagcagccaacaaaagcttctctaatctaattggaacttgagttttattttggtgcgggttctttagcttacatcttaaatgtgtgatataatgttctgttaaaaatagtgatcgaattcttattgaatttgtaaaaacttgtattatagtttaattttaacaaagacttttttgtatacgagtaacacctttgggtatattcttgatcaggatccctagccgagttgatctagccatgtccgtccgcatgaacgatatccttagatttaaaatacatgttctgtttatttttaagctgcctcaaacaaagtcgggttgcgaaactttggaaatgcaagcaaaccgcatgaccaggttcaatcaatggtctttcagcagttttactggttgtcatggactccaaagtttgcagttcgcttacgccgctgccgcaatggtactgcctttcttcgccaactttttcttgattttttttatatatttttttttgagtttaactctagacaaaagtcgctctgtatagcgggtggcagaatggtgcatgagtggatggagcgaggatagaccttgtccggcttgacttgacttgacaatgggtcacacaaaaagtcggcctctgggtacgggaaattggccacaaaacgttcgtcgcctgctgtgccaggagcagggcggtcgccaactttttggcaagatgcccgggtacaaaggaattattgttaatataggcaatgccagccaggcccggcccggccaaaacgaagcccagcagggtggaggggggcaggcaatgaccggggggatgtcttttcaatataatttatttatgcgaaatatggcaaatattctttggaaattgtatgcccaaataaataacgaactttttatacactttgcaaagagattttttcggcattttatttgctagctttttttttatagtagttttaatatatttgaagcagagaggaatatttttgtattttatttaattaagcgttatttttttattcatatactttat

SEQ ID NO: 39431 - DNA, 906 bp, DROSOPHILA
atggataatcatatggataagaacgatgaggacaagaggtcgtcatccccggattctcaacgtcaagttataatatatatgccacccgccgttgaacatggtcatgttgtgtatctaaaagatgcgaatttaggcgccacagagacggaggcttctgcacaactcgacccacaggagcatctttcgaatgcggatcggttggagaacaatcgggtgatttcagagctggatgatgagccgagcacgagtgctcagtccgcagttaagggtcagaaatcagaagatgatcagggtcaccagaccaagacaggtatttcaaaaatgccaggatctcctaagcagttgcacaatgtattggaagtaatctgtcgcttctcacgcgagattcctgatgcaatggagggccgggagcaactccagccggcagtgattgtccaaattccaaaatatcgcgaactgggaacccagaccgctgagttgccatcgcagtcgcagcgattgcgtttggatctgaccgacctgagaccagatccgaatccaccgccctgcgaacgcacgctgcacacattcacgattagtggcaacaatctgccgggcaatcctcgccagcttcgtcaaacgatctgcgcgcgaattggacgctccatctgtgattttgtggcagccttttgtctttgtctgcaagtgaacaaggattgtgtcttctgtctgggtttttttgtggcctttgtgatcagtgccagcttcctgactgccttcttctaccgcactcttaccttctcctcgtcgccggtgcgagtggtggccaatccggtgagcggcaccatgcgctatgaacttgccacactgcgattcaacggagggtactactacatctataatagcagccaacaaaagcttctctaa

SEQ ID NO: 39432 - protein, 301 aa, DROSOPHILA
MDNHMDKNDEDKRSSSPDSQRQVIIYMPPAVEHGHVVYLKDANLGATETEASAQLDPQEHLSNADRLENNRVISELDDEPSTSAQSAVKGQKSEDDQGHQTKTGISKMPGSPKQLHNVLEVICRFSREIPDAMEGREQLQPAVIVQIPKYRELGTQTAELPSQSQRLRLDLTDLRPDPNPPPCERTLHTFTISGNNLPGNPRQLRQTICARIGRSICDFVAAFCLCLQVNKDCVFCLGFFVAFVISASFLTAFFYRTLTFSSSPVRVVANPVSGTMRYELATLRFNGGYYYIYNSSQQKLL

SEQ ID NO: 39433 - DNA, 2550 bp, DROSOPHILA
atgtcccctctgctttaatagagtttcatcgaaaagtttccctcgaacaaattatgaaatatacggagacagctttttgccattgaacggaaattgtggtttaaatctgggggatgaattttgatctaaagcgaatgtgcacaaaaaaatatatcagataataaaatggcagtttatgtgtggcctgaagcaaaagtttttatcttattttatttattgtgttggtatattaaagtagttgtttgatcttaaatttcggggtaaatgtttttgaccttgcaacttccaataattattaaaataattacatatttagacggttctttttttgaaagtcttttgaaagtaaattcaccaggcaagtgaaatctcagttaaggagctaccctatattttgctttggttcctaaaatgcacttatgcaaaataacattagtgcagtagaccgtcataattgtcatattagacaggaaaatccatagacgacagtcgaccctgaagtgtcgatggacagcagcttctggttttgcccggccagacaggaaaggaaattgcttaatttagcgcaaaaattatccactggccaacgaggctcaattgccggtctgccatggtcgtttgaggcagatgataaagcaaccctttgctacgaatttttagccagactgattttaaatgacagaaatggtagaaaataaatttaactcacactcatgattttcacacgaaaaacatattgaatcacaaaggcaaggagcgactagaagaactctacatgcttagttcaaaaagtgacacttctggagacgatatctctataactgcacaagcagaaaaaagagtggatgatagcatcagagcgccatctattggctggaatgctgagcacaaagatgttcagattccaagggaccaactaacccacaggcagatcagcaagtgcaatttgtttgaggaatacatcaagctcccaaagagtgaatatggacaaacaagccgcatgaagcgattccgatccgaagagttagctattaagcaaggtaagataaatgtataattccgttcttattgaagggctaacagcctttgatatcttaacagaagatcaaatcgtggagcatagatcatcgagtctttcgcggctatcggatgtcacaatcaagcccacctgcgaggtgagtagtcagacttcgtggacagcagcggacgagagtaatatgaatagcaaggatttggaggcgaagctggcggctgtacgcggcggtggtatcgatctcgaaacggacaagcccagcaagatccagcagcacacgatccacatcgaggtggagtcggtgacatcggccacggctatgcaaagacccccactgcaccaaaggatgtggcaggtccttgtgcagacggcggatacgattgtcgcattcgcctctataatcggcgagaatttaacagtggcactcttcattgtcctgtgcctgtggtgcctttacctcttactaagccacttttatggcaacttgcagaccaatgtcggcatgccgtccaaataattgtaataagaatgattcgttttgcacgtgattgtatgagtaaaaatgcagtaaacagaattagcagaacagagttccaaccagcattgcgcattctaatttatctcaacatattgggtgtgcaacaacacatgatggcgagactacaatatagtgccgaagcgaaatcggttagcatatagcaaaaacgatcggccagcggtggtcgacctagtgcatttggaatctgcatggaaacggcatcgatgaatatcgtgtgacgtgtcgattcgcagggtgccaaagccggggcaaagtccacaggacaaactctaatgcgccggcgcggctgttccgtctgcacgccgatcgagtggatgtccttgagcacatcgctatccttcttcctgaagatctcaacatcgtcttccgaattttctgcgggttgatacagttatagtaactatactaaataaatgcgggtgacatctggtttcaccaaaatgaaactgtttatggatttatgacagtagtgttatttttcagagttttcaaggacaactccaagagacagttcctatcttttttttatagattggtttatgcattattttgatattttttaccttccgccaatgccttggacatccatccgtaccaattccgtttgtttgctccgcctagattcgattttgaattggtgcgtacggtgatcgagctgtgtgttgcagccggatcactatcttccaaatcctcaaaacattcgtcggcttgaaagcccaaaatatcgaagagccgctggcaggtgttcttctgctcggacagtttgcggggctcgttaacggcatcctgaaccaaatcgccaattagcaagttaatgacgatcgcagtctgcggtggctccctgcacgccattaagtttacagcgtccacagatcaaatttggaaaagtatcgaaaaatgtcttacaagctactgaagtcaacataatttcggcatatacaaaacgatgttgacaact

SEQ ID NO: 39434 - DNA, 489 bp, DROSOPHILA
atgaagcgattccgatccgaagagttagctattaagcaagaagatcaaatcgtggagcatagatcatcgagtctttcgcggctatcggatgtcacaatcaagcccacctgcgaggtgagtagtcagacttcgtggacagcagcggacgagagtaatatgaatagcaaggatttggaggcgaagctggcggctgtacgcggcggtggtatcgatctcgaaacggacaagcccagcaagatccagcagcacacgatccacatcgaggtggagtcggtgacatcggccacggctatgcaaagacccccactgcaccaaaggatgtggcaggtccttgtgcagacggcggatacgattgtcgcattcgcctctataatcggcgagaatttaacagtggcactcttcattgtcctgtgcctgtggtgcctttacctcttactaagccacttttatggcaacttgcagaccaatgtcggcatgccgtccaaataa

SEQ ID NO: 39435 - protein, 162 aa, DROSOPHILA
MKRFRSEELAIKQEDQIVEHRSSSLSRLSDVTIKPTCEVSSQTSWTAADESNMNSKDLEAKLAAVRGGGIDLETDKPSKIQQHTIHIEVESVTSATAMQRPPLHQRMWQVLVQTADTIVAFASIIGENLTVALFIVLCLWCLYLLLSHFYGNLQTNVGMPSK

SEQ ID NO: 39436 - DNA, 4513 bp, DROSOPHILA
ttgatttgcgccaagttatagaggacacaaccttaaaagggcatataaatatatatctcaataggtcaagattatttctcgtttttggtacgttttaaataaatattgggtaaatcagtaaatatatatcatatattcccataacaaaaaaaggaaaaacgatctagcatcaaatattttatatcgcagaatcgatccgaaaatgtaatacaaactttttttaaatatttaggtttttatggggttatttcatgatttatttttgttgcatgggctaccgaaatactttggcctgttttagctgcttgcggagctgcaatgaggcatgctgattaagttttatggaatatatttgacttgtgtcttgaagtgtgctcccttcatctaccatctaagtgtttaaactcctttcagtgttctcgttttcagttgatgttccatattttccatacctaagtcttccttcctctctacatatctatgttctccttttacttgctgtgtaactgtttttagttaccatttcctaattgttaactactttgctccaatgtgtgtttaatcctaactaaccaaaaaaaaaaaaagaaaaagaaaaccaaaaaatgatatgaaattggcatccaaatatatttcccattgatgttgtaattgatgacaagaaagttctcttggcaacaagttttaaatttcgtatttcgtttgacaaacaaatttgattgcttttgcattagacgttcctcctgtgatgaattgtattgtatgcttttggaaatatgtattcctatattctaaagatatgtgtacttccccttaaccacaaacgagagacgatctcacacagcccaaaactaatcactgaactgtatatattttctattcatctgccccacaaccaccaccgccaaaaaaataccaattcaatacccaatcgcaaccactgtgtgtgttgttgtcgtcgtcgtgctatccgtgctatcgttgtcactcggtcctggttatggtcacgatcacctcacctctgtggccggccgatctcctcgaaaagtgcgcccaaggacgtgccgcctggttggagcggggtcgacgctgcagcgtccaggatcagcaacagcagcaggccacctgccaccgacgctgggtgaagcgcaaccgagtaagtgccatcacgaaggaccgcctaccaccgtgtacatactacccgtaatcgtaataacgcctctaattgtaattcccatacatattttttatcaaccactccccctgccctcacatttctttcatgcacaactttctcaatgttcagcgcattatctgttaggtgaagcaggctacaaatctgaataagtcatcatctttattgtctagatcaaacaaatttactttggttttcattggaacccgattgatgatagggtcatacctttaaagggcccctgaaaactgcataaccccagaaagactgacttaaatatgtttttatatacttatcctttaaattcaacttactagaactttaaacatagaaaaaaggtgattagtaattatgttaaacaaaaattcaattcaatttgttagaacttaatacttgataagtaaaaactttacttctgtcttacttgagttgtgctctaatgaaaatacccttttgctatttgcttaatcatatactgacaacgctcatttccattgacagatccaagacgcctctttgggcggctcatcggacgatgaggatttcctgggcgttctgcggggtcctagcacctttgcgaatgcctttctctacgtgggcctgggcacggtggcactgggactcgtcatcgcgttcgttggcaccggcgagaagggcttcaaaaccacggaactaagacttataggcccctctctcataggcaataaaatagctaatggcaagtgtcagttgaacatgtgctaaaagagttcacttctctgcaggattgggcctgatctgttgcattttacgcatcctcttctgcatctgtccatcgcactgcatttcatctagcaaaaagacgcggaagaaaaacggcaacaagattgatgcagatcacacgacatcgttgctcagaaacgagagcaaaagagtatctatagcgagaggtcctagttttcaggttgtaaacatatcattttttttattaaattactatgttaattaattcctttcattgtagcccaaatatcccatagcgcacaaacgcagccagagcaaaatgctcaacgagggaatggaggcactgcgtcagatagccaccacatccttgttcatgcagaacgagcagaagacggccatcaatcgcgtggtgccgatcatcaatgagccggaaagcggtggtatataaactacatattgtatacagttccaacctcttatgacttctgtttctgctagatgctccactggagatgaagaagctgcagacggctctgaatgcctgcgagatgagtgacgatgagcaggatcaggaccaggatcagcagaagcagcagcagcagcagcagcagcagattgccaaacgtacaacagccacaactgccgttacgagtagtaccaccaaagacccaacatcaacagcagccacatcgaggataacgagagccactaccctgagcacggttgacgaaaagccggacagcaagctggtgcgtcagcgggtggcactgcagcagcaacgccaacagcaacagcagcagcagcagcaggatcagcaacatgtaccgaagtcgcagtcattgtcctcctcctccacggtcaaagattcgctggaggtggtggaggagacatccctgatagatgccagcaacgagaccacaacacctgttgcaacaacagccgcttcatcaagtgctcccatgcccagcagttgcagtacgggtgcgatacctcggcttaataggccgggcatctcgacgggagccacgcccaaaacgacgaccacgacgacgacgcccaccattacggcacggctgcccacgtcgcagtcgcatccgacgagctatgacctgccaccggccctgccgcacacctattccgcaacggcgacggtacgcggaccactgggcatgtccatgagcagctccacttccggcaagggaatgggaactgccttcacattgccgcccaccacgacagcgattagtctgctgccgctgccggcgccttcgacggtggccaccgcctcatccaccagcacaacgatagccagtattcccggccaggtgctggacacaagcggagtaacgagtctgagtctgagcctaatgcgaccggccaccgcatccggtgtggtactgagcggattgaccacctcatcgttcaccaccggcacggatcatcaaaaatcacatccgtcatccgccggttcggtgatggggcgtggcagtagcctactcctttcgcctcccacagcggcagcggcgtcgtcgtcctcgtcgtcgagcaaattcgagccagaattggtgctcagtccggctaaccttggccagtagaattaaatgggatttagttacgtttttagttagccaccaggtctatatatatgtatatgtctaggttctagaagcgcgtgtgcatgtgcaacaggatgagtgtctgcgtgtgtggtgagctgtgtgtgagtgatggtgaatggttaagatcgactagagtttagatacctatgtaccctaaaactatcttttgaatgtgccacaggaaccactaagagaaacgaatacaccccttaactgaatctctaccaagaagtcatgttctgaaacataaatcaagtaaattatatttaaaacaaaagctacaattaggtacatcaattggctaaactttaatcatcaatcaataagactctataattaccaatcagaacatgtcgctattatttccattcaactccgcaactcgctttcagtgtctaatcgagtatatttcccgaggcttaactcctctattcttcgcaagccacttgatttccctgcccatcttttggatgtatcatccaatctatagctaacgaatattttcccaacattctagatctgtgtgtcaggctttaggtggcatattatacgcccgtgctcagcaaaatgttgccaacctgcgctgttcgaagctatcccaaattgaaaacaaaaactaaaaacatagccagggtattataaagtttgtataccaaacatatcgttaactaaatacacaaacgaacaatttaaaaaagaaaaccaattataatatgaaacaaagaaaggtaaacttggagcgtcgtcctaattaataaaaactaatataaacaaactaaaaacccaattagatatgtacgaataaagtttggggtataaaactaaatggaaagaagcgcaaacattagtatctggtaaatgtgcgggtgttttcaaaaaatacaaataaacccaaacagtttaaaaagtattatgcaatcgctggagagctctccaaaacatacaaaataagaattctcaaattctgcgaaactct

SEQ ID NO: 39437 - DNA, 1728 bp, DROSOPHILA
atggtcacgatcacctcacctctgtggccggccgatctcctcgaaaagtgcgcccaaggacgtgccgcctggttggagcggggtcgacgctgcagcgtccaggatcagcaacagcagcaggccacctgccaccgacgctgggtgaagcgcaaccgaatccaagacgcctctttgggcggctcatcggacgatgaggatttcctgggcgttctgcggggtcctagcacctttgcgaatgcctttctctacgtgggcctgggcacggtggcactgggactcgtcatcgcgttcgttggcaccggcgagaagggcttcaaaaccacggaactaagacttataggcccctctctcataggcaataaaatagctaatggcaagtgtcagttgaacatcaaaaagacgcggaagaaaaacggcaacaagattgatgcagatcacacgacatcgttgctcagaaacgagagcaaaagacccaaatatcccatagcgcacaaacgcagccagagcaaaatgctcaacgagggaatggaggcactgcgtcagatagccaccacatccttgttcatgcagaacgagcagaagacggccatcaatcgcgtggtgccgatcatcaatgagccggaaagcggtgatgctccactggagatgaagaagctgcagacggctctgaatgcctgcgagatgagtgacgatgagcaggatcaggaccaggatcagcagaagcagcagcagcagcagcagcagcagattgccaaacgtacaacagccacaactgccgttacgagtagtaccaccaaagacccaacatcaacagcagccacatcgaggataacgagagccactaccctgagcacggttgacgaaaagccggacagcaagctggtgcgtcagcgggtggcactgcagcagcaacgccaacagcaacagcagcagcagcagcaggatcagcaacatgtaccgaagtcgcagtcattgtcctcctcctccacggtcaaagattcgctggaggtggtggaggagacatccctgatagatgccagcaacgagaccacaacacctgttgcaacaacagccgcttcatcaagtgctcccatgcccagcagttgcagtacgggtgcgatacctcggcttaataggccgggcatctcgacgggagccacgcccaaaacgacgaccacgacgacgacgcccaccattacggcacggctgcccacgtcgcagtcgcatccgacgagctatgacctgccaccggccctgccgcacacctattccgcaacggcgacggtacgcggaccactgggcatgtccatgagcagctccacttccggcaagggaatgggaactgccttcacattgccgcccaccacgacagcgattagtctgctgccgctgccggcgccttcgacggtggccaccgcctcatccaccagcacaacgatagccagtattcccggccaggtgctggacacaagcggagtaacgagtctgagtctgagcctaatgcgaccggccaccgcatccggtgtggtactgagcggattgaccacctcatcgttcaccaccggcacggatcatcaaaaatcacatccgtcatccgccggttcggtgatggggcgtggcagtagcctactcctttcgcctcccacagcggcagcggcgtcgtcgtcctcgtcgtcgagcaaattcgagccagaattggtgctcagtccggctaaccttggccagtag

SEQ ID NO: 39438 - protein, 575 aa, DROSOPHILA
MVTITSPLWPADLLEKCAQGRAAWLERGRRCSVQDQQQQQATCHRRWVKRNRIQDASLGGSSDDEDFLGVLRGPSTFANAFLYVGLGTVALGLVIAFVGTGEKGFKTTELRLIGPSLIGNKIANGKCQLNIKKTRKKNGNKIDADHTTSLLRNESKRPKYPIAHKRSQSKMLNEGMEALRQIATTSLFMQNEQKTAINRVVPIINEPESGDAPLEMKKLQTALNACEMSDDEQDQDQDQQKQQQQQQQQIAKRTTATTAVTSSTTKDPTSTAATSRITRATTLSTVDEKPDSKLVRQRVALQQQRQQQQQQQQQDQQHVPKSQSLSSSSTVKDSLEVVEETSLIDASNETTTPVATTAASSSAPMPSSCSTGAIPRLNRPGISTGATPKTTTTTTTPTITARLPTSQSHPTSYDLPPALPHTYSATATVRGPLGMSMSSSTSGKGMGTAFTLPPTTTAISLLPLPAPSTVATASSTSTTIASIPGQVLDTSGVTSLSLSLMRPATASGVVLSGLTTSSFTTGTDHQKSHPSSAGSVMGRGSSLLLSPPTAAAASSSSSSSKFEPELVLSPANLGQ

SEQ ID NO: 39439 - DNA, 3801 bp, DROSOPHILA
cattagctaggcgaatggcaaaatatgcattgaaaattttatagaaaacaacgcaaacttaggcaaaacatacatatatatatatttaaaccaaatactttgtttaaatggtcataatcccacaaggaaatcaagcacagctccaactaaaacatgtcgatggatacacccagacaatacgcccaaaagtatgcaatttgattgtgcagatagaatattttttaaatgtttataagcagagattgaactatttgtaaaacatattttaatagacaccgaaaaccaaagaacaaactttttgaaacatattttttatatacaaacaagacgacgaaaaagttgaacactgcgaatatgcacaaaacatatatatttcggataaccctagcctaagttaaacatttgtacaattttcatttcggatacatacacatacacatacatttactttcgatggtttcacgacaacttattttaggcctggcatacaaacattcggttaaagcttaagcaagtaatccaaagtacaatcatttatgtcaaacgggacaacaccacagcacaccagatatattgggcaaggataattctgataattctgaaatagaaatacaaagcgataaggttgaacagtcgtttttacagggacaaacgagatcgaaacactttttgctaacaattttttaaaattcgttttacacactcgctttataagattgctaggcgatttcaggatagaccgctaaaaatacaacagcagcatagttttcaaactgaagagaaacggttaatggaaaaaaaattgaaaggaagatattaaagatatttaatattaattatttagactaaacttgagcttaggtccgtcgacaaaaccactccaaaaccgaatgtaataccctgtacttagtgtgtaactagaggtgaagcttcccaaacccgaacccaaaacccaaacccgtaaccgtatccaaatccgaagtccctcccctcgatcaagatgtatgcagctgctggtggcgcctcgctggcttcgcgccaggcgcggcagcgccaacgacagcagaagaagacgcaacagctccaggcgaaactgcatccaccgaaggcggccggattggcatccgatcatgccgccgagggcgcatccacgcccactcgcagccagtcgcgccagttccatcagctgccccagaactatctgcgtgccccgcagccgcatggacggaaactcagcgccacctatacgacgcaatcgaagctcctactgccaatcgaggagggtgacacgcagtcggtgtcgcagctgcgcatgcactcgcacgctcattcccatggccacgcctacgcgcactcccactcccattcccatggacccgcccacgccgcacccgctccgcttagtcatcatgggcaaacgccctaccagcagttcgcctcatcccacggacgcgtctcaccgaaactggtgcaccggcactccggcagcagcagcagtgccggcttccatccggtcatctctgccggacagctgcacaaatccgcaacggccacgctgccgctggtctcgcatatggaagcggaggcgatggcggtgtcgccatcggcggtggccggcgttaaaacgacagtgacctcgttggagacagccacgcccacgtctccgccgctggccagcacatccgctgccgctgcagccgcaatggcggccgaggcggaggcagagttagctggcgccggcgccatgtttgttccccaccatgatgccatcattgtaacgccggccacgcccatggcctcgcccggccacgtggccaagctgcggcgtcccgggcccgaggagctgctcttcgactcctccgccgaacgacagccgctgaccgccgacgagaccctggacgacgaggatgagccaatgcatccgccggcgccgggtcagctggagcgtaagtgcagcgtgtacaggatgcgcaggagcgacgccttcgagcaggacactggcggcgccagtggtggtgttggtggtgcaggcagtggtctcaagcggcagctaagggagctgcagttcagcaccggagtccagcagacgcagtacgaaccactgcttgccgatgaaccgcagctgatcttcaaaggattgggggtcaatgggcgcaagatgcagatatgcgcctactgcgaggagggcatctgcgtgtgcgaacacctcgaggtaattccgggcacatcctggctaaccctgatcccgatgatatatatctatgattcctattccccgattttggtaaatgctagcttatgtgtcttgtgcatgctgaataattctcttatccttgtttgagtgttagttttctctgagtgtcgtcctttaagtgtgttcaatggttaacatacgtatcttatgctttggtagtatattttttaactgggagtaacaatatacttaaaatgatgataatgatcttgtatgataattaggtaaactataaatttatataggggctacagttttatttaaatattaatgaaacattgtggaagtgtgaaatggtgttaggtggaagtatttatttgatttataatggtgtttaacactttaatcaagaattaatttcatatatctaaactaaaaacgaaaccaataataccaaccaataaccatgatgagcaaataacttatttatacgttttcgagttgctactgagctattatggtacatcgacatttccctgaggtatcaccactgattccatcacagacacactatcagcaggatgcattttcagtgaagttatcatgaatgtactaaaaaacttagaaatattcaatcgaggctgtgcaagcagctctaacatcccacacccacgctgttttgtgcatgtatggcatttataataaggacaagtagtttttggcaggagtcaaccagcttggtgtgtccgtgcagctttcctctcgactagccccatttttgaggcgatgccataacgacggcatcgacaaggaaaatgcgagaaacgacgactgcaagtgcatgcataacaacaatcccagaatcggaagcgcataatgtgcctttgtatcggcctgataatgcaccctgcccgacttgggaaaaaaatgctttggcaggctgtatccacccactccgcccccccccccctatcacactctctttccacacagcttcccagccaggtcacctcctccgtgtggcgccacttgccaaatgttgtgtaaaaggctaatggcaacactgaatgtgtgccataaaagtgcagggtggccgccatcgcgactttaagtttcgtccttaaagttccttaatcacgactcacttaatgcgccctggatgactgcatgagtggtaaattaaaaaactcagcactgcgctattatttgagttgcataggcagcgaatcaactatatatatatatggggaataaagctctaaacttgcgcaaattaaacaaaacgtgcgcacaaaagaaatctctgtaagaaccgttttgaaggcggatgcgccgttctaggcgaataaaactatttctacaaaacaaatacattccactgaatcgacacaagtatacccattagctgatgggatgctattttcattaatataactcgaacacatttataaacttgcatttaggacctctttgaatatataccaagctatctttgggactttaaagtcttaaattgtgttatttattataagctatgtaagctggataacaaatagatacaaaaatgttttggacataaatacacttaaggcaatgtccctagatat

SEQ ID NO: 39440 - DNA, 1254 bp, DROSOPHILA
atgtatgcagctgctggtggcgcctcgctggcttcgcgccaggcgcggcagcgccaacgacagcagaagaagacgcaacagctccaggcgaaactgcatccaccgaaggcggccggattggcatccgatcatgccgccgagggcgcatccacgcccactcgcagccagtcgcgccagttccatcagctgccccagaactatctgcgtgccccgcagccgcatggacggaaactcagcgccacctatacgacgcaatcgaagctcctactgccaatcgaggagggtgacacgcagtcggtgtcgcagctgcgcatgcactcgcacgctcattcccatggccacgcctacgcgcactcccactcccattcccatggacccgcccacgccgcacccgctccgcttagtcatcatgggcaaacgccctaccagcagttcgcctcatcccacggacgcgtctcaccgaaactggtgcaccggcactccggcagcagcagcagtgccggcttccatccggtcatctctgccggacagctgcacaaatccgcaacggccacgctgccgctggtctcgcatatggaagcggaggcgatggcggtgtcgccatcggcggtggccggcgttaaaacgacagtgacctcgttggagacagccacgcccacgtctccgccgctggccagcacatccgctgccgctgcagccgcaatggcggccgaggcggaggcagagttagctggcgccggcgccatgtttgttccccaccatgatgccatcattgtaacgccggccacgcccatggcctcgcccggccacgtggccaagctgcggcgtcccgggcccgaggagctgctcttcgactcctccgccgaacgacagccgctgaccgccgacgagaccctggacgacgaggatgagccaatgcatccgccggcgccgggtcagctggagcgtaagtgcagcgtgtacaggatgcgcaggagcgacgccttcgagcaggacactggcggcgccagtggtggtgttggtggtgcaggcagtggtctcaagcggcagctaagggagctgcagttcagcaccggagtccagcagacgcagtacgaaccactgcttgccgatgaaccgcagctgatcttcaaaggattgggggtcaatgggcgcaagatgcagatatgcgcctactgcgaggagggcatctgcgtgtgcgaacacctcgagacacactatcagcaggatgcattttcagtgaagttatcatga

SEQ ID NO: 39441 - protein, 417 aa, DROSOPHILA
MYAAAGGASLASRQARQRQRQQKKTQQLQAKLHPPKAAGLASDHAAEGASTPTRSQSRQFHQLPQNYLRAPQPHGRKLSATYTTQSKLLLPIEEGDTQSVSQLRMHSHAHSHGHAYAHSHSHSHGPAHAAPAPLSHHGQTPYQQFASSHGRVSPKLVHRHSGSSSSAGFHPVISAGQLHKSATATLPLVSHMEAEAMAVSPSAVAGVKTTVTSLETATPTSPPLASTSAAAAAAMAAEAEAELAGAGAMFVPHHDAIIVTPATPMASPGHVAKLRRPGPEELLFDSSAERQPLTADETLDDEDEPMHPPAPGQLERKCSVYRMRRSDAFEQDTGGASGGVGGAGSGLKRQLRELQFSTGVQQTQYEPLLADEPQLIFKGLGVNGRKMQICAYCEEGICVCEHLETHYQQDAFSVKLS

SEQ ID NO: 39442 - DNA, 4510 bp, DROSOPHILA
gatcagccgagaacttgagctgcgtaagcggttttgaccctttggtgggaataactgattcggcagcggatgttaatgtttacattagggtaggctggatttgttattgtcaccagaatttgggttcttattggatacatgattttatgacttatatcctaaggcattctatgattttgtgtatggctgttcctatgtggttatgtatgtgtgtgtgtgtgtaagtatatgtggtcttatactatggcacatatgctactatataatatatatcaatatctcaaatattttcgaaagggtgtacagaagtcgctagcgtgagaatgtcactttattatgttccaacttgttttccatttcgtcattttattttaacaacaaatattacatttgcgccatgtttcctgcttgtttttcggcattcgcttattaaatgtggcgtgcacgtgttggtaaactgaggcacacaggcgctgccactaacactcactcacactcgcgcagacacgacagtcgccacaccaacacacgcgcagtttggagtcgcacagacacgctcggcagacaatgtgattccgccattaatattaacgttaaaggagcaacaacaaaatgctcatcaaacatgcggcgtttagtaggcgcacatacacacacagaaataaacaggcacacacacacatactacacacacgcttataaaaaggacaaatgcctgcgactctgtgtgtgcgagagtgaacgagagcgctgtcggccatttcctttcgtctttcgcctctttccggtgcgttgaatgtttcgctttccgttttcgttcactgcttgttttttctttttccacttttttttggtgtctttcagttggcgtcgagcgtttccttaaggcaaacgcagctttgatttgccttccgcgtgtgctgctccgcaaaaggaaatatatttaaaaaatatctaaatattcgcgcgtgtgttttccgatcacttatattcgttgataatggctttggtggcccatcggatgatgttgcctgcgcggcatcgacgcaacaccacccagcaggtggcccgcaacaaggtgggcgtgctgctggttcccagtgtggcggattgctacggcgcggagatggcacccggcgtggccacgcctctacccactccggccgcctcccagctgcacctgccacaggatgcggcagaagcatcgggcgatggcagcggctcaaaagtgagtgcaacaagtcggtgcaacgacccacattcggttggttgtgcatggaaatggaaagaatttccaccggggatttccaccgaaatagcagcttcgttttcttgtttttccttctcctacggtttatgtttttgccttcttttttttggctacgactggcgccagctttatttggtcaaatgtgtgctgtgcgatttagggacatagatgtgttgttgttggtcatggtcgggattagaaaaaaacacttttacttgatcaagtatacgacatgtggccgtcaggccataagaaatattaaagtgggccacatacataagtttgaaagatgaatgatagttgaaaacgcaaaagccatgttcttttaaggcaactgagtactgactataataactgagtcttttatattcaattgaattttgaatagcaatatactttattaatgttcgtcgctttaaaaagatcaaaatctgcgtgtttaattgattctacagtgtatttaatgcttatatgacagcgaaccaattaaaacccaattgttcctgattgaagtcccagtatttgattaaaagttccgaagtgcgtgacgataaattgtttttttacgcctcttcgcttgctccgtaaatggaatttttaatccttggcggcactgtcgatgtccttaattgaatggggtgtgctccgtggctttgggctggctttgttttggttctcggacgcaatggcaccttccattattccgatgttaccacgcgtgatgaacttgtcgccgaccaccactgcacagtagtccataatttatttagcccaaaggtcggtcgcgggggtggtggcactgacaccggctaaattaatcaataatttcagctctaatgcatggccttgacatggcataaatagaaacaacctgcttaaattagccaagttcgttagccattaagcctgcagaaacgacggattaaaatgttaagtaaactggagtttttcgacttaagctgtgtttgtttgttattcaacaaaagtttggttgttaaatttgtcgcgcaatcttttttgtgatattcaaaggtatttatatagcagtggatgcctttaagatttaacattttcttttataaaatagccttcagtcaatttcgcacttcttgattcaattattcaaaaaggaataaaatccctcacaaacagaacctatcccaacaataacaatgctgatgaaaaaggaaactcaccacaatgaagacatgaacctaaaaagctttagcaattagctttaacagaccaaaacagcaagctacaagcaaagctttttagaaagaacctacttaatttccatggcttcctacctcaatactagaaccttgagttttcgaaagcactccgtggttattcgatactgaccagcttacactgaccaacttgttgatgcctcgacagaacgcacatttgtttatgtttattccgttcggttcaccgtcatttatttattatgacgaagaattatatgaataaagttgagcaatgccgcggagtagtagaaaatcgctggcagtttatttcatttggagccaccagttggtttagttggttggttggagttggtttaccctctattctactcatccacgctggcttctcattcgagaaaggatttcgagccagctgcctatgtggaagtccgcaatggtagttgtctcaacgcggaaaaatcacccggcagacgggaaaatgagatcatcaggtcggccgcccaagagcacgaacggaaaatgcgacaacgatttgtggagaaaaccaacagagatcataatgaaaaattcaaacataaaactgaatacgactaagtagacatagaaatttgtttcaaatatatgacattggaaaattatattctattggaagtagaaagtcggcttgtttttgaccaatttgtattttcttcaaaaatgtttcccacctattcgatcaatgatgtcgccgccaatgaggaagtagatcatacccagcaagacttatcttcaaaagtcgaagccgatatgcagtcgatcattcgtttggcctaccaggagaacgaggctctgatccaccaaaaagttatgagcgcgatgaagcaacgcgaagaggagttggccaagctgtgggatattcgatcatcattatcaagcttagcgcagatcagggctgctcgtgatgaggaactaagagctctattggaccaaatcgtttcgaatgcggacagtagcgatgaagatgaagaaaaggaagatcccttttaatgtcaccatcatctgttaattaaatgcttgagtggcctaaaaaaacaagcgattagttatacctatttgcgaatggaaagatgttaagaacatcttaaggttgcagacaacatgaaaatccttctcctaattaattcaagtaaattaatttgggtgttgacgtcttcatctaaattttactagtcagaaaccagcatggacattttaatcaacataaaatctagattaagctgggattaaaaagtttgtgtaatgtttgaccgatgataccttggaaaaacatgtatacagagacccataatgcgatattcagaaagacataaaagcttacagggatttatgtatgaacaaagtgggtggtgtaaataataaaacgacttgtgtggcaattacgagaatgatgatgatgatgatgataaggcgaagctggcaaggtctcgtgtgcatcttgtaagccgcatggccaattgtcataatttatgcaacaaggagccccaaaaaaccaagcagtcaacgttttgtcccccactgaaactttaattaagttgaacttatctatgccttacacatgagacttgagcgtgtgcggtatccccagcctttccctaccccctctccccctctctttcacactgctatcgccgtctcgctctcttcacgcgtaagccagaaagcgctctcaaatatgcaaatgaatgtggcactgggacgtcaaatgtggctttacacccgcacactcgcccacacaaatactctggcaccttggggaacatgcattttggtcatgtttacaatgtcagctaggataacacactgcggattgcagcggttgtgtgtctgtgtgtgagctgccgagctttcacactggaaaaaattctgcaattgaaaatattcctcgcatttaaagaatagactgctcagaaactattgaaaatatggaaaaatattattaaggtctttcaatcattctaattgagtattgctctcttttggtaggtga

SEQ ID NO: 39443 - DNA, 462 bp, DROSOPHILA
atggctttggtggcccatcggatgatgttgcctgcgcggcatcgacgcaacaccacccagcaggtggcccgcaacaaggtgggcgtgctgctggttcccagtgtggcggattgctacggcgcggagatggcacccggcgtggccacgcctctacccactccggccgcctcccagctgcacctgccacaggatgcggcagaagcatcgggcgatggcagcggctcaaaatcgatcattcgtttggcctaccaggagaacgaggctctgatccaccaaaaagttatgagcgcgatgaagcaacgcgaagaggagttggccaagctgtgggatattcgatcatcattatcaagcttagcgcagatcagggctgctcgtgatgaggaactaagagctctattggaccaaatcgtttcgaatgcggacagtagcgatgaagatgaagaaaaggaagatcccttttaa

SEQ ID NO: 39444 - protein, 153 aa, DROSOPHILA
MALVAHRMMLPARHRRNTTQQVARNKVGVLLVPSVADCYGAEMAPGVATPLPTPAASQLHLPQDAAEASGDGSGSKSIIRLAYQENEALIHQKVMSAMKQREEELAKLWDIRSSLSSLAQIRAARDEELRALLDQIVSNADSSDEDEEKEDPF

SEQ ID NO: 39445 - DNA, 3677 bp, DROSOPHILA
gcttagctgtatctgtatccgtatctgtatcttcgtgtcaaggtaagtctactcactaagcttcttttatattcctttacctttcggaacatcgtaagtgttgcaaagttctcaggcacctcggctaaaaaagaaagtaaaaaacaaacacttgtttttttttatacgtgaaattgtattgatttggctttttaagagggccctgcatttgcattattgatgactgcaattttgtggccagcgaaaacgaacaacgaccctttgtggcactgaccctaaaatattccatgctgtttaattatgcatgctcggcctgtatgagaaggtcaacctccttagtaaacagatgtttcccttggccagttcattgtggcgtatacgtgatgcaaactgacgcacttaagtgtccctaatcaccgttaatgacaacgctgtatatgctcgccccattgacatatagaacctcctatgtaacgcccatatatcatgataaataggaatgcccctgctgacatttcctccccccacccgccaaaaacccaaactcaagccacaaatgctttcatattttgtttgttgtccattggcacccaaacaaagcgcagcaaatggttaaggtcaagttgggcgcgtgtcgaagtggaggaataggagtcggaggacgtcaagttatgactgagtgcttgtgggtggcaaaggagccggatccggagacttcggaatgtgaggggtctattgaatgtggcatgcgtgctcatatatgctctaattagggattcgacaaggaaacaagtcataaatggaagggaatcgacaaatacactgcaaaaataataaaatgggaaatggaaatgtttaaaattattttgacaatggcaaacaagaaactcagaattattttattttttctttgtattaaccatttagtttttcaacatagaatttaggtctttttatcattacataaaatgttgtgtttcttcaaaacgcactacctaacctacattccaacaagtttagcaagatccttggtgacctgatttttcggaatcttcggtttggtgggttgtttagtgatgagcacctcggtggtggccaaaagggaggcaattcctgcggcagacgtcatggctgattgcaacacttttgtgggatccacaattccccggaccacaagatcgccgaattccccagcggcggcatcatatccgtagttgccactgccctttaaaacccgacgtagtacctcgttggggtccactccagcattccgggcaattgtatagcatggtagtcgtaaagcgtcctttacaatctccctgccaacctggagctccattatatcggttggcggcaactcgtccagaactggaatacatcgtagataggcggttcctcctccgggaaccacaccatcacttatggccactcgaacggcgtgaagggcatcgttgaagcgatcctttcgctcgctcacctccagctcactggtaccgcccacgaaaatggtggccaggtggccctgcaagcgaccaagtcgtgttttcaggcgatccagttccacatcggtgaaagcctcatcgatcagctcacgaatgtcctggatgcggcactgcacctgctcctcgttcacattgatcggttgcaataggtgcgtttccttagcgtccaccaccgcctccatcacctcacccagatcctcctcgctgagatccgccagactggaggcatcctccagaagatggccaccggtggcaaaagctatatcctccatttcctcgcactgctcgtccccaaagcttggagccttcacagcacagacctgaactcgaccttgcagattatttagcactaagatcttaagcaaatcgctaccaaaatttttggcaatgatcagaaggggtcgttcttttagtctggccagctcgagagcgggaagtatctgttccacttgatcaatcttagccaaagtgagcagcagcaagcaattctccaattccagggtatgagattgcttggcaaagaatggcgaatagtagcccgaagcgatggttataccctcctggatcttagcctcatcgaagggactgtgggattccttcagcaggatgacgccgctatcgcccagctccaaaatgatgtcaccaatcagctccgccagccgttcgtctccattcagtgccaccttggccactgcttccacttggccaatagtatccaccgactgggacatctcacctagagcatcgcacacagcgcgcgatccctcgagaatgccctcccgcaggagttggacgttcaccttgctctggcgcaacacatgcataccctggcaggctattccacgggccagaatagtggccgtggtggtgccatcgcctaccttattattggtattattggtggcctggcgcagcaattgaactcccatatcctgccgacgattgcccagctgcacgttattcgccaccgtgatgccatccttggtgatccggggcgagatcagcagctgttcgatgagcacgttcctgcccttcgggcccagagtggtggccaccgcgttggccaggacgttcacgccctgcataagcaggcagcgcgcctcggctccaaagcgaatgtcattggcaaaggtgcgcacaccggcccgaccactccggcccaatctgctcagcatcctgattccttgatactcacgttgcttgtcgcaattttgagagaacttttaatttacgtttatcaaaagctttaactgaaatttaattaccttgatatcggtaaagtgtagaaaatgttaatctggaaaagttcggtcatttttgaagggtaactcactgaaatatatataattacaacttcgcggtttgttggtttataaaaaaaaagtatttttattgatcaaaaacttaagcgaattgtcggagacaaattcacgtcttacacaattgaagtatgaataaaatctaaatctaatttgcaaagcgaacgcttagcaaacccttggctgagcttatttacttcttcatattgagcgtacataggctctcatttatgtttacgttaattaggcgctctcttgagtggattgcgcatggatatagatcagccgagtttgagctacgtggaaagttttgacccttaaagctgtgttagcagttttgaccctctggtgggagtcgcgaatgcggctgcggatgtttatgtctgttggattgggtgcattcttgagtggatcactcatgggtactgatcagccgagaacttgagctgcgtaagcggttttgaccctttggtgggaataactgattcggcagcggatgttaatgtttacattagggtaggctggatttgttattgtcaccagaatttgggttcttattggatacatgattttatgacttatatcctaaggcattctatgattttgtgtatggctgttcctatgtggttatgtatgtgtgtgtgtgtaagtatatgtggtcttatactatggcacatatgctactatatatatatttatttatgtatatatttactatatttattttattaaataaataaataaataatccattaccattttccaaatccattaccattttaccaaacactagcactcaagacgcgatttagtcgacttctcacaaaaatctagtcgcaactgatccccgaaaaat

SEQ ID NO: 39446 - DNA, 1677 bp, DROSOPHILA
atgctgagcagattgggccggagtggtcgggccggtgtgcgcacctttgccaatgacattcgctttggagccgaggcgcgctgcctgcttatgcagggcgtgaacgtcctggccaacgcggtggccaccactctgggcccgaagggcaggaacgtgctcatcgaacagctgctgatctcgccccggatcaccaaggatggcatcacggtggcgaataacgtgcagctgggcaatcgtcggcaggatatgggagttcaattgctgcgccaggccaccaataataccaataataaggtaggcgatggcaccaccacggccactattctggcccgtggaatagcctgccagggtatgcatgtgttgcgccagagcaaggtgaacgtccaactcctgcgggagggcattctcgagggatcgcgcgctgtgtgcgatgctctaggtgagatgtcccagtcggtggatactattggccaagtggaagcagtggccaaggtggcactgaatggagacgaacggctggcggagctgattggtgacatcattttggagctgggcgatagcggcgtcatcctgctgaaggaatcccacagtcccttcgatgaggctaagatccaggagggtataaccatcgcttcgggctactattcgccattctttgccaagcaatctcataccctggaattggagaattgcttgctgctgctcactttggctaagattgatcaagtggaacagatacttcccgctctcgagctggccagactaaaagaacgaccccttctgatcattgccaaaaattttggtagcgatttgcttaagatcttagtgctaaataatctgcaaggtcgagttcaggtctgtgctgtgaaggctccaagctttggggacgagcagtgcgaggaaatggaggatatagcttttgccaccggtggccatcttctggaggatgcctccagtctggcggatctcagcgaggaggatctgggtgaggtgatggaggcggtggtggacgctaaggaaacgcacctattgcaaccgatcaatgtgaacgaggagcaggtgcagtgccgcatccaggacattcgtgagctgatcgatgaggctttcaccgatgtggaactggatcgcctgaaaacacgacttggtcgcttgcagggccacctggccaccattttcgtgggcggtaccagtgagctggaggtgagcgagcgaaaggatcgcttcaacgatgcccttcacgccgttcgagtggccataagtgatggtgtggttcccggaggaggaaccgcctatctacgatgtattccagttctggacgagttgccgccaaccgatataatggagctccaggttggcagggagattgtaaaggacgctttacgactaccatgctatacaattgcccggaatgctggagtggaccccaacgaggtactacgtcgggttttaaagggcagtggcaactacggatatgatgccgccgctggggaattcggcgatcttgtggtccggggaattgtggatcccacaaaagtgttgcaatcagccatgacgtctgccgcaggaattgcctcccttttggccaccaccgaggtgctcatcactaaacaacccaccaaaccgaagattccgaaaaatcaggtcaccaaggatcttgctaaacttgttggaatgtag

SEQ ID NO: 39447 - protein, 558 aa, DROSOPHILA
MLSRLGRSGRAGVRTFANDIRFGAEARCLLMQGVNVLANAVATTLGPKGRNVLIEQLLISPRITKDGITVANNVQLGNRRQDMGVQLLRQATNNTNNKVGDGTTTATILARGIACQGMHVLRQSKVNVQLLREGILEGSRAVCDALGEMSQSVDTIGQVEAVAKVALNGDERLAELIGDIILELGDSGVILLKESHSPFDEAKIQEGITIASGYYSPFFAKQSHTLELENCLLLLTLAKIDQVEQILPALELARLKERPLLIIAKNFGSDLLKILVLNNLQGRVQVCAVKAPSFGDEQCEEMEDIAFATGGHLLEDASSLADLSEEDLGEVMEAVVDAKETHLLQPINVNEEQVQCRIQDIRELIDEAFTDVELDRLKTRLGRLQGHLATIFVGGTSELEVSERKDRFNDALHAVRVAISDGVVPGGGTAYLRCIPVLDELPPTDIMELQVGREIVKDALRLPCYTIARNAGVDPNEVLRRVLKGSGNYGYDAAAGEFGDLVVRGIVDPTKVLQSAMTSAAGIASLLATTEVLITKQPTKPKIPKNQVTKDLAKLVGM

SEQ ID NO: 39448 - DNA, 2656 bp, DROSOPHILA
tgaagtctgcaaatccattcgaggagctggagaagttcgtggatgattgtgtacagcgctatggactacagctgaggcgatacgaaggagtccttaaggttgcttttgagcagctgatagccgaggattcccaggtgaaggccatcttccttggctgccggcgcagcgatcctgaaagttgcaatctatacgagctggaacctaccaacaacggatggccagcgatgatgcggatcttcccgctgcttgagtggagctaccacgacatttggaactatttgcgctcaaacaatctgccctactgctgcctctacgatcagggctacacatctttgggagatcgcagctcaacgcgggtcaatcccagtctgctggcttacgacgaaaagctggacaagatgacctatcgaccggcctacgaattggagaatgtgcgtcttgagcggttcaacagggatgagcatggccaggcctcagtcagcggatccaaacaataatcattggccaaagttcaggtcaagcgcaaagtttctggctctgctcttgacttgattttcttttaattttttcccgacccaaaacgagacaaagtggagcagcaagtgtcagctaactgggccgacaattcttcgttgagaccccatttcacttgttcacatttcgcatatcacacaattcgaataacttgaacaaaccggcctagccccttatacaacttttaactactgtataagagaaatgctagtaaaagttttagatatttggtgagttttgtcaaagcttttcgctgcaaaagctcaggaactctgtgttcttaagtgttgaaattttgatgtattaaattaactatttgtttatctgtatttttttcatatgttttaacttcattaaataataaattaaaaaatggatatttatttctgtaaacttgtctttataatgtattaataaatattataaacccgaatattacgtctttagaactgctatttctttgggcttacttaggctcccttatgaaataaaccaactcatgtgtcggttgcgtttggtccttacttggtggtaatgatgtcgtggtactggttccatcttcatccaccaggagcagtcggtgattgcgcctatgacatttctgcttctgggacgacttcttcgctttttcgattacgttgccattaggatactcctggctggatgactgtgcctgtggtgtgtactccaagagatcacgataaactttccacaaactctgatcctcggaacggtccagccagttaagcagatcctgaatagttttatcatgccggtgggccacttgcgaattaaagggcggatgttttcgagtggcaaactgtgcgcggtagccagttttgttggttttcggagtaagactgacgcgaaaccattgctgatcctgcggatcctcgcccagtagtgagtattcgaagtcaggagctaccgaggacgtctcctgcaggagacccaaatgatcagtggtggacaccacgctgttgttggctgccgtcaacggtacttgtctacgaatgttgcaatattgtattgttctaaagagtacacaattagaaatatttaccccaactgagagtatctggccaaatcggtgggtacggctcttccaccgctggctagcatacacaaaattattattcccatatacggtttgttccacattttgccaattttcgctgactgctgtaaggtttttgagttcacatcgttatatagtgttcatgcttgggttttgtcacttttcccggttgctggggaatcatgttctgcgtataaaccggcatgtaaaagtagctgaaatgattacgattggacaaatgctatttctcggatagctaacactggtgatatactgtcacgtttgtggtttgagttacaattttgtattttaaatgctaccttctttggaatatctcccaaatttgcatatctttagataataaatgtgagatgttatttaaactctacctactgtgtagttgtattgaaaagctcaaaacatttttgatgggtgtcacatttctctattattaattagaaattaaagaggattttccttttccttcttgtggctaatacgaatatttgcctatggaattcatttggggaaatgccacttggccaagtcacttccggtgcgctctttccgtttccgctttgctctcgcaacagcattgccaacatgaacgaatgttattatcagtgaaattggcgacctttccaatgtgggtaaactctgaaggatgttaatcaacaaggctactttcactttagcacacagctaggaccgccacaccgcaccccttcgtcctgcggtgagcgtgcgcccgagagacgactttctctcgcccatttctcagcacactctccattgctctctgtcagccttttaacagcagctgagacggcacagctgtttggcattttgcgcgcgcactttgctaaaacaaaacgaaacgcatatcacacatacgcgccgtggtacgtcgaaggcaactctccttgggctcgacaggactcggaaccgtttcgcacgctcagtagacaatctttcctcatttcgttaacacactcacagcacctttaagcgaaccaataataatatacagaagaatttccccaa

SEQ ID NO: 39449 - DNA, 600 bp, DROSOPHILA
atgctagccagcggtggaagagccgtacccaccgatttggccagatactctcagttgggacaagtaccgttgacggcagccaacaacagcgtggtgtccaccactgatcatttgggtctcctgcaggagacgtcctcggtagctcctgacttcgaatactcactactgggcgaggatccgcaggatcagcaatggtttcgcgtcagtcttactccgaaaaccaacaaaactggctaccgcgcacagtttgccactcgaaaacatccgccctttaattcgcaagtggcccaccggcatgataaaactattcaggatctgcttaactggctggaccgttccgaggatcagagtttgtggaaagtttatcgtgatctcttggagtacacaccacaggcacagtcatccagccaggagtatcctaatggcaacgtaatcgaaaaagcgaagaagtcgtcccagaagcagaaatgtcataggcgcaatcaccgactgctcctggtggatgaagatggaaccagtaccacgacatcattaccaccaagtaaggaccaaacgcaaccgacacatgagttggtttatttcataagggagcctaagtaa

SEQ ID NO: 39450 - protein, 199 aa, DROSOPHILA
MLASGGRAVPTDLARYSQLGQVPLTAANNSVVSTTDHLGLLQETSSVAPDFEYSLLGEDPQDQQWFRVSLTPKTNKTGYRAQFATRKHPPFNSQVAHRHDKTIQDLLNWLDRSEDQSLWKVYRDLLEYTPQAQSSSQEYPNGNVIEKAKKSSQKQKCHRRNHRLLLVDEDGTSTTTSLPPSKDQTQPTHELVYFIREPK

SEQ ID NO: 39451 - DNA, 2765 bp, DROSOPHILA
ggttgatgatttcttagactgttggtagcagactgcgatgcttctggcttcgacacttgcggtttatatacccgatgcaatgccatcaaaagtgcagatgcaagcactgaccaagttttcagtttacccaacgacccctcgaagtcgacgtgagtggcgctttttttgcacggccaacagaaagcgaaaagaacaaacatttcctctactttttttgggccactgaacttgttgagtaaacaatttgtcgcatgccaaaaatgtaaattaatgaagtaacggaactaaaaattgttgaagcaccaagaattgaatgtacttagctttgcattgagctacattattttactgaacaattgaaataaatgtattaaaataaatattatatgtgaataaattatttatatctaaaatatttatttagttcaatgagcttaatttttcacaagaatttgtaatcgcgtgccgaatatgcggtcattgcaaaaaatattcgtttatagttttgcctagcaacaattgttttttcataaaccttctttatgaagttctttcaaatctgttggttaagtaacctttttgcttctttggaaaaatttgaagacactttttcctaaaaagtttttaaaaataattgtatagctgtgtatagttaaaagttctttatgtttttttaaatgattaattcatttctttaaagttttcaaaaattatgaataaaaaaactattttctaatttcatatttctggaaaaaatccatagataatccgtagataataagaaaaagctttattaggctttgtaagataaaaaaacctcgacttaaatctattttaaatataaaaaaaaattgaaaatttgtgacctatataataggaatacagcagtcataaaatgctttatttcaattcaaaaatcgatgttgcttttatatttacattatccaaagcaatacattaaattaaccaaagggcttgagtttaattttatctcgtcaaaatgaaactcgcttcgcaattttggcacacagtctgccgtcattatcgcacaagtcgttggttgcatattccgccagttgaaaagagtgaatcaaatgaccaattgagggacaaactcgagtacactgaagaggtaataaaacgcgccatgactttgtataagccaaatgagatgatgctgtcctttaatggtggcaaggattgcacagtcttgctggatattttggccaggatgacgccaccctcgatgccactgggagcggtttacgtgaagtctgcaaatccattcgaggagctggagaagttcgtggatgattgtgtacagcgctatggactacagctgaggcgatacgaaggagtccttaaggttgcttttgagcagctgatagccgaggattcccaggtgaaggccatcttccttggctgccggcgcagcgatcctgaaagttgcaatctatacgagctggaacctaccaacaacggatggccagcgatgatgcggatcttcccgctgcttgagtggagctaccacgacatttggaactatttgcgctcaaacaatctgccctactgctgcctctacgatcagggctacacatctttgggagatcgcagctcaacgcgggtcaatcccagtctgctggcttacgacgaaaagctggacaagatgacctatcgaccggcctacgaattggagaatgtgcgtcttgagcggttcaacagggatgagcatggccaggcctcagtcagcggatccaaacaataatcattggccaaagttcaggtcaagcgcaaagtttctggctctgctcttgacttgattttcttttaattttttcccgacccaaaacgagacaaagtggagcagcaagtgtcagctaactgggccgacaattcttcgttgagaccccatttcacttgttcacatttcgcatatcacacaattcgaataacttgaacaaaccggcctagccccttatacaacttttaactactgtataagagaaatgctagtaaaagttttagatatttggtgagttttgtcaaagcttttcgctgcaaaagctcaggaactctgtgttcttaagtgttgaaattttgatgtattaaattaactatttgtttatctgtatttttttcatatgttttaacttcattaaataataaattaaaaaatggatatttatttctgtaaacttgtctttataatgtattaataaatattataaacccgaatattacgtctttagaactgctatttctttgggcttacttaggctcccttatgaaataaaccaactcatgtgtcggttgcgtttggtccttacttggtggtaatgatgtcgtggtactggttccatcttcatccaccaggagcagtcggtgattgcgcctatgacatttctgcttctgggacgacttcttcgctttttcgattacgttgccattaggatactcctggctggatgactgtgcctgtggtgtgtactccaagagatcacgataaactttccacaaactctgatcctcggaacggtccagccagttaagcagatcctgaatagttttatcatgccggtgggccacttgcgaattaaagggcggatgttttcgagtggcaaactgtgcgcggtagccagttttgttggttttcggagtaagactgacgcgaaaccattgctgatcctgcggatcctcgcccagtagtgagtattcgaagtcaggagctaccgaggacgtctcctgcaggagacccaaatgatcag

SEQ ID NO: 39452 - DNA, 765 bp, DROSOPHILA
atgaaactcgcttcgcaattttggcacacagtctgccgtcattatcgcacaagtcgttggttgcatattccgccagttgaaaagagtgaatcaaatgaccaattgagggacaaactcgagtacactgaagaggtaataaaacgcgccatgactttgtataagccaaatgagatgatgctgtcctttaatggtggcaaggattgcacagtcttgctggatattttggccaggatgacgccaccctcgatgccactgggagcggtttacgtgaagtctgcaaatccattcgaggagctggagaagttcgtggatgattgtgtacagcgctatggactacagctgaggcgatacgaaggagtccttaaggttgcttttgagcagctgatagccgaggattcccaggtgaaggccatcttccttggctgccggcgcagcgatcctgaaagttgcaatctatacgagctggaacctaccaacaacggatggccagcgatgatgcggatcttcccgctgcttgagtggagctaccacgacatttggaactatttgcgctcaaacaatctgccctactgctgcctctacgatcagggctacacatctttgggagatcgcagctcaacgcgggtcaatcccagtctgctggcttacgacgaaaagctggacaagatgacctatcgaccggcctacgaattggagaatgtgcgtcttgagcggttcaacagggatgagcatggccaggcctcagtcagcggatccaaacaataa

SEQ ID NO: 39453 - protein, 254 aa, DROSOPHILA
MKLASQFWHTVCRHYRTSRWLHIPPVEKSESNDQLRDKLEYTEEVIKRAMTLYKPNEMMLSFNGGKDCTVLLDILARMTPPSMPLGAVYVKSANPFEELEKFVDDCVQRYGLQLRRYEGVLKVAFEQLIAEDSQVKAIFLGCRRSDPESCNLYELEPTNNGWPAMMRIFPLLEWSYHDIWNYLRSNNLPYCCLYDQGYTSLGDRSSTRVNPSLLAYDEKLDKMTYRPAYELENVRLERFNRDEHGQASVSGSKQ

SEQ ID NO: 39454 - DNA, 2579 bp, DROSOPHILA
tgacggcacgcttctgctccttggccaccttgatggcctggtcgcgctgcgccttgcgcacctcgggcttcatgttacgcttggccagaatctcggccagcgaggcaccgacgatggcgcgctggaacttctgggtgcggcgggtgcgcttcttggaggcctcctcctcgattcccttgcggtgcttccggcggtacagcacggtccacgtaaccttgcggggattgcgcttcatcaggtaggagcgctcgcacttcttgtccaggaaggtgaacgactgaaagcgtaatcaaagttcattagccatcctccatcgctagagcatcttcgccggaaactcaccttgccatcgatcttgaccatggtcttgccatgaccggggtagattttgtacccgctgaatgcgcacaagccaattctgtaaatacaaacactctcattagcaggggcactgtttactattgccgaaatggggttagacaatgccgaataccacaattaaccgagcatttcaacgcttttcattaacgtacttcatcttgctggcgtagaaacacgaaaagaaaagaaaacggaagtggaaacgaaaagctgagccaaattagtgtggctgccacgggcagacgaaaaaacctaaaaaataccaccacgtgccgaaggcgtgctgttaactgcgcgctgttaggcgcacagaattgaaaaattaaaatattaaggttattctttttgtatttttatttgttgtgtgtgctataatacacacataatacaaaacaatatacaaattattgcaatggaaaaaccccaaaactttcaattaagaactaagagaaattgaattttaaaattgtatgcaacttttctgtacttttctctttttttttaatctatttacgtttttcgcaattttggaacagacaaattaaaattttaagtcatttacaatggaagctactcttattggatcgatttcgcgcctaatttgaaacgaaagtcatatttagtccaccagcggatccgcttgctgcagctcaaaatcctcctcttcattgatttgtagtttctccttgagctttccaacaaatgggtacttcatcttgtaccgctgttcccactctcgtaatgtgttcatttggttgcgtgagaggtcgctcaaatcatcaaaatcctcgctgtccttcaagtcctctggtgaattgatcaaaatcctcgaaatatcccgaccggcatagtttggattaacgccatttcgtccgtaatagtgaacggatcgcgagacatcgtagatgttgaaaaggatggccactaggatgcgaccgtccgcccgtgtgccgtcatattcccgaagttcccgaaccgtaaagtccttccgcagtggcggaagatccacttcctgattattatcatcactgaagtctggttcctcgcggctcagacgacgcgcaaaaaatcccaacttgaggaacacgacgatcgacatgatcaaaagggtgacatcgatgggtgtttccttaagggaattgtaaagtttgcagtaccagctggtggtgtgttccatgcccttggagctctcagccatcctggtgctttcaattccagagtgtgaatgaatgaagtgaaaaattgtatgcaaactcccctaacgactgccttgtactgactgccctttgttaattgattgaagtattcagttaggccttctttttctgaaaatttaagtaaacaccaataaatcaggggattcgataccgataccggataccttttactcagctaatcgcattaccccttttgcgataccttgaaacttgtggaacatccacatcgattatattacactctttaattgtagtatagctattgaaacttattatttaaattgctttattgaaatgcataaatgggttatacaatattgtaagaaaatgctggtcaagttataacaaggaaatcaaggaatgggctgatgcatttcgaatacagtgcgctccatggcgaatgtgcgcttggaacgctgtatggcgacattttccattgcttcgttgaactccagaagagccttgctgaattccgaatcgctctcgatcatcctgaggaatatggtcgcctcgtcctcaaccttcggctccatctccttcttggcctgacccttcttcttcttggcctccagcttttccctggacttgcgttcctcctccaagaagatggtggtcaggcgcttcttcaacttgatctcttcctcgcgagcctccagaagtttgcagcgctgtatctcccgttcaaacatctgaactttcaggaaatacattagaaaacattgggatctggaagagatgataatcatcactcaccgacatcatgagagacttctccttgttggtggcacttcgcataccctcctccaggcggagcatcaggcaatcgccgttggccaggctcacggttagcattgttccatccggcttgaacaccagatgggtaacggcgtacttgtatttgatggtgagaatcggtcgtttgtgagacatcagcaggtcccaaaactccaagttgcccatgttgtctccgatgcagaacag

SEQ ID NO: 39455 - DNA, 579 bp, DROSOPHILA
atggctgagagctccaagggcatggaacacaccaccagctggtactgcaaactttacaattcccttaaggaaacacccatcgatgtcacccttttgatcatgtcgatcgtcgtgttcctcaagttgggattttttgcgcgtcgtctgagccgcgaggaaccagacttcagtgatgataataatcaggaagtggatcttccgccactgcggaaggactttacggttcgggaacttcgggaatatgacggcacacgggcggacggtcgcatcctagtggccatccttttcaacatctacgatgtctcgcgatccgttcactattacggacgaaatggcgttaatccaaactatgccggtcgggatatttcgaggattttgatcaattcaccagaggacttgaaggacagcgaggattttgatgatttgagcgacctctcacgcaaccaaatgaacacattacgagagtgggaacagcggtacaagatgaagtacccatttgttggaaagctcaaggagaaactacaaatcaatgaagaggaggattttgagctgcagcaagcggatccgctggtggactaa

SEQ ID NO: 39456 - protein, 192 aa, DROSOPHILA
MAESSKGMEHTTSWYCKLYNSLKETPIDVTLLIMSIVVFLKLGFFARRLSREEPDFSDDNNQEVDLPPLRKDFTVRELREYDGTRADGRILVAILFNIYDVSRSVHYYGRNGVNPNYAGRDISRILINSPEDLKDSEDFDDLSDLSRNQMNTLREWEQRYKMKYPFVGKLKEKLQINEEEDFELQQADPLVD

SEQ ID NO: 39457 - DNA, 3026 bp, DROSOPHILA
aaagttaatgacagcataattaaacaaaactaacagcagactaataaaatgttcatagtgcatgtcgctcaaggcctcggcacatcaccacgccatcacaaccccatcacctcgccacccacaatgccagctactttccatatctccaaatgtatatacatttatacaatacatatacctggcgagcatttcatgtcgttgtgtgtcaacgtttgtcaagcgacaattaaagtcataataaaggcatgctaaagacaattattatgtgcacgtcctgccacgccccccaaaaagaaccacccagttcgttcggttagttatgcataaagttcgccacaaaagggtttaacctgagcgtaaacatgcgctcctttgtctcgcaggcatataaatttcaaaattaaagcagagtttaacctttgtccttgtgcaaatggcagggtgggtctataaccacctgcctgcgattgtgtgagacccgcataaagagccttcggttttaatgcacgcgaaattgacttatttgatttattttcatagtttaagccaagggcttttattataagcatgctttaagtgagtggatttgagaggggattttaagaaaatgcaaggcaaaagttatatttatattcgcgttgttaattatttattgagtactgtattttgcggtgattaaaaaaataacgttgtgtttgaataaagaaaatcattgtcctcataacactgagaatgcataaaataattttttttttaattgcccccaagtacagtaaaacaaatgtgcacagagctttcttcgaaaagttatccaaccagcatgcattccactattcgctcattatggaaagcggctgattaaatattaactaatttaataaaatgccggcctgcttcaatattgaaatagtcagcgaatgtatttgcccaagcgcacgtagccgagatatataaaaggtggtccagggtgcagaatgattaggctatccgttgaccgacgatgcattcgaccaagtcagccgttctcctgctcgccctggccatcagcgccagctgcgttgttgccacaccgcatccggaattcttggatgaaatcttcggctccataaaccaaactggccagcacatcatcagtggattcgtgaatgccaccaggaatggcacggccattgctggtgagttcctggacagcataaggaactcctccgcccagtacacgcacgaaaccctggagtttgcccaaaaaatcgcagatgcagttcatagagccgccactgagtcaatcgtcgacttttccgcgactctgagggcgcagatcgacgcactgcatcaggggattgatcgggtgagaaacatcctgcagcgagaggcacttaaggatgctctcgccagactgcagaccgtcaataccgtcgtaaatgatctggaagtggccgtgaataacctcaatgatcggatagacgagaagaaacaagagtatttcgccataatccagaagaagtggtaccaatggtctgacgcccaattggaacgagtggataagctgacgaatggagttggcaacgaggaagccgaggagatcataaatgagctactctcccggtattccggatatctgcacagctgcctggaggagttgcaagcgcagcaagccacgtttgagcaaaatgtccaagaggccatcgaaaagtaccacaatgccaccaacgaactgacggaccaagtcgagctctgcgtccagttcaacctcagcttcctgtcctgccgcaatggcatcaatgaggcactacgcggactcgactcggctcccgcggagctgctcaccctgaagcttcaaggcatccgactactggccatcggcctgaatgccagcggatgtgtgggccagaccctggccgagcacgagctggagaagcccagcgtggagcgcaagctggatgagatcattgcggagtaccaggagcagcagacttccaccgatgacgactctagctctaataatgaaacgaccaccataagttcgtaggatttcggggagtcatccagtaatgaatatgacaactccagcaatgacgacgaatcctcatggaaatatttacaagaacgtatagtgtattttaggtgtcgggtagaagcagcaaaataaattactctaatgcaactaaattagaaattgttttccttcatcgtttatcaatgatgtttcttaataaactatgccaagcttctcaaaatatttcttaactttgaacagtactttaaaaattactctaccgcaaacgtattacccagataccgattaacttcatcaatggtgcagcacattttttgcggatgctaaagcaattattttaaaattgtcatattcatttatttaggtaaggcacgaaagtcgtggcaatttaaagacacgaggctttagtagattaattatttaaatgcattcgattctgcctttatatgtaaattaaataagggtgctaaataatatagaaaaagggaaaaagaaactaacttgcactcttagcacctcccctactaacaaatgatgcaaatgaactgagtgaattccccttaaaggacttccccagctgctataaatataaatagttgtataacaacagtaacgaaaggtataacactgaattaacaatctcaactgctataaaaatgaacttttgtgcttttgtataacagtcaattgaagaggacacgaagcgcgtagtacagcgtttataaagttttatgctgttatatttttcaatgaaaatgtgttatttcatatcgaatataacagatttgctataatattcaaattatggctccgttcaactagcatacatctgattctcatttatagctcatacgccatgtatacataactaacgtacagctgggtaaattacatttatagctcatacgccctgtataacacgtgtacgatttcccctttatgactttgcgaggggggcactaaatgaaccactcgagaataaatatttgctgaaataaaacgcaggctttct

SEQ ID NO: 39458 - DNA, 1026 bp, DROSOPHILA
atgcattcgaccaagtcagccgttctcctgctcgccctggccatcagcgccagctgcgttgttgccacaccgcatccggaattcttggatgaaatcttcggctccataaaccaaactggccagcacatcatcagtggattcgtgaatgccaccaggaatggcacggccattgctggtgagttcctggacagcataaggaactcctccgcccagtacacgcacgaaaccctggagtttgcccaaaaaatcgcagatgcagttcatagagccgccactgagtcaatcgtcgacttttccgcgactctgagggcgcagatcgacgcactgcatcaggggattgatcgggtgagaaacatcctgcagcgagaggcacttaaggatgctctcgccagactgcagaccgtcaataccgtcgtaaatgatctggaagtggccgtgaataacctcaatgatcggatagacgagaagaaacaagagtatttcgccataatccagaagaagtggtaccaatggtctgacgcccaattggaacgagtggataagctgacgaatggagttggcaacgaggaagccgaggagatcataaatgagctactctcccggtattccggatatctgcacagctgcctggaggagttgcaagcgcagcaagccacgtttgagcaaaatgtccaagaggccatcgaaaagtaccacaatgccaccaacgaactgacggaccaagtcgagctctgcgtccagttcaacctcagcttcctgtcctgccgcaatggcatcaatgaggcactacgcggactcgactcggctcccgcggagctgctcaccctgaagcttcaaggcatccgactactggccatcggcctgaatgccagcggatgtgtgggccagaccctggccgagcacgagctggagaagcccagcgtggagcgcaagctggatgagatcattgcggagtaccaggagcagcagacttccaccgatgacgactctagctctaataatgaaacgaccaccataagttcgtag

SEQ ID NO: 39459 - protein, 341 aa, DROSOPHILA
MHSTKSAVLLLALAISASCVVATPHPEFLDEIFGSINQTGQHIISGFVNATRNGTAIAGEFLDSIRNSSAQYTHETLEFAQKIADAVHRAATESIVDFSATLRAQIDALHQGIDRVRNILQREALKDALARLQTVNTVVNDLEVAVNNLNDRIDEKKQEYFAIIQKKWYQWSDAQLERVDKLTNGVGNEEAEEIINELLSRYSGYLHSCLEELQAQQATFEQNVQEAIEKYHNATNELTDQVELCVQFNLSFLSCRNGINEALRGLDSAPAELLTLKLQGIRLLAIGLNASGCVGQTLAEHELEKPSVERKLDEIIAEYQEQQTSTDDDSSSNNETTTISS

SEQ ID NO: 39460 - DNA, 4896 bp, DROSOPHILA
aaatcatagtgtgagtgatagtccgttctcggaagtggatcgttttgtggaggctgccaccagcatcaaccgttttccaaagaggcggaaactctcctcctgcattttccgaacctacgtctgcctgctgttggtcatccaggtcatcctggcatcgctgcagtggctcggatccacgtaccgctggaaaccgcagctgagtgcggccaaccgcggcctgtccgtcctgctactcctgatttcgtggatcaacctgacgctggccttcatgggcttccggcggctgcagttcaccttcccgctcaattggattgtctttgggtgcatcttcgagagcctcacgctgctggtggtatgtctgcacattctggaacaggacctaacgtggccgtttgtgctaattggcattggcgtgctggttgtctatacgctgctggggctgtgggtacctggattcctcacagccaacttgtggatcctaatcctggcaagcattgtggtcttcctggtctcgacagtggccttgagcgttcgcctgcagatgcgatactacgtgcccgctagcgtctgtttggttttcttcggaccctggaccatgtacaactcccagaagttgttcctgcaccacaagcggtctggttacgtagctcaccagtatttggaggcgtccgccaagatgttcatcaattatgccttcactgtgagtggcattatatttgcccaccgcttctcggtggacacattggatgcccacagttaggatatggtgatttcttggctgccatttttgtggtttagattttttataagtctttctaagtgctgtgcacaattaaattatgtgtcgcaaaattttttgttattcctcaattaaaacccccaaaaatatcatcgtggaatatattgtctgaagaaaaatgtcaactataagaaaaggtacgtattcatactagttttcagagctttgtcgtttgaaactgtaacttttcgccaatatggttcacttaccgggattgtggaccagtagccaatagcacatggtgacgatgaacgcatagacagtggcacaggtgtagagcacccagtacaagtggtgcaggcggctcttcttcgcctgccgcacaatctcgaagtcctcgcgctccaccatcatgccctgggtcactatccaggcggccagccaggcctggactgtgcagaagagcagtccccagtgggtcaggtagatccaccacttggcatagtggtgctcaaagtgctcgtccgtgcgcccaatgtccagcaaggagcagaccagtgccgccaggcaggtgatggccgttatccatcggtagaacaggtaaacgatgcgcacctgcgtgttccgttgccactaaatatgaggaagcttattagataaaggatctagttttctgaataatctatatgggaaaataaccattccaaggtacagatctatggatctgaatatgctatggctcacctggcataggtaaaagttgtgtcgatgcacatggtccggggtgaactccgggaagcagctgttccacaatttgctaaccatcattctctgattgcccaggcagctgcccgcgttggtggcgaattggttgaagccctcgcagctgtcctgcgaaggatattggtacgagtggtaggactgctgctgcagttgctgctgcgacggctggaagtgctgatgttgctgtgggaagtgcgactgatgttgctggtgatgttgttgctgctgctgctgctgatgatgctgctgctgctgctgttgttggtattggtagggctgatatcgctggtcctcaaggacacgctgcgactgaccaccaccaccaccccgaccgtctgatcccgccgatcctgctcctcccgctgcggctgagccgtgctccgtttggtactcgtgttgcggcggcgtcttgtggctgtgcaggctgtcccggccgctgccgccgtagggatgtagaaaatccggcaggtcaaggatgtgggccagctgcgtggcaacctcctcgtcgtcttcgtcctcgtcctcctcctgcagatggaagaagcgcagttcctcgagactcgagcagtccgtggagagcagttcctgcggcaggcactcctcgagcaggtcctcctcgtcttcagtggtgctggcaaagccaggcagatagccgtagttgtcgtaggcgtcgtaccgcctgcggggtgtggccttgtagcgatagccagcttgcagctcctccgccgcgctcccgtactcacggaacggcgaggtggagaccgctgatgctgatgccgctgctgcaacggctgccggagtgggcggtaccggtggcggaacggtccgtgtgctccggctgctgaagtaataatcggtggctacactcggcgccggtggcggtggtggtaaggctgccggaatggccaatggtggcaaatagccgggtgaagttcccgctgatgctaacagcggtgtcggcgaggcatcgaagttaataagcgccgctgccggataacctcctccggaatatccacccacgctccggtacggatacggaggatacggtgcgctgcccggtacaccgccgctgctggtggttccaatatagatgtgtgccgatgtggacggcagatggtaccagctggaatggcagaaggatgcaaactataatctgtgctattactatttctatgtttatggatttaatacctggctagattgccgctgcccagaccgaagcccaggcccagtccgagacccagatcggtgttggtgctaccgcgactgaagtagtagctgtactgctgctgctgctgctgttgttgttgttgttgttgctgctgctgctggtgctgcagttgctggtgctgcaactgcaactgctgggcggcaaagagctgctgctgctgggcaatctgctgatgctgctgatggggggctgcgtagtcggtgagccaacgttgccgcaggcaggagtaactctgctgcaactcacgctcgagtcgctgcagcagcaattgttgctgcagctgctgtatctgcagttgctgctgctgctgggctagcaattgctgctgcacgagctgctggtgctgttgctgctgttgttgttgctgctgttggccactaattggcaccgctctaaagtaaaactgcgcgtaatccaatgtgaaggcgttcctctacagcttcgacgcgcgtctaccgcattcacgcttggctatagtttgcgtcgctccccgctgttgcagttgttgctgctgtcttccgtatcctttgtgtccttttgtggcttttgctcctgttgcagttgcaagtggcaagacgtctgaacctgtaagtagagcaaggcattgagttgagttggctgcatttcaaatgcgagtgcataatgcactcattaggcgggcgttaagtatacgccgtgtgtacacagaaaaacaggggcgtgtgcgtaaattagtttctggtttatagtaagtataatcattttattattatctgtataaacgaacgttcaagtagagtactaaaacttcattaatttatgcttatgattgtattctctgtaaaatagataaccaagatataagctaatagatatggaatggtttaaatgggcttagaacattatgagccaccttaatcccgactacgaacccagattgaaaaggatacaaaatgaaaagtaagattaactgagcacacaattgatggctcctgaaatcgtttctttgaaatgccaatttgcagccgtgcaaactttctcagttttcgaggaattaaaaggagcacacaaaaacagaaacggttggatggaatccacgaaggcaatttctttgaaaggatgttctctaaacatacgttgaacatctaagaagtgtagaggcattcaaacgcatactatgctccctcgagtgttgaactctgttgaactcaaaaattagagcccataaaatggaaatttgaggaagtgtgatgacttggttagcttttagcaatatatttgcaaatatagaaaaagactagaggagcaaaaaattaatattactttttactagtccctacatatttacctattctcactaatttctaatattatagttgaattaaatttgtgaaaatataatgtgcagccattttggtcctattatcgccaaatgccgtgggctaaaccatttccacagcattatcctttcgctgcagaaatgtccttagcaagtgtgggtggggcaataaaatcaaatcaaattgcgcgtgcctcagcaaaacgcaaaacggcgaccaggaagcgccgttgtggcaattttggttgcgttgcttttccgctgcagaattgagttgcagttagttgagatgtctgcttcgcgtggggaaaatgtcggggtaactgaaggcaaaaattgctgggtgtgtgtctgtgtgcatttgtgctttttgacgtcatcagcaaatactttgctactggcacagggactggcactcgttttgttgctcttgttgtcgctgtttgcacagctgccatggggccgcatttagttgttgccactaccgctgcctgtagctggttgttgcaacatttacattggcaatttgcttggaaaagcacttgcgccaccatcctccatgtaccagccattcggagcacacacacaacacagacgccaacggacccacttccggccacaagtctgtgcttttggcctaaaccgaacttccgacattttcaccatgacctgaacacccttttgtttcgctgggcttactccaggggaaatcaggatgggctccttttataatatgcattaattaaattaaatacttcatttttcgctaatagatttgatgttgtaatgtaattaaccttcgataaattctataaatgcgctgtg

SEQ ID NO: 39461 - DNA, 2142 bp, DROSOPHILA
atgcctctacacttcttagatgttcaacgttcagacgtcttgccacttgcaactgcaacaggagcaaaagccacaaaaggacacaaaggatacggaagacagcagcaacaactgcaacagcggggagcgacgcaaactatagccaagcgtgaatgcggtagacgcgcgtcgaagctagcggtgccaattagtggccaacagcagcaacaacaacagcagcaacagcaccagcagctcgtgcagcagcaattgctagcccagcagcagcagcaactgcagatacagcagctgcagcaacaattgctgctgcagcgactcgagcgtgagttgcagcagagttactcctgcctgcggcaacgttggctcaccgactacgcagccccccatcagcagcatcagcagattgcccagcagcagcagctctttgccgcccagcagttgcagttgcagcaccagcaactgcagcaccagcagcagcagcaacaacaacaacaacaacagcagcagcagcagcagtacagctactacttcagtcgcggtagcaccaacaccgatctgggtctcggactgggcctgggcttcggtctgggcagcggcaatctagccagctggtaccatctgccgtccacatcggcacacatctatattggaaccaccagcagcggcggtgtaccgggcagcgcaccgtatcctccgtatccgtaccggagcgtgggtggatattccggaggaggttatccggcagcggcgcttattaacttcgatgcctcgccgacaccgctgttagcatcagcgggaacttcacccggctatttgccaccattggccattccggcagccttaccaccaccgccaccggcgccgagtgtagccaccgattattacttcagcagccggagcacacggaccgttccgccaccggtaccgcccactccggcagccgttgcagcagcggcatcagcatcagcggtctccacctcgccgttccgtgagtacgggagcgcggcggaggagctgcaagctggctatcgctacaaggccacaccccgcaggcggtacgacgcctacgacaactacggctatctgcctggctttgccagcaccactgaagacgaggaggacctgctcgaggagtgcctgccgcaggaactgctctccacggactgctcgagtctcgaggaactgcgcttcttccatctgcaggaggaggacgaggacgaagacgacgaggaggttgccacgcagctggcccacatccttgacctgccggattttctacatccctacggcggcagcggccgggacagcctgcacagccacaagacgccgccgcaacacgagtaccaaacggagcacggctcagccgcagcgggaggagcaggatcggcgggatcagacggtcggggtggtggtggtggtcagtcgcagcgtgtccttgaggaccagcgatatcagccctaccaataccaacaacagcagcagcagcagcatcatcagcagcagcagcagcaacaacatcaccagcaacatcagtcgcacttcccacagcaacatcagcacttccagccgtcgcagcagcaactgcagcagcagtcctaccactcgtaccaatatccttcgcaggacagctgcgagggcttcaaccaattcgccaccaacgcgggcagctgcctgggcaatcagagaatgatggttagcaaattgtggaacagctgcttcccggagttcaccccggaccatgtgcatcgacacaacttttacctatgccagtggcaacggaacacgcaggtgcgcatcgtttacctgttctaccgatggataacggccatcacctgcctggcggcactggtctgctccttgctggacattgggcgcacggacgagcactttgagcaccactatgccaagtggtggatctacctgacccactggggactgctcttctgcacagtccaggcctggctggccgcctggatagtgacccagggcatgatggtggagcgcgaggacttcgagattgtgcggcaggcgaagaagagccgcctgcaccacttgtactgggtgctctacacctgtgccactgtctatgcgttcatcgtcaccatgtgctattggctactggtccacaatcccggtaagtga

SEQ ID NO: 39462 - protein, 713 aa, DROSOPHILA
MPLHFLDVQRSDVLPLATATGAKATKGHKGYGRQQQQLQQRGATQTIAKRECGRRASKLAVPISGQQQQQQQQQQHQQLVQQQLLAQQQQQLQIQQLQQQLLLQRLERELQQSYSCLRQRWLTDYAAPHQQHQQIAQQQQLFAAQQLQLQHQQLQHQQQQQQQQQQQQQQQQYSYYFSRGSTNTDLGLGLGLGFGLGSGNLASWYHLPSTSAHIYIGTTSSGGVPGSAPYPPYPYRSVGGYSGGGYPAAALINFDASPTPLLASAGTSPGYLPPLAIPAALPPPPPAPSVATDYYFSSRSTRTVPPPVPPTPAAVAAAASASAVSTSPFREYGSAAEELQAGYRYKATPRRRYDAYDNYGYLPGFASTTEDEEDLLEECLPQELLSTDCSSLEELRFFHLQEEDEDEDDEEVATQLAHILDLPDFLHPYGGSGRDSLHSHKTPPQHEYQTEHGSAAAGGAGSAGSDGRGGGGGQSQRVLEDQRYQPYQYQQQQQQQHHQQQQQQQHHQQHQSHFPQQHQHFQPSQQQLQQQSYHSYQYPSQDSCEGFNQFATNAGSCLGNQRMMVSKLWNSCFPEFTPDHVHRHNFYLCQWQRNTQVRIVYLFYRWITAITCLAALVCSLLDIGRTDEHFEHHYAKWWIYLTHWGLLFCTVQAWLAAWIVTQGMMVEREDFEIVRQAKKSRLHHLYWVLYTCATVYAFIVTMCYWLLVHNPGK

SEQ ID NO: 39463 - DNA, 3891 bp, DROSOPHILA
tgttatcaattcactaattactaagcaaaccaatgccaagcgtatcctaaaattaatgttctttgctctacattcacatactccttgttcggcgccgtttatctgctattaaaaaaactgccaattctatttgccatctttgtgctcaataatcccaagaccttgaaaagagcccttccatgccaattaaatcaactattaattgtttatcccttctgcctcggatgatagatgatgcacgaactggcttaacacctgcaccgatatataaaatttgtgtggataaatggttaacttagctaattaaaaaagttcctaacttaaatcattgtaggcagtatgtcattatgttttctcggttttctcttgctgtgtggatttgaaaataattgctgacagtgtgttaatttgttatttgaacacaattgcttgattatgtcataaaatacatagataactgagttgcaaattaaatactgtgagtgggtttcgttaaatgtaaatatcatgttcaacttagtccattaaaactttttaaactgttggaacgacttgcagcaaagattaccatccaaaaaaaattccgaatacactcaacggtaatccttcgcattaatggaacaattctaatattctaaaacttttgcgtgctatatttgcatgcatgctatgcggcacactgagaagcgtctacacatttaaaaaggattggcaaagcttttacaaaattacgaaactacggttacaaactactttgccaaaaaaaaaattagcaataccatgtgcaatactgatttgagcccgatcaatcgatttggcctggcaggtatattcgaaaactagacgtctcgaaagcaaatctaaaaactaaccactgtgctcatgccaaatggcgctcctcctcgcagatggcactgcgcgtcgcctcgcactgggcacagtgcttctccagaaacttcatggacaagtggaacgtataccggtgccgggtgcaacgcctttacatcttgtactcgacgattttgttgggattgaggaactgctcccgttgcgacgcatccaaatgggctacggtgcgcgtcagtgccgagcccgaacccgatcccgatcccgatccctgtccctgaccctgaccctgacccgatcctgttccagttgctgatcccgaggaggacttgtgcttgccatcgccgccgccgccactggtgcgtccagtatccgtgccaatgggctggtaaacgccctctgcactgatcacacccacattgacgccggcgaccactggctgttggagatatccggaatactgtggcggcagctggtaattgcccggcggctgctgctgctgctgttggtggctgcccgcccgcggctgctccgtgtgggcaatgggatactgctgctgatgggcgtagtcctggctgctgcccacagcgccagcgccagccaccgagccgccagctgctcctccgccaccggctgatcctccagcaccgccaccgcccatccgggaaccggaatcatcgttcaggccctcacccatttcaccatcccgattgcgccgtccgcggatgcacagtttggtgaagagccagactcgtccgcggtaaaggaggtaacaacagaagtgaacgaagaacgtaaagatgatcgcacaggccgtcactatgatcgccttgcccggcttggtccagtccatcatgggatagatagcagtttgatttttcctgcaaacacaatcgtcattatcatccaaatttgatcaatcattttcagtgcgtatgaaaatcacctgtctgttccgccggccaagaaatagattcccgtgaatatggcgtaggccaggccaatgccagtggtaaagtaggcgtggctcatctttatcggatgccccacaatggccaaatcgatgagcattataatcgtgttgagcacatggaccattatgtttagcgcatcgatcttatggatttctgaaagataaaagatgtataaaagatatgttctctaattaaatggtttcccttttctaaagaactcgattaaaatgcacttcgttctattcatatatttggccctgcaggggaggctttttcacaggtgtccaatttaggaaatccctaatccatgaacatctcccactggctcttaacggatctggacaaaaacttttgatttgccgtctggccagcgtagtagaactcaaaaccaacgtcattggcggagtcaagaaagatgtagcaggcgagaaagtcgaacaggagcatcgtggagcacagcggcctatccagaattggcggtaaattctcccaatagccggatatgacctgcgcctggaacacaatcaatgggcatataacttgccagagcacaaagtgggtggctacttcataggagaatatctgatctgaaacgtgtacacaaacggcggccattaggacggaggagagcacaacgaatatgaaccaagtgaggaacaagtaggccattgcagggcattcgggcaatagatatgagccgaccagcaggagcagcgccatcatgacaagaatctccatgctcagcagcaggacgtgtcccgtccgctggtttgaaaggatacacaccgttcccagtgccagacaggctgctatgcagcagctgactatccagttgaaggggaacttccggcgcagccaagtgacgttgacatagacgcacagggtgaccaatccgatgacaaagaagcaataggtagccactacatccggaaccaggaggtatcgtctgaacaggcccggcaagatgagcagcccaatggccaggacaatgaacagcgccgcaatgccgtagatccactgggccaccttgagacgaaggcgcacgacgccatcgactggctgatcattcatcgatgtgggggatttcctcgttttctgcttgtttcccggcgcccgtgtcaagtgtcaaaggcgacagttcggcctgacagccagtatgttaagtgtaaccagatcggcatcagccccaaatttcagcgtgcgatccgttgtaacctatagctccacgagccacttcgaggcaaatcatagtgtgagtgatagtccgttctcggaagtggatcgttttgtggaggctgccaccagcatcaaccgttttccaaagaggcggaaactctcctcctgcattttccgaacctacgtctgcctgctgttggtcatccaggtcatcctggcatcgctgcagtggctcggatccacgtaccgctggaaaccgcagctgagtgcggccaaccgcggcctgtccgtcctgctactcctgatttcgtggatcaacctgacgctggccttcatgggcttccggcggctgcagttcaccttcccgctcaattggattgtctttgggtgcatcttcgagagcctcacgctgctggtggtatgtctgcacattctggaacaggacctaacgtggccgtttgtgctaattggcattggcgtgctggttgtctatacgctgctggggctgtgggtacctggattcctcacagccaacttgtggatcctaatcctggcaagcattgtggtcttcctggtctcgacagtggccttgagcgttcgcctgcagatgcgatactacgtgcccgctagcgtctgtttggttttcttcggaccctggaccatgtacaactcccagaagttgttcctgcaccacaagcggtctggttacgtagctcaccagtatttggaggcgtccgccaagatgttcatcaattatgccttcactgtgagtggcattatatttgcccaccgcttctcggtggacacattggatgcccacagttaggatatggtgatttcttggctgccatttttgtggtttagattttttataagtctttctaagtgctgtgca

SEQ ID NO: 39464 - DNA, 1590 bp, DROSOPHILA
atgaatgatcagccagtcgatggcgtcgtgcgccttcgtctcaaggtggcccagtggatctacggcattgcggcgctgttcattgtcctggccattgggctgctcatcttgccgggcctgttcagacgatacctcctggttccggatgtagtggctacctattgcttctttgtcatcggattggtcaccctgtgcgtctatgtcaacgtcacttggctgcgccggaagttccccttcaactggatagtcagctgctgcatagcagcctgtctggcactgggaacggtgtgtatcctttcaaaccagcggacgggacacgtcctgctgctgagcatggagattcttgtcatgatggcgctgctcctgctggtcggctcatatctattgcccgaatgccctgcaatggcctacttgttcctcacttggttcatattcgttgtgctctcctccgtcctaatggccgccgtttgtgtacacgtttcagatcagatattctcctatgaagtagccacccactttgtgctctggcaagttatatgcccattgattgtgttccaggcgcaggtcatatccggctattgggagaatttaccgccaattctggataggccgctgtgctccacgatgctcctgttcgactttctcgcctgctacatctttcttgactccgccaatgacgttgaaatccataagatcgatgcgctaaacataatggtccatgtgctcaacacgattataatgctcatcgatttggccattgtggggcatccgataaagatgagccacgcctactttaccactggcattggcctggcctacgccatattcacgggaatctatttcttggccggcggaacagacaggaaaaatcaaactgctatctatcccatgatggactggaccaagccgggcaaggcgatcatagtgacggcctgtgcgatcatctttacgttcttcgttcacttctgttgttacctcctttaccgcggacgagtctggctcttcaccaaactgtgcatccgcggacggcgcaatcgggatggtgaaatgggtgagggcctgaacgatgattccggttcccggatgggcggtggcggtgctggaggatcagccggtggcggaggagcagctggcggctcggtggctggcgctggcgctgtgggcagcagccaggactacgcccatcagcagcagtatcccattgcccacacggagcagccgcgggcgggcagccaccaacagcagcagcagcagccgccgggcaattaccagctgccgccacagtattccggatatctccaacagccagtggtcgccggcgtcaatgtgggtgtgatcagtgcagagggcgtttaccagcccattggcacggatactggacgcaccagtggcggcggcggcgatggcaagcacaagtcctcctcgggatcagcaactggaacaggatcgggtcagggtcagggtcagggacagggatcgggatcgggatcgggttcgggctcggcactgacgcgcaccgtagcccatttggatgcgtcgcaacgggagcagttcctcaatcccaacaaaatcgtcgagtacaagatgtaa

SEQ ID NO: 39465 - protein, 529 aa, DROSOPHILA
MNDQPVDGVVRLRLKVAQWIYGIAALFIVLAIGLLILPGLFRRYLLVPDVVATYCFFVIGLVTLCVYVNVTWLRRKFPFNWIVSCCIAACLALGTVCILSNQRTGHVLLLSMEILVMMALLLLVGSYLLPECPAMAYLFLTWFIFVVLSSVLMAAVCVHVSDQIFSYEVATHFVLWQVICPLIVFQAQVISGYWENLPPILDRPLCSTMLLFDFLACYIFLDSANDVEIHKIDALNIMVHVLNTIIMLIDLAIVGHPIKMSHAYFTTGIGLAYAIFTGIYFLAGGTDRKNQTAIYPMMDWTKPGKAIIVTACAIIFTFFVHFCCYLLYRGRVWLFTKLCIRGRRNRDGEMGEGLNDDSGSRMGGGGAGGSAGGGGAAGGSVAGAGAVGSSQDYAHQQQYPIAHTEQPRAGSHQQQQQQPPGNYQLPPQYSGYLQQPVVAGVNVGVISAEGVYQPIGTDTGRTSGGGGDGKHKSSSGSATGTGSGQGQGQGQGSGSGSGSGSALTRTVAHLDASQREQFLNPNKIVEYKM

SEQ ID NO: 39466 - DNA, 2492 bp, DROSOPHILA
cgcctggaacacaatcaatgggcatataacttgccagagcacaaagtgggtggctacttcataggagaatatctgatctgaaacgtgtacacaaacggcggccattaggacggaggagagcacaacgaatatgaaccaagtgaggaacaagtaggccattgcagggcattcgggcaatagatatgagccgaccagcaggagcagcgccatcatgacaagaatctccatgctcagcagcaggacgtgtcccgtccgctggtttgaaaggatacacaccgttcccagtgccagacaggctgctatgcagcagctgactatccagttgaaggggaacttccggcgcagccaagtgacgttgacatagacgcacagggtgaccaatccgatgacaaagaagcaataggtagccactacatccggaaccaggaggtatcgtctgaacaggcccggcaagatgagcagcccaatggccaggacaatgaacagcgccgcaatgccgtagatccactgggccaccttgagacgaaggcgcacgacgccatcgactggctgatcattcatcgatgtgggggatttcctcgttttctgcttgtttcccggcgcccgtgtcaagtgtcaaaggcgacagttcggcctgacagccagtatgttaagtgtaaccagatcggcatcagccccaaatttcagcgtgcgatccgttgtaacctatagctccacgagccacttcgaggcaaatcatagtgtgagtgatagtccgttctcggaagtggatcgttttgtggaggctgccaccagcatcaaccgttttccaaagaggcggaaactctcctcctgcattttccgaacctacgtctgcctgctgttggtcatccaggtcatcctggcatcgctgcagtggctcggatccacgtaccgctggaaaccgcagctgagtgcggccaaccgcggcctgtccgtcctgctactcctgatttcgtggatcaacctgacgctggccttcatgggcttccggcggctgcagttcaccttcccgctcaattggattgtctttgggtgcatcttcgagagcctcacgctgctggtggtatgtctgcacattctggaacaggacctaacgtggccgtttgtgctaattggcattggcgtgctggttgtctatacgctgctggggctgtgggtacctggattcctcacagccaacttgtggatcctaatcctggcaagcattgtggtcttcctggtctcgacagtggccttgagcgttcgcctgcagatgcgatactacgtgcccgctagcgtctgtttggttttcttcggaccctggaccatgtacaactcccagaagttgttcctgcaccacaagcggtctggttacgtagctcaccagtatttggaggcgtccgccaagatgttcatcaattatgccttcactgtgagtggcattatatttgcccaccgcttctcggtggacacattggatgcccacagttaggatatggtgatttcttggctgccatttttgtggtttagattttttataagtctttctaagtgctgtgcacaattaaattatgtgtcgcaaaattttttgttattcctcaattaaaacccccaaaaatatcatcgtggaatatattgtctgaagaaaaatgtcaactataagaaaaggtacgtattcatactagttttcagagctttgtcgtttgaaactgtaacttttcgccaatatggttcacttaccgggattgtggaccagtagccaatagcacatggtgacgatgaacgcatagacagtggcacaggtgtagagcacccagtacaagtggtgcaggcggctcttcttcgcctgccgcacaatctcgaagtcctcgcgctccaccatcatgccctgggtcactatccaggcggccagccaggcctggactgtgcagaagagcagtccccagtgggtcaggtagatccaccacttggcatagtggtgctcaaagtgctcgtccgtgcgcccaatgtccagcaaggagcagaccagtgccgccaggcaggtgatggccgttatccatcggtagaacaggtaaacgatgcgcacctgcgtgttccgttgccactaaatatgaggaagcttattagataaaggatctagttttctgaataatctatatgggaaaataaccattccaaggtacagatctatggatctgaatatgctatggctcacctggcataggtaaaagttgtgtcgatgcacatggtccggggtgaactccgggaagcagctgttccacaatttgctaaccatcattctctgattgcccaggcagctgcccgcgttggtggcgaattggttgaagccctcgcagctgtcctgcgaaggatattggtacgagtggtaggactgctgctgcagttgctgctgcgacggctggaagtgctgatgttgctgtgggaagtgcgactgatgttgctggtgatgttgttgctgctgctgctgctga

SEQ ID NO: 39467 - DNA, 492 bp, DROSOPHILA
atgggcttccggcggctgcagttcaccttcccgctcaattggattgtctttgggtgcatcttcgagagcctcacgctgctggtggtatgtctgcacattctggaacaggacctaacgtggccgtttgtgctaattggcattggcgtgctggttgtctatacgctgctggggctgtgggtacctggattcctcacagccaacttgtggatcctaatcctggcaagcattgtggtcttcctggtctcgacagtggccttgagcgttcgcctgcagatgcgatactacgtgcccgctagcgtctgtttggttttcttcggaccctggaccatgtacaactcccagaagttgttcctgcaccacaagcggtctggttacgtagctcaccagtatttggaggcgtccgccaagatgttcatcaattatgccttcactgtgagtggcattatatttgcccaccgcttctcggtggacacattggatgcccacagttag

SEQ ID NO: 39468 - protein, 163 aa, DROSOPHILA
MGFRRLQFTFPLNWIVFGCIFESLTLLVVCLHILEQDLTWPFVLIGIGVLVVYTLLGLWVPGFLTANLWILILASIVVFLVSTVALSVRLQMRYYVPASVCLVFFGPWTMYNSQKLFLHHKRSGYVAHQYLEASAKMFINYAFTVSGIIFAHRFSVDTLDAHS

SEQ ID NO: 39469 - DNA, 2195 bp, DROSOPHILA
tgagaatttgtgcgccacacatgtgtgacatacacaatgaatgcaactgtatgtaaagcatatatgtatagcatatatatataacgattccaagatatatttttaatttacctaattagagagaacttttgagaaaggccgcacatgcgaacaagcaagcacgtctgtaagtggatcgtagaaagaaaattaaaaacatttcgttttctgcgcgccgtcgacggactgtgcaaatcgataaacgtgacgacttccaagactgggggaaaagatttcgacgaatggaaaataataacaaaaacacggctataaatagtggccaagacgagcgacttggttgggtgacaaggcataaacgaaacgcaaacattgccatccatgccccgcctttccttgccatttccttgctccacacccactaagcgagcgtttttcttattattttgttttgtttttgttttagagtacaaactcttgttgccgcaaaactttggccaaaaatatcacacacaacaccacccgttagctgtgcatttttaatcgatgtttgccgtgcgactttaagccccattggtgggcgaacgaaaataagaaacatgaacgaaaacgactcaagaagtcaccaagaaatgctaaaaaattcgaaaaccagttcctcagctggttttggccacacaacacaatcttgtattcaaggtttctaaaaaatacaaacgagttgcacacaagaagtgagtcgctttagggtttttagttttactttttcggtcggactctgctttctgtgttaaaaattgaaagtttctctgccgcccaacttcaaataattgcagcatagatctgcagattgatatggttatttaaacttctaaattttctatgttgacaaagcgtttccttatgtgaacatctatttgtcacttgaatgtgaaaaaagtaaacattgacaaatactgatatagaaatcgacaaaagtgggaaaagacaatagcaagtcagaatggctggacgcgagggcggtaagaagaagcctctaaaggcgcccaagaaggactcgaagaatctagacgaggaggacatggccttcaaacagaagcagaaggagcagcagaaggctatggaggcggccaaggcaggtgcctccaagaagggacctcttcttggcggcggtatcaaaaagtccggcaaaaagtgatccattgccacaccttcatctgtatatcttggcatattcaaaacacaccaatgtggaccaacttttattatcccttgaattgaagtcttcacgttattgtacagcaaattactgaaaaaacatataacttttggtgtttggtatttgtcttcatctccaaattcaatacttcaatgtcattttttgcctttgatgtgcgtctttaactcgttatcgcccactgaccacgaaaatatcttgaagcctttacacattcaacttctcctcaaggtttccttaatcaaagcctagctgttttcggggcgctcgaaacttttctcgggtttttcgttacattttgttcacgctcaactccaattgccgccgtttcggttatatgaggctcaaagatttcgacaggccgattagaattgcaaagtgaggcgccatgcggcacaatttggttggtgtgattgttgttgccacggtggccactgtggtggaaccagctatcttccaaaaatattccattgctctatcaagtgagagagctactgataacctaaggtgcttgtcttttacaaggcaagtaacttggattacttactaaatttcagttaaattttgaaaacagttcaataatctcctgaagtctctaatcaatcacttaagctaattgtaatggctacaaccaaagccattaccaccagctgacaaaaaaacttttcccaagcttttttcacttagccgcatccaaattagtgcgccacgccccccaacccccctgaccaccctcgtggacgccacaaactgtcaatggtaacgcctaatgttattattttctagtcgccgttagctgtttatctagttgcgaatgcaaatggctgggaacagaaaaagccatggcaaaaccgggggcttggaggcttgagcggtgaaatgcctcaacgattgacgcccgcaacttggcctggcattgttttccacccaccggcaatgtgggttaataaccaaaaggcag

SEQ ID NO: 39470 - DNA, 195 bp, DROSOPHILA
atggctggacgcgagggcggtaagaagaagcctctaaaggcgcccaagaaggactcgaagaatctagacgaggaggacatggccttcaaacagaagcagaaggagcagcagaaggctatggaggcggccaaggcaggtgcctccaagaagggacctcttcttggcggcggtatcaaaaagtccggcaaaaagtga

SEQ ID NO: 39471 - protein, 64 aa, DROSOPHILA
MAGREGGKKKPLKAPKKDSKNLDEEDMAFKQKQKEQQKAMEAAKAGASKKGPLLGGGIKKSGKK

SEQ ID NO: 39472 - DNA, 2609 bp, DROSOPHILA
tgaaataatgctgagccccaaaattagtttatttgtatattctgtttgaaaagtatttttatgagttttaattatagtttgaattaggcgccaaaaagtgttgcaaagtatgaagataaattgctcctttaacttataaaaattataccatgtgctactgttactacataatattgtacaatctgcttatattaacttttgctttataatttaaaatgtaagttttgctttaaatccttaataaactcaaaatattacagccactgcttggtcagtgctgcaaaacgttccgttccgttaacagtggtctgtaaagccagctgattagcatttcgccaaaattatttcgctggcaacttgcttccgggatttgaatgtttttcgggctacatccgggctattaataaataaaaaatgtgttgtcaaatacccaaacaacgtccaaacgtagtgcgataatcgatttaataattgaaaacgcgaaaagcctgcaaaccaacgtgctaaatgaagtgcatgtgcatatgtgtgtgtggcccgggccttggccttttatttatcgaattcgtatcaattaaattaaaacgctgagcaatagtaggcaattggtatttatggtgacgatttggtagccggcaactgtagccactgataagcggacgacggggaatgcctgtgatttacgcgtatatatagtgtgtttaccctacctgtttaccgctcaaataaaaaataaaagaataaaactccaggtgtgataaggagcagccgtcgttcacgcctgaaaattgctcaatggaaacgtggcaataagactaactgagtacccagcatttaatttttctgagataatatcatctgaaagtgagagtaaaactgcatttctggtgctaattagttaaattcaggcgccaaaactctttcgaacagctcttttaatcaaaacttattactttaagctgactacgcttgctctcttttaagctctcttgttttgaaaatggctgagagcaatgtaccgctacgagatttcgacgaagagagcgaaacggattcggagaccgaattgctcatacgccgcgatgtaccgagcggtaaacagaacaacaacaacattagggggcgacgcaaaagctccatgggctacagcggcgtcgacgccggcgctggcagctctgccgccggcggcggaggcagctttctgggcaatcttttcggatccaacagttttggctctgccgccggccagatacgttatagaaatgagcggagtcgcgagcgcgccaaacactcaaacggtagctacagcagcatttcgaaactggcgcaattaacgcacacgtcatcgggcgtcgcgggggcgggatcgatcggtggcggtggtggtgggagtggcagtgccaccggcattaaagtaaccactggcgatggcagtgtagcggcatctggaggatctgctgccacgggggatctcagcaatggcgctacgcacagcacaaccgtcatagatccggaaaatggctcatccacggtcttctaccagcacaatcggcgtaaaagcaagagtcgcagcattggcaacgtctgcaagttgtgcctctgcaggtgagtgtgcattcggtgcgatccagtcgttaccctccaatgccaacgctgcgtatgcgcaatatttccatttcactgctgcaatagttggcggcagcgggagtaatgcgaaagtatatagtgccgcaacagctgttcactggccagcaaaatattgggaattcaagtgttacctttagggaaaatggttaaatgttttatattttcgcacataagcgtttaatggcgattgagacccttttacttttaccacaaggtattgaataaattataactatagcaggaagcaaaagttttaatctatcacattaagacctcgaaaatttgtatatttttgaagaaatattatctcttatcgcttcaatttaaatgtcttatgaaataaattagttttgtggaattttataatctgtgtttccgtagatagttgactttgaacgtagaataccattgctcataaaatgctgacaacactaggtataaaactgtttttcatcgtaaacttctataaataattgaaatgtatattaaatatttggcaagaaaaaacgttgacctctgtaacgttctagacattctatcactttcgcaactcaacagttgttatggcaaacaagttgttgttttgtttctgccacttgaaatatttgtttattattttttggcatgagccaaatcattgtgtggtttcccaaaatgagcagcgttgtcttgcaatttgatgttcttcttaacttagaacttttacgaaacacatttccaagaaaataaattctagctgaatgtgtgagaatttgtgcgccacacatgtgtgacatacacaatgaatgcaactgtatgtaaagcatatatgtatagcatatatatataacgattccaagatatatttttaatttacctaattagagagaacttttgagaaaggccgcacatgcgaacaagcaagcacgtctgtaagtggatcgtagaaagaaaattaaaaacatttcgttttctgcgcgccg

SEQ ID NO: 39473 - DNA, 609 bp, DROSOPHILA
atggctgagagcaatgtaccgctacgagatttcgacgaagagagcgaaacggattcggagaccgaattgctcatacgccgcgatgtaccgagcggtaaacagaacaacaacaacattagggggcgacgcaaaagctccatgggctacagcggcgtcgacgccggcgctggcagctctgccgccggcggcggaggcagctttctgggcaatcttttcggatccaacagttttggctctgccgccggccagatacgttatagaaatgagcggagtcgcgagcgcgccaaacactcaaacggtagctacagcagcatttcgaaactggcgcaattaacgcacacgtcatcgggcgtcgcgggggcgggatcgatcggtggcggtggtggtgggagtggcagtgccaccggcattaaagtaaccactggcgatggcagtgtagcggcatctggaggatctgctgccacgggggatctcagcaatggcgctacgcacagcacaaccgtcatagatccggaaaatggctcatccacggtcttctaccagcacaatcggcgtaaaagcaagagtcgcagcattggcaacgtctgcaagttgtgcctctgcaggtga

SEQ ID NO: 39474 - protein, 202 aa, DROSOPHILA
MAESNVPLRDFDEESETDSETELLIRRDVPSGKQNNNNIRGRRKSSMGYSGVDAGAGSSAAGGGGSFLGNLFGSNSFGSAAGQIRYRNERSRERAKHSNGSYSSISKLAQLTHTSSGVAGAGSIGGGGGGSGSATGIKVTTGDGSVAASGGSAATGDLSNGATHSTTVIDPENGSSTVFYQHNRRKSKSRSIGNVCKLCLCR

SEQ ID NO: 39475 - DNA, 4380 bp, DROSOPHILA
aagtgggttacctgcagctcctccgaggtgatctgtatgctggtgctaggcgccgaggcgcccagggaactggtctgcgggggcggaatgttctgcgatagcggctggaccaccgccgccgtgttcgttgagttgatctgcagctgcggcttggcctgctcctcgaatggattgtaatcctcaagagagacaagggcggcgccgctctggagtcgtcgtgcctgctggatggcggggtcctgcgggggaaaaccgggaaatcccaatcagaaaccaattcattcaacatatgtgacgaatgcacccaacacacacacacactacactcacaggcacgcacaccaacaccccacctttgcgtacgtgtgcgtgtgtgtgcgatgggttttttcttcggcttccgcgctctctctcctagctcttctatcgcctcaccgcaaacggattgtccagattgggctccccgaagggattctcgtcgagaccggagccggacatgggaattctactttggatacggctgttcaatgaccagaaaaacgcactgactcgcactttgcttttcgctgtgtatattttccctaagactctgctcagttatcgatgtcggttttagtgatggttcagcatcgataagctttcgttgggaatcaaagtgtaggcctcaaatatcgaaagaattactttaaagaattaatgttatttgaattacatattaaattcattttggcagaaaaacttattatttaacacatttaacattaatctagaattctgaaaaatgtgaataactggtatacaatggtctgattttttaggacctattaatacattttattaaaatgatagcaaaaagaaaagattctatatacaattggatgtaaaccagcagttatcatatgaattttaaatttaaatggcaacaatcgtgccaatcggaactgctccagctgaaccagctgcgtggaaccagttcccatccctggggccgccattccgcaattggaattctagtgtcttgggttgcgattcgattcatttaccgctgcccgcgtctccaattcggttgtgtgcgattctgtctgctccgcatccaagtcaaacatccaatccttgcaagaatgtcgaagcccagctacaaagtcggtgagttgcgttataaataaacccaaacggatggcaaactctcgaatcgaatctccggccggcaacaggcgacatgtgcgggtgaattgcatctattcatgagcacatgtttctgaggttaaaagagagacaaaacagaggagagcacgttgttgctggggcaaaaaacgtagaaattcagaccgtatggtgtataaatcaacagtgcctgcttatctgaccctatctcccttttatatcccactcgacagccgatatcagtctggcggaatggggacgcaaggcgatcattattgcggagaacgagatgcccggtctgatggcctgcaggaagaagtacggcccatctaagcccctcaagggcgcccgcatcaccggctgcctgcacatgaccgtccagaccgccgtgctcatcgagaccctcgtcgaactgggcgctcaggtgggttcagtgcctctttggcgctctaaatgattttatgcatcgtaccaccattcgaattgtatgcccaactgtaggtctgaacagtcgggataatacacaaagatagcatcatttcaatactaaaaaccatttcaaaaaccataaaaccgaccaaaattccgtaaggaaattgtaaattaggtagaaagataggtatctccaagcattgtccaagggctggtcccttatcacctttggtttacgcaccaatttgaataacaaaactttcgtttaacagcaggggggcaagttcaaggcgcccaagataagacctccagattgttatttcctctgacgcagcaccatctgcttcaatcctcgcacatggcaactattttctgccaaatgctgatgtcctgaaatacatagatttcctgatatagatcaatcctatatgcaatgcaaatcagtttgcaaatatctatataatttaggttccttcccatccacatctcaacttcaacgcatgaactacattttcattcttttatccaggtccaatggtccagctgcaacatcttcagcacccaggataatgctgccgcggccatcgctgccaccggcgtgcccgtgtacgcctggaagggtgagaccgatgaggagtacatgtggtgcatcgagcagaccttggtcttccccgacggccagcccctgaacatgatcctggacgatggcggcgatctgaccaacctggtgcacgaaaagttcccccagtatctgaaaaacatcaagggcctcagcgaggagacgaccaccggtgtccacaacctgtacaagatgttcaaggagggtcgtcttggcgtaccggccatcaatgtcaacgattcggtgaccaagagcaagtttgacaatctgtatggctgccgcgagtcgctgatcgatggcatcaagcgggccacggacgtcatgatcgctggaaaggtctgctgcgtggccggatacggtgatgtgggcaagggctgtgcccaggcactgaaaggattcggtggtcgggtgatcgtcaccgaggtcgatcccatcaacgccctgcaggcggcgatggagggctatgaggttaccaccatggaggaggccagcaaggaggcttccatctttgtgaccaccaccggctgccgggacatcatcaccagcgtgcacttgcaacaaatgcccgacgatgccatcgtgtgcaacatcggccacttcgacatcgagatcgacgtggactggctaaacgccaatgccaaagaaaaggtgaacgtgaagccccaagtagatcggtacacaatgcagagtggcaagcacatcatcctgctggccgagggtcgtctggtgaacctgggctgtgcccacggccatcccagcttcgtgatgtccaactccttcaccaaccaggtgctcgcccagatcgagctgtggaccaagtccgacaagtacgccgtcggcgtgcatgtcctgcccaagatcctcgacgaagaggtggccagtcttcatctggagaagctgggcgtaaagctgaccaaactgacggagaagcaggccacctacttgggcgtctcgcagaccggtcccttcaagcccgaccattaccggtactgagcacccgattcgccaaccggttccacacccgaatccataaccgaatcgggacgcggcgccggagacgacggacccacactagttatctattgtctgcgcatttcactgttcacctaagcagctccaataaaaacccatctcacgtactctcagcgagagaaaaccccacatagctccaatgttttttctttcccctctaaatggcggagcatattggtttagaatattagtttttgtacggcattaagtttatgggttttatacaatttattaagcttacatatattcatattcatacatatattcataatactaataatgttttcgaaatcgtgaaaatgctttgtcattatttgtaaagacgctcaaaaacatctccttttattttgaagcacgtgttgactatcaaaaacatacgatgtgtgaaagcaatctgattgttgaattacaacttgaaaaaaacagtgactcaacaaattaggatttctttaaataaataagatcaagggcaaaacgaaacatctggaagaaagtcaaaattcattatctaccaaaagttttggtccaaaacacaaatatgtaagcaaattctaagtgataatgcgtgaatggattttatatgcggaaaatggctttaagccttatctgcaactatttataaacaatgttgttaagcggagggaactaaataaatattttatgttaattgaataatacaatatttgtaatgattaatttattttgaaattccatttttctttctgatccccattaaaatttcgacctacgtccatgcacttgtatgatctcgtgcttatcgttatcgccatcatcccaattgtaacgtagggtattcgaggaaagagatggccgactctcgcagagcccgttaattatcagctggtcgccgtcgccatcccgctccctcccgcgagacaaatcatgccgccatcccgctcccacctgcaattgcaattgtaaaccgctgttttgtgagaattcacgctcattccagttggagcacttgttgcgtgcgaaaacattccggctaacggataacggctaacgaattacatcacctgagtggcggcgaaataatgtctccgcacggacgtcctggttgggaatggagctacctcctgctcaccctggccgtgggattcgcatccacc

SEQ ID NO: 39476 - DNA, 1592 bp, DROSOPHILA
aattggaattctagtgtcttgggttgcgattcgattcatttaccgctgcccgcgtctccaattcggttgtgtgcgattctgtctgctccgcatccaagtcaaacatccaatccttgcaagaatgtcgaagcccagctacaaagtcgccgatatcagtctggcggaatggggacgcaaggcgatcattattgcggagaacgagatgcccggtctgatggcctgcaggaagaagtacggcccatctaagcccctcaagggcgcccgcatcaccggctgcctgcacatgaccgtccagaccgccgtgctcatcgagaccctcgtcgaactgggcgctcaggtccaatggtccagctgcaacatcttcagcacccaggataatgctgccgcggccatcgctgccaccggcgtgcccgtgtacgcctggaagggtgagaccgatgaggagtacatgtggtgcatcgagcagaccttggtcttccccgacggccagcccctgaacatgatcctggacgatggcggcgatctgaccaacctggtgcacgaaaagttcccccagtatctgaaaaacatcaagggcctcagcgaggagacgaccaccggtgtccacaacctgtacaagatgttcaaggagggtcgtcttggcgtaccggccatcaatgtcaacgattcggtgaccaagagcaagtttgacaatctgtatggctgccgcgagtcgctgatcgatggcatcaagcgggccacggacgtcatgatcgctggaaaggtctgctgcgtggccggatacggtgatgtgggcaagggctgtgcccaggcactgaaaggattcggtggtcgggtgatcgtcaccgaggtcgatcccatcaacgccctgcaggcggcgatggagggctatgaggttaccaccatggaggaggccagcaaggaggcttccatctttgtgaccaccaccggctgccgggacatcatcaccagcgtgcacttgcaacaaatgcccgacgatgccatcgtgtgcaacatcggccacttcgacatcgagatcgacgtggactggctaaacgccaatgccaaagaaaaggtgaacgtgaagccccaagtagatcggtacacaatgcagagtggcaagcacatcatcctgctggccgagggtcgtctggtgaacctgggctgtgcccacggccatcccagcttcgtgatgtccaactccttcaccaaccaggtgctcgcccagatcgagctgtggaccaagtccgacaagtacgccgtcggcgtgcatgtcctgcccaagatcctcgacgaagaggtggccagtcttcatctggagaagctgggcgtaaagctgaccaaactgacggagaagcaggccacctacttgggcgtctcgcagaccggtcccttcaagcccgaccattaccggtactgagcacccgattcgccaaccggttccacacccgaatccataaccgaatcgggacgcggcgccggagacgacggacccacactagttatctattgtctgcgcatttcactgttcacctaagcagctccaataaaaacccatctcacgtactctcagcgagagaaaaccccacata

SEQ ID NO: 39477 - protein, 432 aa, DROSOPHILA
MSKPSYKVADISLAEWGRKAIIIAENEMPGLMACRKKYGPSKPLKGARITGCLHMTVQTAVLIETLVELGAQVQWSSCNIFSTQDNAAAAIAATGVPVYAWKGETDEEYMWCIEQTLVFPDGQPLNMILDDGGDLTNLVHEKFPQYLKNIKGLSEETTTGVHNLYKMFKEGRLGVPAINVNDSVTKSKFDNLYGCRESLIDGIKRATDVMIAGKVCCVAGYGDVGKGCAQALKGFGGRVIVTEVDPINALQAAMEGYEVTTMEEASKEASIFVTTTGCRDIITSVHLQQMPDDAIVCNIGHFDIEIDVDWLNANAKEKVNVKPQVDRYTMQSGKHIILLAEGRLVNLGCAHGHPSFVMSNSFTNQVLAQIELWTKSDKYAVGVHVLPKILDEEVASLHLEKLGVKLTKLTEKQATYLGVSQTGPFKPDHYRY

SEQ ID NO: 39478 - DNA, 3792 bp, DROSOPHILA
ccataaccgaatcgggacgcggcgccggagacgacggacccacactagttatctattgtctgcgcatttcactgttcacctaagcagctccaataaaaacccatctcacgtactctcagcgagagaaaaccccacatagctccaatgttttttctttcccctctaaatggcggagcatattggtttagaatattagtttttgtacggcattaagtttatgggttttatacaatttattaagcttacatatattcatattcatacatatattcataatactaataatgttttcgaaatcgtgaaaatgctttgtcattatttgtaaagacgctcaaaaacatctccttttattttgaagcacgtgttgactatcaaaaacatacgatgtgtgaaagcaatctgattgttgaattacaacttgaaaaaaacagtgactcaacaaattaggatttctttaaataaataagatcaagggcaaaacgaaacatctggaagaaagtcaaaattcattatctaccaaaagttttggtccaaaacacaaatatgtaagcaaattctaagtgataatgcgtgaatggattttatatgcggaaaatggctttaagccttatctgcaactatttataaacaatgttgttaagcggagggaactaaataaatattttatgttaattgaataatacaatatttgtaatgattaatttattttgaaattccatttttctttctgatccccattaaaatttcgacctacgtccatgcacttgtatgatctcgtgcttatcgttatcgccatcatcccaattgtaacgtagggtattcgaggaaagagatggccgactctcgcagagcccgttaattatcagctggtcgccgtcgccatcccgctccctcccgcgagacaaatcatgccgccatcccgctcccacctgcaattgcaattgtaaaccgctgttttgtgagaattcacgctcattccagttggagcacttgttgcgtgcgaaaacattccggctaacggataacggctaacgaattacatcacctgagtggcggcgaaataatgtctccgcacggacgtcctggttgggaatggagctacctcctgctcaccctggccgtgggattcgcatccacccacgggtggatggcccactttcgcccagctgcgctcacgttgcagatggagcgcggggatcgggtgcagctcaagctggagaatgtggcaccttccacgctgcagcagccgacgcgttaccacttccgcctggaaagtgtggacacggatttggccagtgttccaggcgagaatgccacgatatccctggatgtattcaacacggacacacgcgactggacgggtgacatcgtagttaatggccattttctgggacagaccaagatccaagtgaagctgtacgacagccagcgaaacaccagtgaactgcccaccaattggagcaacgacagcacgctggacgtgaagatcaagcgaccgaaacgtgtggtggatgacatattcctgggtacgatcatactactaatgtcgctgctgtacatcagctttggagccgccctaaatctggacgtgctgaggggtctgatcacccggccaaccggcccgtgcatcggatttgtgatgcaggtggtgggcatgcctctgctcagctacgccctcggcgtcttcatcttcccccaggcgccggccatgcagctgggtctcttcttcaccggcatctcgcccagcggtggggcatcgaacacctggtctgccgttctcggcggtaatatacacctctcggtgctaatgaccaccgtttctaatgttgctgccttcgccaccataccgctgtggaccataacacttggccagctgatcttcgagcgagcgggcatcaaggtgccttacggcaaaatcgcctcgtacagcagcagcctggtccttccgctcctgctcgggctgctcgtccagaagagaatgcctcaggtcgctagggtgctggtccgcctgctcaagcccgtctccgccttcatcatcctgttcatcatcgtgttcgcgatcatcaacaacttttacctgttctatttgttctcctggcaggtaagctgcattctctgaaccactagtttattgatactattcaagaatttccaaagaatatcataattttgatcgaaaaggtttatcttgcaaatgtttaaaaagtgtatatatacatctttgtatccactttcattgtaaacaattaactacaatttatccaaccagtttttttgaaagtgttaaaagattggaagcacttctggtttatcaacataaactatcgtgaatagtccataaataataaaaataataaacagcaagataaacctgttttggaaaacaacgtttaaaaacgtttaaagaaaaaggttaaatgtaaatgttatttttcttaatatgttaatataatcctttccagatcgtcgtcgctggcatggctctgcctggtctgggctacatcttcgccttcctggcagccaagctgctgcaccaaaatgcagccgacgccctgaccatcgccatcgagacgggcatccagaacacgggcatcgccatcttcctgctgacgaccacgctggaatcgccggaggcggacatcaccacggtggtgcccgtatcggtggccgtgatgacgccgctgcccctgctgggcatttatctgtacaaccggtgctggggcaacaagcgaattagtgaggccagcgccaccgcctccgaagcggagcggatagctggggcgatacattagcattaccatggctatatagcatggctatagcacatagtttctttgtacatattcgttattttgataacctatacatcgtgctagcgcacgtagacaaggctgagatagatgctggttaaatttgggaccaaggaatgccgcaaatctcaagcgtattatactccagaatttcacctaacacctaagacgaacccaaacttattgggataattattttttttacaataaaattaacctattaattttgcaagcgttatgggctatttatttgtaaatatattttatacagtttttgtgctatcgttaaatcgttaaacattaaggaacatgcatttaaatattcatatccaaaacgtttcgacgtgattgtataacaatataatttcaagagttgggcagcaaacttttatgcaaagtttcgattataagtggcggcgaaattttgaaataatgtgcaataatattatttagaaatgaatgtacagtaatatgggtctagcaaaaaagaatttccatcgatcatcactggtcacccatggtgtacgccagaagggctgcctcatccagagtcaccacttcggtggccagtgactgtaggatcttcattaggccaaatatggtgtgcgcgccgagattcagccggcggaattcgtataaaagacgcatatagttaactgtgcccgtgctcaagtccactccattcaacatattcggcaacagattgtagtaattgatcacgcagaaggctcgctgcaagtccggtccactgactgtggtcacatagctgggatccagacgccttcggctgaggaactcgcgcagcggtaagcacaactcgcgcgtcgagtcctccatttcctgcttgaagagctcttgcatcatttggataagctccacggagatgagcggatgctcggactcctggctgcgactcaaataggcatcgatgagcttcatctgccacacatcgatgttgttcggcatggacttggttacgtgc

SEQ ID NO: 39479 - DNA, 1431 bp, DROSOPHILA
cgaaaacattccggctaacggataacggctaacgaattacatcacctgagtggcggcgaaataatgtctccgcacggacgtcctggttgggaatggagctacctcctgctcaccctggccgtgggattcgcatccacccacgggtggatggcccactttcgcccagctgcgctcacgttgcagatggagcgcggggatcgggtgcagctcaagctggagaatgtggcaccttccacgctgcagcagccgacgcgttaccacttccgcctggaaagtgtggacacggatttggccagtgttccaggcgagaatgccacgatatccctggatgtattcaacacggacacacgcgactggacgggtgacatcgtagttaatggccattttctgggacagaccaagatccaagtgaagctgtacgacagccagcgaaacaccagtgaactgcccaccaattggagcaacgacagcacgctggacgtgaagatcaagcgaccgaaacgtgtggtggatgacatattcctgggtacgatcatactactaatgtcgctgctgtacatcagctttggagccgccctaaatctggacgtgctgaggggtctgatcacccggccaaccggcccgtgcatcggatttgtgatgcaggtggtgggcatgcctctgctcagctacgccctcggcgtcttcatcttcccccaggcgccggccatgcagctgggtctcttcttcaccggcatctcgcccagcggtggggcatcgaacacctggtctgccgttctcggcggtaatatacacctctcggtgctaatgaccaccgtttctaatgttgctgccttcgccaccataccgctgtggaccataacacttggccagctgatcttcgagcgagcgggcatcaaggtgccttacggcaaaatcgcctcgtacagcagcagcctggtccttccgctcctgctcgggctgctcgtccagaagagaatgcctcaggtcgctagggtgctggtccgcctgctcaagcccgtctccgccttcatcatcctgttcatcatcgtgttcgcgatcatcaacaacttttacctgttctatttgttctcctggcagatcgtcgtcgctggcatggctctgcctggtctgggctacatcttcgccttcctggcagccaagctgctgcaccaaaatgcagccgacgccctgaccatcgccatcgagacgggcatccagaacacgggcatcgccatcttcctgctgacgaccacgctggaatcgccggaggcggacatcaccacggtggtgcccgtatcggtggccgtgatgacgccgctgcccctgctgggcatttatctgtacaaccggtgctggggcaacaagcgaattagtgaggccagcgccaccgcctccgaagcggagcggatagctggggcgatacattag

SEQ ID NO: 39480 - protein, 455 aa, DROSOPHILA
MSPHGRPGWEWSYLLLTLAVGFASTHGWMAHFRPAALTLQMERGDRVQLKLENVAPSTLQQPTRYHFRLESVDTDLASVPGENATISLDVFNTDTRDWTGDIVVNGHFLGQTKIQVKLYDSQRNTSELPTNWSNDSTLDVKIKRPKRVVDDIFLGTIILLMSLLYISFGAALNLDVLRGLITRPTGPCIGFVMQVVGMPLLSYALGVFIFPQAPAMQLGLFFTGISPSGGASNTWSAVLGGNIHLSVLMTTVSNVAAFATIPLWTITLGQLIFERAGIKVPYGKIASYSSSLVLPLLLGLLVQKRMPQVARVLVRLLKPVSAFIILFIIVFAIINNFYLFYLFSWQIVVAGMALPGLGYIFAFLAAKLLHQNAADALTIAIETGIQNTGIAIFLLTTTLESPEADITTVVPVSVAVMTPLPLLGIYLYNRCWGNKRISEASATASEAERIAGAIH

SEQ ID NO: 39481 - DNA, 2369 bp, DROSOPHILA
tgctgctcctcctcatcctcctccggcagctgctcgttcccttctagcggcagcggcagcttacagcctggcttgcagataacaaagtgcaccagagacacgatcacctcgagaactattagcgcgaacacggcgttcgtgatgatgcgtagccacaaactgcgtccggcagctgagaggcgaagaaagaccatggcgggcagcaggatgcatggtgtcacggtgagcagcatccacatggcggtggcgccagagcacaggttcaccgagtagccggcgtataggcgtacggattcagcggacaccgccaaaacgtaggccaccagcatggacaggccctccaggttccacaaatgatgcagctgccggggacagacggaagctgattatgaccgcacatgccgcagggggggggggggaagggggtaatctcaaatgaaaacttacgcgtatgagcatgtggatcatgtagctcatggcccacaccatggacacatacgtgttggcctgcagcagcatttgcagcaccaggttggcccgatgcggcgtcaccgagtacgccatttcgattggattttcaccaagcactctctaggcactgcacttcagttcagtggcaagtggctgcaacgtttgttgtacttcctgctggttgccagggcaacgtaatcagctggaaaggacgcttcagctctgagtgctgcgactgctgccgtttgcaggacctaagctgcctgctcccgcactcgaaaaggtcctgccgcaagctccttcgatttaaatattcagctacagcctgtctccaaactctttttgacatgtttaaactattggaaagggttactttctgctccaaatatgtattagcctaacattgaggtgctgcagattgaagattgaaggaaggcggaacacattagcgccacgccaaccatgagaaaccagctaaacgggcgaagcgaaacgaatagagcggcgaggcggcagagatcaacggactatgcgacggcaaggagtgcattgctgctgtctggtggccatcgccctggccatggccatacgccaggtgtccatgggcatcagcgccagcgatcgccgcttccagtgcctgcagacgcgactgataggccaggccaactgctcgccatgcgccgatctgtacgtcttcaatcgccaatccgcctaccggcgctgcgagcacgtcaacggtaattgctacccacatcgcacggtcttcgccagcgcccgcatgtgcgagctcacctgccagccgtacatccggcgacccacgctgcacgaggtgaccaccctgccgccgccaccaccgatcgtcgagcccttcggcgacagcgatgaggagttcgagtgaggttttgtcaacaaagataagctgcttttaattcagttggtatgggaatgtttggtcgggattataggtagtggtgcaggtgatggtaatgcgtaatgtttaacaagatcctttgtggaggagattcgattctaatggggcacactggagttgatggtctcctccaaggcagacactgcaagacgaagtgaaaaagagtaagttcaaatgtccaaatttcgggaccaacaatcacttacggaatccgtgatcgttctggtgcaccagcgtgttaaggatgtcggccagcatctggtggcaacgtatgtacgttaactcgatctccgccacctggttgagcgccaggtactccaagctacgacgttgcgtttcgctgtcatcaatgccgtcatccgaaatggtgacgtccaagcatagggcatcgtggtcgtgcatgcagctggcgcaggtggtccactccatgtccagcacgtagaccagatgaaagatctggtcgagggcgacgcggaatgccttaaattcgtcggtcagcatacagtgtgtcttcagccacgccaggtgctcgtcgtgcatgatacgcaactcgcggacattcttgcactcgccaatcctgagctcgaactgccggctcacggcctccataatgtgcgcgtgcaggttgttgatgaggaaaattaaccagaagcgcacaatctccaggcgacgaatggtcagaccgatcaaatccagtggtgcgcagggattgaacctagcgcgacgcaaaaactgcatattctccagcttccagacggcccacttcaccttcagcatcagacgccacaccgaattgtagtcttgcatgtgcgcgggtgtgagaatgtaccactggtgcatggccattggccgctcgaagtccagttcaatagcctccagggcctcatagaccttgattgaattcgagtttatctgggatattaacttgacatgaagataatgagccaattgcggataatgcggaagg

SEQ ID NO: 39482 - DNA, 369 bp, DROSOPHILA
atgcgacggcaaggagtgcattgctgctgtctggtggccatcgccctggccatggccatacgccaggtgtccatgggcatcagcgccagcgatcgccgcttccagtgcctgcagacgcgactgataggccaggccaactgctcgccatgcgccgatctgtacgtcttcaatcgccaatccgcctaccggcgctgcgagcacgtcaacggtaattgctacccacatcgcacggtcttcgccagcgcccgcatgtgcgagctcacctgccagccgtacatccggcgacccacgctgcacgaggtgaccaccctgccgccgccaccaccgatcgtcgagcccttcggcgacagcgatgaggagttcgagtga

SEQ ID NO: 39483 - protein, 122 aa, DROSOPHILA
MRRQGVHCCCLVAIALAMAIRQVSMGISASDRRFQCLQTRLIGQANCSPCADLYVFNRQSAYRRCEHVNGNCYPHRTVFASARMCELTCQPYIRRPTLHEVTTLPPPPPIVEPFGDSDEEFE

SEQ ID NO: 39484 - DNA, 2637 bp, DROSOPHILA
gaacaggacagaacaggagcacacgatggcagccagcgagggatcggcggcgcgcattcagttcaaggcgctgcgcggatttccggccatcggcgataccgctgataagctggagacacaggcctttctcgacgcctccaaggagatagtaaccgtcataggtgataacagcgcacccaaaccgaagccaatcaattcaactcactgctatctatttaccatttttcatttttcagagagcttcggcaaactattcacacccgtgatcagcgacatgaacggaaacataaacgtaagctttccaagatctttaagatctaacacgaaatacatacatatatatacatgtgtacattcgttttcattgccgtttattgccgtttcagaaactgacgaaagcctacggagcggatgtggtcaagtaccagtatctggaggatctgatcgtgctgaacgtgaacgtggacgactttgcggccaacgcgctgctctggctgaagcgcggcctgcagctcatatgcaccttcttcgagaacatctacaacgatgcccaggccaaggaggcacttaagcagcatctgcaggacgcgtacgaacgcacattgaagccctaccacggcttcatcgtccagagcacaatcaaggtgggtgcatcgggcgggtatctctcacttccttcgctaattgggcgctcattccctcgcttgcagatcatctacagttgggtgcccacgcgcagccaactgctgggccagggtgtcgcccaggcggagaacatcgaggtgctgaccagcttcctgccgcgtatgcgcgcccatctggactcgatcgacgccctgctgaaggcgcacaacttggacgatgcacgaaaggtgtgatcgttccttagcctagcctagcctagcttagcttaaatagcttatcctactttattatttatgcccatgtccaagtaaaacgcagagccttacttataaaccacctgctgcacagctcatcactacgattccgggtagcgtcgcacgcgtcgcttttgctcattggtcgtgggtgtgcccacactggcggattgctgctgctcctcctcatcctcctccggcagctgctcgttcccttctagcggcagcggcagcttacagcctggcttgcagataacaaagtgcaccagagacacgatcacctcgagaactattagcgcgaacacggcgttcgtgatgatgcgtagccacaaactgcgtccggcagctgagaggcgaagaaagaccatggcgggcagcaggatgcatggtgtcacggtgagcagcatccacatggcggtggcgccagagcacaggttcaccgagtagccggcgtataggcgtacggattcagcggacaccgccaaaacgtaggccaccagcatggacaggccctccaggttccacaaatgatgcagctgccggggacagacggaagctgattatgaccgcacatgccgcagggggggggggggaagggggtaatctcaaatgaaaacttacgcgtatgagcatgtggatcatgtagctcatggcccacaccatggacacatacgtgttggcctgcagcagcatttgcagcaccaggttggcccgatgcggcgtcaccgagtacgccatttcgattggattttcaccaagcactctctaggcactgcacttcagttcagtggcaagtggctgcaacgtttgttgtacttcctgctggttgccagggcaacgtaatcagctggaaaggacgcttcagctctgagtgctgcgactgctgccgtttgcaggacctaagctgcctgctcccgcactcgaaaaggtcctgccgcaagctccttcgatttaaatattcagctacagcctgtctccaaactctttttgacatgtttaaactattggaaagggttactttctgctccaaatatgtattagcctaacattgaggtgctgcagattgaagattgaaggaaggcggaacacattagcgccacgccaaccatgagaaaccagctaaacgggcgaagcgaaacgaatagagcggcgaggcggcagagatcaacggactatgcgacggcaaggagtgcattgctgctgtctggtggccatcgccctggccatggccatacgccaggtgtccatgggcatcagcgccagcgatcgccgcttccagtgcctgcagacgcgactgataggccaggccaactgctcgccatgcgccgatctgtacgtcttcaatcgccaatccgcctaccggcgctgcgagcacgtcaacggtaattgctacccacatcgcacggtcttcgccagcgcccgcatgtgcgagctcacctgccagccgtacatccggcgacccacgctgcacgaggtgaccaccctgccgccgccaccaccgatcgtcgagcccttcggcgacagcgatgaggagttcgagtgaggttttgtcaacaaagataagctgcttttaattcagttggtatgggaatgtttggtcgggattataggtagtggtgcaggtgatggtaatgcgtaatgtttaacaagatcctttgtggaggagattcgattctaatggggcacactggagttgatggtctcctccaaggcagacactgcaagacgaagtgaaaaa

SEQ ID NO: 39485 - DNA, 552 bp, DROSOPHILA
atggcgtactcggtgacgccgcatcgggccaacctggtgctgcaaatgctgctgcaggccaacacgtatgtgtccatggtgtgggccatgagctacatgatccacatgctcatacgcctgcatcatttgtggaacctggagggcctgtccatgctggtggcctacgttttggcggtgtccgctgaatccgtacgcctatacgccggctactcggtgaacctgtgctctggcgccaccgccatgtggatgctgctcaccgtgacaccatgcatcctgctgcccgccatggtctttcttcgcctctcagctgccggacgcagtttgtggctacgcatcatcacgaacgccgtgttcgcgctaatagttctcgaggtgatcgtgtctctggtgcactttgttatctgcaagccaggctgtaagctgccgctgccgctagaagggaacgagcagctgccggaggaggatgaggaggagcagcagcaatccgccagtgtgggcacacccacgaccaatgagcaaaagcgacgcgtgcgacgctacccggaatcgtag

SEQ ID NO: 39486 - protein, 183 aa, DROSOPHILA
MAYSVTPHRANLVLQMLLQANTYVSMVWAMSYMIHMLIRLHHLWNLEGLSMLVAYVLAVSAESVRLYAGYSVNLCSGATAMWMLLTVTPCILLPAMVFLRLSAAGRSLWLRIITNAVFALIVLEVIVSLVHFVICKPGCKLPLPLEGNEQLPEEDEEEQQQSASVGTPTTNEQKRRVRRYPES

SEQ ID NO: 39487 - DNA, 2408 bp, DROSOPHILA
gcaaacttgagcgagttaatttgtgcacttattgttgcttttgctgaaatttctggctgtttaattttctgccaatctgccaattaatggtgttatttctgttgttactgtggcgtacaacattttaacaataccgatttatttatctggtttttttttgtagccccctcgcattattgtttatttacatttgtttggcgaattgttattgctaccgttttttcactgttcagttttcagtttttcagttctcagttttttagtcgtgtcgattttttatttctcattgaatttcgggcttctgttgaagttgaaggcttgtgggagattttgtttttggagttttattttggttttgttgtgttttattttattttttgttcttattggagtgacagctgttcacaagtgtctgtctggccaaaacggaaagttgaaacgtcagttgcaggagactctgttggccaaatgtaagccgatatcccggggctgctgtcaccagaagaagaactcgtatcctcgagatacactcgcacagccatgctcactgatgcagtccgttgatgcccacgaaatgagatcggctatttttagcgccctataatttatactcaaataaaacttgaggcgggcgagaaaagttcgcagttgcccacaaatcagataagtattttcgtatcgccaagtgccacttcgctctgtttacccccgattttagcgccctccgatcccaattcccaactgaatgaacctaccaacccacccccccgcttacgggcatgccaactccccctgacccacaaagtgcccacttttgcttatttgtaattgatacttgatctggtggagcgtataaaagccactttaggcgttgccattacgtcaccttgagtcagccttagcttcagtttcagctacagcttcagcatcagcatcagattcagcatcagattcagattcagattcagttttagctgtagctttagctatagctttggcgtcataaccacagatacagatacagatacagatacagatacagatacagatacagatacagatacagatacagatacagatacagatacagatacagatacagatacagatacagatacagatacagatacagatacagatacagatacagatacagatacagatacagatacagatacagatacagatacagatacagatacagatacagatacagatacagatacagatacagatacagatacagatacagatacagatacagatacagatacagatacagatacagatacagatacagatacagatacagatacagatacagatacagatacagatacagatacagatacagatacagtaacaactttaaatcgcaaaatctaatgtcattcacctcatttcgcatgccctacacttaatgactcccaaatgcacagaaaaacaatttaaagaaatgaaaaagtcccaagataacttgaacgctatagccaataatattattgtattacattctccttttcatatttgcaagttacattagtgaatatgcaacattctaagccaaagttctttcgaaaaatgaatgttttctttaacatttcaggtagcatttgccttgatcgtgagactcggacttgaagtgagcgtttgagcaggggaaaaactccaagccgagtctcaatcaaaaccaaaaagagacatctaagtcggctcaactctgatcggcaatcgagatcgcgacgacagcagcaacaacaatcaagttggcaatgcactcgggaaaaaggtgtactaaataacaaagaaataattttcaaatggatttttttcctaattacaagatctcagtaaaacgacagcgagtcaaaaagataaaataacatattttaaaaagtcataaccttttcttttaaacaatttcattgtgcactcttcttaacactctctatctcgaactctgtctttctttctctctaatatgcagttttctttctctaagtggtaccctagtttttgtcagtgcatcgggcttgaaccaaaacagctgtttctgacatggattttgatttttgttttcagcgctactttcgagaccccgccgctgtttacgcgctcttcacgcttcggaaatttgtttgagagattttcagcgacaaagtctgaaaagactgaaactggtctggccacccgcccccttttgtccccgcccctttccgcctcttttcgaccattccatgtgtgcgagcattgaaaggaaaaacataaattttatacgggtaatttaaaaattcatagcaaaaagttcagcaaagccaagcggcacgaaaaaagccgtgtttattattattttatttttatttgattcggctgctgttgcttttggtggtggtgctgccattgccact

SEQ ID NO: 39488 - DNA, 408 bp, DROSOPHILA
atgcgaaatgaggtgaatgacattagattttgcgatttaaagttgttactgtatctgtatctgtatctgtatctgtatctgtatctgtatctgtatctgtatctgtatctgtatctgtatctgtatctgtatctgtatctgtatctgtatctgtatctgtatctgtatctgtatctgtatctgtatctgtatctgtatctgtatctgtatctgtatctgtatctgtatctgtatctgtatctgtatctgtatctgtatctgtatctgtatctgtatctgtatctgtatctgtatctgtatctgtatctgtatctgtatctgtatctgtatctgtatctgtatctgtatctgtatctgtatctgtatctgtatctgtatctgtatctgtatctgtatctgtggttatga

SEQ ID NO: 39489 - protein, 135 aa, DROSOPHILA
MRNEVNDIRFCDLKLLLYLYLYLYLYLYLYLYLYLYLYLYLYLYLYLYLYLYLYLYLYLYLYLYLYLYLYLYLYLYLYLYLYLYLYLYLYLYLYLYLYLYLYLYLYLYLYLYLYLYLYLYLYLYLYLYLYLYLWL

SEQ ID NO: 39490 - DNA, 2717 bp, DROSOPHILA
cgtctccaccaccggacatggcgagaccctcatgcgttacaatctggcccagcgcattctgtccgccatggagtaccagggactgtccgcccaggcagccgccgacaaggagtgccgcgagatgaccaaacggctgggtggcactggtggcgccatcgtggttggccactccggtgacctgggcatcagtttcacgtcgcgtcgcatggcgtggggatatgtccaggatggcaccatcttttacggcatcgagggtcaggtggtgcaccaggaaccgttcacactttccacgtaactaaattcggagtacctacctatccaaggatttatcaaaatcccagtagaatagtaaacaaattaaagaatcttctttcatttcaaaaagttacataaataaatttgacttgttttaataagaagcacacgcatttgttttaaatagttagttcatttgatcaagagactatataaataaattaatgttgaccacactatttcttgcttatttgattatatccactgcttatttatttacacaattaaacatggataatcaattgtattcgtctaacgctaaaatacgaaaattgcacatttctatagcttatggctaggcaatattgcattataaaataaaattaaagccattaaacataaaaaagagctataaaacatctgttggctaaagatacaaactaaattcgatttagttaaaaaaaaaaaatgtgatcgattatgttctatagttgttattaatgaattaattaagcagtaaataagagagaaaacgtattacttctagcctaaagcgatccctgacttagtagaaatattgccaacgaaccagctgatgacttaaaactttctcatttctagttcgaggtaaagctcatccgttgaacgtctatgtgtgccggccgaaaacgttgtacacaaggcagagtcatcgtactggacggtggtcagtagaaggtgaacgcagtggtcagctgcgactggctcactggggcgcaacatcacgctgggattcgtgcgcatcggttagaccataacaatgcttggccgccggatcgcggtacttgttctcgtgctccacggagtgcgagttcgtgcggcacttgaccaggcacagctcgaagtggtccgtcacgctggcgaagatgtacttgggcgtgttgggcgcctgcaggacgcgctccagcagcggctgttgtccggggtgcaggcagcaggagacgcaatactcataaacaccgcaacagtgggtgctggtattgcatgtgcggcagctgtagtatccaatgccgggcagctccaggttgcagcagccgttggttagcacctcctcgcgtcggcacacgaatcctcgctcgtccgccagccattggcggccctggacagagttgcggcagcgtgcctcgggatcgccgcgcgtgcgattgagctgctcctccggcgccagaagctgctgcgtccacaggagcggtcgtgtgcgctgcaccacatactcgtcatagtgcaggccggaaaacgagtcctgcgcatacaaaggtaactcaattagccaacgggttgcaccatgttgtgaaggtctagttggagcacctgcactcacccgatcgaaaatgtgtccgaatccgtagatgagcagcagtaccaccagcacgatgtacacaatccggcgtctcagcaggcgtgtcagggcggctggccacatcctggccaatacctagcgctccatcacagctcccgccgggtgtaattctcctgggacacggacatggcagtggccacaatcggggaatttttcagtttgaatgctactggggcattgggtgctgtcactcctcggatgacttcagctacttctgctgatcgtgattacatccagttgcagtgtcggtgcacttttcactcagaactgaactgatgaaattttcctggattgttgatgaacttttctaggcaacttcctcgttggaaaaagatctcttcaaattgaaagggggagctctcttttctctgcgttgcagcatggtgtgcaatcagttactggcccactatgcctctatttgtattattttgttttttttttttttcttgcaataaatggaagcgaaattcgttagcaagcacaaaaacaaattcctaaatatttatttatttcaatcagctgtttaccagtgttgcgaaatactgacggggggaaatacaaatcgattagtgctatcgacgtttcataatttgaaatttatttttataaaaaaaatgcaaattgaaacggtttttctaatgtatataaaaatatatattacatttttctgactttaaatgatcttgggatatctgatttttacaatgcatttttctagttctgtgtgcaatcaaatttcttccagttttcagcaaaggatttcacctttccgatggggtttgcctcctttcgcggctttcgccaagcattgggatttaactccagcattccgccgaggatttcctgaaagtatatagtgcaatcagcatacaaatgagtcaaataagagcaagcaatgccaacgaacctgggcaaagttagccggaaatcgatcctcgtcctcgatgacgtgcgcgaagcccgaatccatgccgaagtgaacccatacgtagggcaggcccttgggaatggccgcccgcagggacttctggcgcagcgagaccagctgcttgttgatgcacca

SEQ ID NO: 39491 - DNA, 639 bp, DROSOPHILA
atgtggccagccgccctgacacgcctgctgagacgccggattgtgtacatcgtgctggtggtactgctgctcatctacggattcggacacattttcgatcgggactcgttttccggcctgcactatgacgagtatgtggtgcagcgcacacgaccgctcctgtggacgcagcagcttctggcgccggaggagcagctcaatcgcacgcgcggcgatcccgaggcacgctgccgcaactctgtccagggccgccaatggctggcggacgagcgaggattcgtgtgccgacgcgaggaggtgctaaccaacggctgctgcaacctggagctgcccggcattggatactacagctgccgcacatgcaataccagcacccactgttgcggtgtttatgagtattgcgtctcctgctgcctgcaccccggacaacagccgctgctggagcgcgtcctgcaggcgcccaacacgcccaagtacatcttcgccagcgtgacggaccacttcgagctgtgcctggtcaagtgccgcacgaactcgcactccgtggagcacgagaacaagtaccgcgatccggcggccaagcattgttatggtctaaccgatgcgcacgaatcccagcgtgatgttgcgccccagtga

SEQ ID NO: 39492 - protein, 212 aa, DROSOPHILA
MWPAALTRLLRRRIVYIVLVVLLLIYGFGHIFDRDSFSGLHYDEYVVQRTRPLLWTQQLLAPEEQLNRTRGDPEARCRNSVQGRQWLADERGFVCRREEVLTNGCCNLELPGIGYYSCRTCNTSTHCCGVYEYCVSCCLHPGQQPLLERVLQAPNTPKYIFASVTDHFELCLVKCRTNSHSVEHENKYRDPAAKHCYGLTDAHESQRDVAPQ

SEQ ID NO: 39493 - DNA, 2598 bp, DROSOPHILA
tagtgacattgtccgccgcgagaggcggaggagcctccacccactcgtcctcgctggcgctttccttacggctcctcttggacttcttcttgcgtcgcttgcgctccttttcatcctcactgaacgaggaggaagatgaagtggaactttcgctgctactgctgctgttgcggtgcttcctgctcttcttcgatgacttggacttggacctggacttgtgcttggaaacattcttctttgactttttggcgggcttctccagtttcttggccaacgcgggcagcatccagtcggcttcgccgcgcagctccttctgcctctcccgctgcccacgcagttccgcccgctccttggcctgctgcagcatcgcctcccgggcctcccggagctcctggcgcgccttatccttttctctgccgctttcaaattgtatgtagctcatgtctaatttggttcttcttgtttaccaaaacattagtgttagagatggacaaatatgcacaacagtgatatcgcttaagtcactactgaataacagacatatcgcttaactcactattgaaaagttgattgcaatatacaacaagagagaatgatatagtcaaattccccgttactcggctagtgtgaatgcgaaagcgaaatttaataaatttaatttaattttaattttagaatctgtatggtgaatctcaaccttctagcttttataattcctgaaattttggcgctcatacggacatgaaaagatcgactcggctattgatcctaatcaagaatatatatacttcatatggtcggaaacgtttccatcttcctgttacatacacttcaacaattctagtatagcctttaactttacaacgggtataaaaaagtatcaaaaaattccaaaggagtgttttttatttataaagttaattctcaacaagacttgaagtcatattaaaatctaaagtttaaaggcgctttttatatataattaatgacctgcctgttcttagtcctcatccgaggaagtttcattcttgatcttgtcggacttgcgcttttgcaactcctgctccacgtcggggtccttgaccaggtgctctaacttgatgtcggacaagttgggacagtcgcgcaccgggcataggatgccaatgttgtccttgatgatcattaaaaccgtttcgcggtcgtagatatgaccgcaccttttgttgcgcacggggtgctttatcaggagcttggaccagggatcgtggaacgggacgacctcgacgccgaagtcttccatgataaggtcctcatcaaggccggcgatattcttttgagcttctgattcccccgcattcatgtagttcgtgtcctcaagtgagttattgacatcgatgcgcatctgctccacagcttcggggcgctccttgcagacttcctcggacttctcgatggtgttgctagagtttttggttagcaacttctccccgtcatcgctggaattggacacgactgtgggtgggtgtgttttaaagatgttaaagatgtctcggtttgtcacatggctcaccttctgccatttccctgaagagcttttggtgggatttcgggtccattttgatcataaattttattcagacgcttttcaaattgcaaatccagaatatttagatcgaaatgtcaagactgacgcttcggttaagctaggaccgataatttcgacaggcagcctatcgagggtgtaatcgttcttttgagaaccgttaataatcgtgatgtgcgtcaagttagcgtaggtgagttagcgtcggtcagttagtgcagatggcggatcggtagaattttgaacatggggaagttttttatttattttattttgttgggttgtgggcattagagtgggcgtggcaatatgggcatgcgctgcgtctatgtctctagaatctgtatggttaatctcaaccttctagcttttatagttcctcagatttcggcgttcatacggacatgatcagatcgactcggctattgttcctgatcaagaatatatatactttatatggtcggaaacgctttcttctgccagttacatactttttaacaaatctactataccctttcacgagtaacgggtataaaactgaatatatttgataatattatactgaagctaccaatttccgatgctgtaaattgcataatttattatgaaataaaaacactaatacttattatgtcagcggaacataataagaatatttgagtctagaggttttatctccaagggcatgacaacgccatggcaaccctttttgcttgtgtcaagaactcaaaaaagaaggcgatgactttgcagtctacaagtcacatttataatttggcgtgaggacctcagttgattcacatatccgagcggataatacttaactatttgcaaagcacagcatttttaagatgaccatttcaagaaaatgctttacgcatacaagttgataggttttctaaacgaaacaatgaagtcctacgattcttcatagagctcaccgatttcattattccgttcaccgctcccgatagattcttcgttatttgtagagatttccagcgcaagtcgcc

SEQ ID NO: 39494 - DNA, 540 bp, DROSOPHILA
atggacccgaaatcccaccaaaagctcttcagggaaatggcagaagtcgtgtccaattccagcgatgacggggagaagttgctaaccaaaaactctagcaacaccatcgagaagtccgaggaagtctgcaaggagcgccccgaagctgtggagcagatgcgcatcgatgtcaataactcacttgaggacacgaactacatgaatgcgggggaatcagaagctcaaaagaatatcgccggccttgatgaggaccttatcatggaagacttcggcgtcgaggtcgtcccgttccacgatccctggtccaagctcctgataaagcaccccgtgcgcaacaaaaggtgcggtcatatctacgaccgcgaaacggttttaatgatcatcaaggacaacattggcatcctatgcccggtgcgcgactgtcccaacttgtccgacatcaagttagagcacctggtcaaggaccccgacgtggagcaggagttgcaaaagcgcaagtccgacaagatcaagaatgaaacttcctcggatgaggactaa

SEQ ID NO: 39495 - protein, 179 aa, DROSOPHILA
MDPKSHQKLFREMAEVVSNSSDDGEKLLTKNSSNTIEKSEEVCKERPEAVEQMRIDVNNSLEDTNYMNAGESEAQKNIAGLDEDLIMEDFGVEVVPFHDPWSKLLIKHPVRNKRCGHIYDRETVLMIIKDNIGILCPVRDCPNLSDIKLEHLVKDPDVEQELQKRKSDKIKNETSSDED

SEQ ID NO: 39496 - DNA, 2534 bp, DROSOPHILA
accctttcacgagtaacgggtataaaactgaatatatttgataatattatactgaagctaccaatttccgatgctgtaaattgcataatttattatgaaataaaaacactaatacttattatgtcagcggaacataataagaatatttgagtctagaggttttatctccaagggcatgacaacgccatggcaaccctttttgcttgtgtcaagaactcaaaaaagaaggcgatgactttgcagtctacaagtcacatttataatttggcgtgaggacctcagttgattcacatatccgagcggataatacttaactatttgcaaagcacagcatttttaagatgaccatttcaagaaaatgctttacgcatacaagttgataggttttctaaacgaaacaatgaagtcctacgattcttcatagagctcaccgatttcattattccgttcaccgctcccgatagattcttcgttatttgtagagatttccagcgcaagtcgccaacagctggcccattgaccaaggcacccatgccggaagctttttccggcaaaaaaccaaaaacaatgaggaagcagccatgctgaaggaccccatggcttgcggggattcagagccgaagcttagcaatggtaaatcagtctggatctcctctgaagatagtagcgatccggataatgacaaggtgccattggtgccatatgagtctgatgtggatcgtctgcggcaaagactcgctagaatgtttcggcgatgatttcgatggcaatcgtgctatatattcatttgtttctacatttgtaccaattttctaaataaatcgcaaactatatacatacgtgcatactgcacttctaatatattttctctaaattttttcgggactatttttaaaacatgtttattcgttgtaccttaaattttcatcaaatggttgtcttacaagaacgtgatatcttacgctgcgttattagtcgacaagaaggaagttgcgcataattaatgatctgcctgttcatcgtcctcctccgaggaagtttctttctcgatcgcgtcagacatgcgctcttgcaacttctgctgtaggttggagtccttgaccaggtgcgctggatggatgtaggacctgttgggacagccgagcactgggcatcgaataccaatgttgtccgtgatgatcagcatcaccgagtcgcggtcgtagatgtggccgcactttttgttgcgcacggggttctttatcaaggctttggaccagggatcgtagagcgagaagacctcgccgccggtggcttccatgataaggtcctcgtcatgggcggcgctattcgcttgaccatttgtttccgcacccgcctggggagctgccgctttcatgaagtttttgaactcggctgagttcttgacatcgatgcgcttctgctccaccgcttcggagcgctccttccagacttcctcgaacttctcgatggtgttgctagagtttttggcatgcttcatagccttgctgagcaattggtgcttgctcttcattcggatgagattctcggcgagatccacgttctggtccaacaacttctggatctccctgccatcactgaaatcggacacgactgtgggtaggttttaaagatgtctcagtgtgtcgcatggcttaccttctgccatttctttgaagaacttttggttttccaataaagtggtaagtgccgaatccacatggtaattgaagtccattttaaagcccagattctatgcagacgctttgcaaattgcaaatccagaatatttggatccaaatgttcaagactgacgcttagctaggttcagctaggaccgataagttcgataggcagcctaacgagggtgtaatcggtatttggcgaactgttaataatcgtggtgtataagcatggattttatgcctgaaatttaagtaaaataaatgtgcgtcaaattagcgactctaaaataaaatgtaaaatgagttaacttagagtgaccatatccccaacatacggtcttatccacccgcgagctatcgcggttatcggtgttatcggccaatgtcaacctggataacgagcggcggccaacttttcagtgtgccaaacgccgagcagacggacgagcagcgccagcgcgaccgccactgccaccagttgctgcggaccaatccaagtcacaaccaatccgctccgatccgatcccagccaacgagtgccagctgtgcgccccagctgcagctacacgtgtccccagggtgaaagcgctatccaagatgcggacgcacggactacggttggtgctcttggccctgctgcccacgatggccctgggcctgctagagggcctgtactgtggcaaggaaaactgttacgacgtgctgggcgtcaccagagagtcgtccaagtcggagatcggcaaagcataccgccagctggcgaggcgctatcatccagatctgcatcggggtgccgaggccaaggcggcggcggagacgcagtttaagctggtggccaccgcctacgag

SEQ ID NO: 39497 - DNA, 534 bp, DROSOPHILA
atgaagagcaagcaccaattgctcagcaaggctatgaagcatgccaaaaactctagcaacaccatcgagaagttcgaggaagtctggaaggagcgctccgaagcggtggagcagaagcgcatcgatgtcaagaactcagccgagttcaaaaacttcatgaaagcggcagctccccaggcgggtgcggaaacaaatggtcaagcgaatagcgccgcccatgacgaggaccttatcatggaagccaccggcggcgaggtcttctcgctctacgatccctggtccaaagccttgataaagaaccccgtgcgcaacaaaaagtgcggccacatctacgaccgcgactcggtgatgctgatcatcacggacaacattggtattcgatgcccagtgctcggctgtcccaacaggtcctacatccatccagcgcacctggtcaaggactccaacctacagcagaagttgcaagagcgcatgtctgacgcgatcgagaaagaaacttcctcggaggaggacgatgaacaggcagatcattaa

SEQ ID NO: 39498 - protein, 177 aa, DROSOPHILA
MKSKHQLLSKAMKHAKNSSNTIEKFEEVWKERSEAVEQKRIDVKNSAEFKNFMKAAAPQAGAETNGQANSAAHDEDLIMEATGGEVFSLYDPWSKALIKNPVRNKKCGHIYDRDSVMLIITDNIGIRCPVLGCPNRSYIHPAHLVKDSNLQQKLQERMSDAIEKETSSEEDDEQADH

SEQ ID NO: 39499 - DNA, 3233 bp, DROSOPHILA
ggcatataactggcataacttagttatgggtcggtaatttgcagagtcacagttcccagatgcactgagagaaaattgcacgcactactgtacactatttactacgaaattaaaagttttaaatgtttaaaatctttgatgggtaatccttatgattaagtacgcaagatacaccaaatttgtaagttcttttttctccgtgtagttatggatcggtgattcgccgtttgtagatctggagtacagttaacaaggacctcgaatcctggctcaaaaccctcgatacaagccgttgaccgtacaatttggtcgattctatgcaaatttatgcaaatgcccaccgttttgtagcctgtcgtttgtcgtttgtagttgttggtggttcgccatttggtggtgcacaggtgcgtgataagtgccgtgtaaaggactcgcaggatatgccgcaacatttttactaccacaactgttactcccgcaccctctagctcagtgcatattatccagcatatcctgccagctcgccggttggaaatgaaaggtcgacggtgatgaattcatgggcggaacgtgagaatccagtttaacttcaactctagaatattgcctctgaaatattgccaagtaatccccacgtagaagacagtttatctctaattaatggttgtacttatctaacgctaacaaggacccaattgcgtttacgcggcaaaatgatctttacatccttttaagaattaaatgttcatatttaatggtaacaaatcgaactttccttttttaggatattaggaataataaattcgcaattcaactagtttttcaaatcggttttttatttgtcagaaaaaaaaaggattcttaggtaattataggatctgtttcaacattcgtattccaaggcaatgctgcgcttttagccactcaaaaaaaaaaaaaaggtttaggttataaccaaacagaagtcaaaaatcaacatatggacatgacccgcattgggtcacttctccacgaacagatcctcggcgtaggagaagctcagccgccgcttggtaaccgcctccacccgcccgccgcatgatcccatggccaccagctcctcctcaaaatcgctggtcgagttgtgcccactgtccgggctaatgtggcgcctcttctgggcgaaccgctggctgggcactgcagatccggacctggccgctgcgagcagcttctgcgccgactgcctgacgctggaggagatcttggtggtgatctttcgcttgcgccgcaccacccgctgcctgcgcagctgcagggaatgccgcttggcatcctgcgattcggattcggtgggcacgggggagcgcacctcccgctcctcgaagccctccgctggcagggaatccctccgcgagggcgacttccagtactcgcacagatcgctggccggatcgaaggcggggcggtaggtgggcgatggcgtctgggtggagccgtgcccgtgcccgtgtccgtggctgctccggagcacctgctgcctgagcctgtgccgctggcggagatgctgcctgggctggcggtgctgatgctggtgctgttgctgtctggcgttgggcagcaccttgcggttgctctcgaggatggcatcgatcatacgctccagggtcacatcgcccatctggctggaactgagcgtattctgttcgccgatcggaggagctggatgcggatggggatgcggatgtggtagtggcttctgctccaggtagcgcggcttctcgaagtagctgtccgggatgcccatgccgcgcagggcgatcagggagccaggaatgatggcggcattgggcgagtactccgcctcgaaggtgggcagtgtgcaggcgaacttcaggggaacagcagctgctcctccagttgccccactagcgccacttgctcctcccgatggcggcgtggccaggatgttgctgaggtccttgagcagtggtgtgcgagcatggaggctcaaggagctggccggcagcggcgtggaggtcagctggttctccttgcctggcgccactccgatcgacttcctcttgagtttgccacgcagggcgtggaactcgctgtagctggagcccaccacttcggccttctgctcgagagatcctgatcccgatcccgattccgatcctgtttgcgatcccatggccagctccttggccagatacgagtttcgcggctggttgacagcccacttgagcatcctggcagctgctgtctgtcgctcctgcggtgccaagatatctggaaaagtggcaaaaaggatagggctagttagcgattgtctatttgcaaagcttctcaagcagaatggaattgcaaaaaaaaaaagcaaaaacagagcaaaaacccgactaacttgtagcgaaacgagtttgcacaggggcctgcttgggatttcgccaaggattcgcacagctgaacgccagcttcccgatttccgcaaggagtttctggttccgcatatccttgcgaacaattgagccggcacaaagagcccgggaacaaaggaaaagcgcgctaaagcttcgcgattttctgggcctccggttcgctcctgttcgccataccaacgcactgccctccagctgcgatttagcccaaggttctgcctcgcgtatcgtgtgctcgggtggtgtgccggcacagggagaaattatcacccaaaatcaggcaggaatttggggatttatgcgcaaaaatcggaatatctatacattttatttatattattttttaactgattgaactattgttcaaataatttcagaatctggggaattatttggcatctaaatggctttgttacaataaagaagatattaaaattggttccagatttagtacccgattaaattataaaagcaataagctattcaaatttcaatagaaatgaaaaatgtttacaacattctttactataaaaataaaatatttaagcaaagcccttgatagtcaaattagaaattagcggtccaatataccatttcattaaatttgcaaatcaatagaaattttgggaactaagttcgccaagaaagttactaatataattattattcattttgaatagtaaatttgttgagctgcatgattttgagactgaagattcaagtgataaaaaaagtgtggctgggagaacatatatattttttgccgtgtgaacttgggcaaaatggtggtgctgccggcacactctgttg

SEQ ID NO: 39500 - DNA, 1233 bp, DROSOPHILA
atgctcaagtgggctgtcaaccagccgcgaaactcgtatctggccaaggagctggccatgggatcgcaaacaggatcggaatcgggatcgggatcaggatctctcgagcagaaggccgaagtggtgggctccagctacagcgagttccacgccctgcgtggcaaactcaagaggaagtcgatcggagtggcgccaggcaaggagaaccagctgacctccacgccgctgccggccagctccttgagcctccatgctcgcacaccactgctcaaggacctcagcaacatcctggccacgccgccatcgggaggagcaagtggcgctagtggggcaactggaggagcagctgctgttcccctgaagttcgcctgcacactgcccaccttcgaggcggagtactcgcccaatgccgccatcattcctggctccctgatcgccctgcgcggcatgggcatcccggacagctacttcgagaagccgcgctacctggagcagaagccactaccacatccgcatccccatccgcatccagctcctccgatcggcgaacagaatacgctcagttccagccagatgggcgatgtgaccctggagcgtatgatcgatgccatcctcgagagcaaccgcaaggtgctgcccaacgccagacagcaacagcaccagcatcagcaccgccagcccaggcagcatctccgccagcggcacaggctcaggcagcaggtgctccggagcagccacggacacgggcacgggcacggctccacccagacgccatcgcccacctaccgccccgccttcgatccggccagcgatctgtgcgagtactggaagtcgccctcgcggagggattccctgccagcggagggcttcgaggagcgggaggtgcgctcccccgtgcccaccgaatccgaatcgcaggatgccaagcggcattccctgcagctgcgcaggcagcgggtggtgcggcgcaagcgaaagatcaccaccaagatctcctccagcgtcaggcagtcggcgcagaagctgctcgcagcggccaggtccggatctgcagtgcccagccagcggttcgcccagaagaggcgccacattagcccggacagtgggcacaactcgaccagcgattttgaggaggagctggtggccatgggatcatgcggcgggcgggtggaggcggttaccaagcggcggctgagcttctcctacgccgaggatctgttcgtggagaagtga

SEQ ID NO: 39501 - protein, 410 aa, DROSOPHILA
MLKWAVNQPRNSYLAKELAMGSQTGSESGSGSGSLEQKAEVVGSSYSEFHALRGKLKRKSIGVAPGKENQLTSTPLPASSLSLHARTPLLKDLSNILATPPSGGASGASGATGGAAAVPLKFACTLPTFEAEYSPNAAIIPGSLIALRGMGIPDSYFEKPRYLEQKPLPHPHPHPHPAPPIGEQNTLSSSQMGDVTLERMIDAILESNRKVLPNARQQQHQHQHRQPRQHLRQRHRLRQQVLRSSHGHGHGHGSTQTPSPTYRPAFDPASDLCEYWKSPSRRDSLPAEGFEEREVRSPVPTESESQDAKRHSLQLRRQRVVRRKRKITTKISSSVRQSAQKLLAAARSGSAVPSQRFAQKRRHISPDSGHNSTSDFEEELVAMGSCGGRVEAVTKRRLSFSYAEDLFVEK

SEQ ID NO: 39502 - DNA, 2754 bp, DROSOPHILA
ttttttggtatccactcaagagccaaatttgaatgcaacctaaaagttcattaagatttcataagaataattgagcatatcaagttcagagtcaattaaattattaaggtccagaccaaaggctgcccgtcgtccatttaattgtccgtgagaggagtggttgatttcgtttttgatttcatttttgccgcttcgctgatttcgccaaatcgatacacatccatatacatatgtacatatgcatgtatatatgtatgtttgtctacatgcacatttatcgcggaaaaagcgcgccaaaattgccgaaaactcgcccgacaactttgccgctgccctctttatttatttgctccttaagaaagtcaagttctggaatgccagaaccagaaatacccgcccccttcctaaccagattcctttgctctttccttgcagcacccactacaaaaccgaaaaactaaaacttcagacaaagaagatgctcaagtgggccgtcaaccagccacgaccctcgtacttggccagggatgaggtgatggccaccagcagcgaggcagtcggctccagctacagcgagttccacgccctgcgtggcaaactcaagaggaagtcgatcggagtggcgccaggcaaggagaaccagctgacctccacgccactgccggccagctccttgagcctccatgcgcgcacaccactgctcaaggacctcagcaacatcctggccacgccgccatcgggaggagcaagtggcgctaatggggcaactggaggtgtaactgctgttcccctgaagttcgcctgcacactgcccaccttcgaggcggagtactcgcccaatgccgccatcattcctggctccctgatcgccctgcgcggcatgggcatcccggacagctacttcgagaagccgcgttacctggagcagaagccactaccacatccgcatccgcatccagcacctccgaccggcgaacagaatacgctcagttccagccagatgggcgatgtgaccctggagcgcatgatcgatgccatcctcgagagcaaccgcaaggtgctgcccaacgccagacagcaacagcaccagcatcagcaccgccagcccaggcagcatctccgccagcggcacaggctcaggcagcaggtgctccggagcagccacggacacgggcacggccccacccagacgccatcgcccacctaccgccccgccttcgatccggccagcgatctgtgcgagtactggaagtcgccctcgcggagggattccctgccagcggagggcttcgaggagcgggaggtgcgctcccccgtgcccaccgtatccgaatcgcaggatgccaagcggcattccctgcagctgcgcaggcagcgggtggtgcggcgcaagcgaaagatcaccacaaagatctcctccagcgtcaggcagtcggcgcagaagctgcttgcagcggccaggtccggatccatagcagctcccgcccagaagatgcgccacatcagtccggacagtgggcacaattccaccagcgactgcgagctggaggaggagcactgccagctgagtcgcggactggagttgggtggcgaggagctggaggatgcctgtcagctggatgccatgtggttgcaagtgcaggccagagacgccacgaagagacgcctcagcttctccctggtggaagaaagctaatcctcaaggatattcctataccataggcataagacatttttttcatagccctaagaacgttttttttttttttaattttttggccagaataaatcatttggaatgcagaatgtacgaaaagaaccaaattcactgaggggcacactgtcataattcggttgaaaccacaaggaaccaccagcagtttatgctaaacacctcttgaagctcagcggtgcgtggaaagcaattcctccagagcagagggtctgggtcttctcatccgtctgcccaagtggtcttctttctcacagcgagctggttaatgagcgttttaatgctccgatagcgagctataggggattcctcggcaacatggaacatagaacttggcggtaatgagggccctaaaaggaaggggttgtgcgacaattgtcgcaagaaaaaaaatattatttacgcttcaaatgcccacgaattcgatgggcaggcagccagccaagttatgtgcgatctaacgcgataaggtctagtacctggaaatggaacaggtatcacttgctcggaactccattcgagtgttattagctcaaagcgacctttggaaaaggaagttgcctaactttcacccgggaaactgcgatttaccactgctttcagcggaaactattctctgaaggtatcataaaatcatagtgatgagttatgaagcaaacccagtttcgtagataatccttacataattaagatacaaaatttgtagcccaaaaacgaaatataactcgttagcgaacggtttgtataactaggcttccagctgagatggaacctaggccattcccacagctcccgctccccaaggatcgcatcccgccgtgcgagcctcattagcccattagccaactggtcagatggatgccaaggagcccggccaggcaccaaccatccaaggccatgcgatcgatgggtcagcaatccacttctgcgacgcggcgttaaatgagctgtcataacattttgtccaacccttgagacgaaaggagtgggttaagccaaaagcgttaacacgtctgccaagg

SEQ ID NO: 39503 - DNA, 754 bp, DROSOPHILA
atgggcgatgtgaccctggagcgcatgatcgatgccatcctcgagagcaaccgcaaggtgctgcccaacgccagacagcaacagcaccagcatcagcaccgccagcccaggcagcatctccgccagcggcacaggctcaggcagcaggtgctccggagcagccacggacacgggcacggccccacccagacgccatcgcccacctaccgccccgccttcgatccggccagcgatctgtgcgagtactggaagtcgccctcgcggagggattccctgccagcggagggcttcgaggagcgggaggtgcgctcccccgtgcccaccgtatccgaatcgcaggatgccaagcggcattccctgcagctgcgcaggcagcgggtggtgcggcgcaagcgaaagatcaccacaaagatctcctccagcgtcaggcagtcggcgcagaagctgcttgcagcggccaggtccggatccatagcagctcccgcccagaagatgcgccacatcagtccggacagtgggcacaattccaccagcgactgcgagctggaggaggagcactgccagctgagtcgcggactggagttgggtggcgaggagctggaggatgcctgtcagctggatgccatgtggttgcaagtgcaggccagagacgccacgaagagacgcctcagcttctccctggtggaagaaagctaatcctcaaggatattcctataccataggcataagacatttttttcatagccctaagaac

SEQ ID NO: 39504 - protein, 231 aa, DROSOPHILA
MGDVTLERMIDAILESNRKVLPNARQQQHQHQHRQPRQHLRQRHRLRQQVLRSSHGHGHGPTQTPSPTYRPAFDPASDLCEYWKSPSRRDSLPAEGFEEREVRSPVPTVSESQDAKRHSLQLRRQRVVRRKRKITTKISSSVRQSAQKLLAAARSGSIAAPAQKMRHISPDSGHNSTSDCELEEEHCQLSRGLELGGEELEDACQLDAMWLQVQARDATKRRLSFSLVEES

SEQ ID NO: 39505 - DNA, 2814 bp, DROSOPHILA
tcctctgtgcagccaccaccacttgaatacgctgcgaatccttcggcttcgacacatccagcccatagagctgcatttcctacacggctgtctggcacaatgcgatagattccttctggattcccattgttctccggctccttggtctacttggtctcctgctccttgtcctgctcttcacatgttatgcaacatttcctgcgctcggcaattttgacataatatcgagattattatacgatttgaactctggccccttcttcgattgtcggggtaggtcgtcgaatatcctcgatattcggcccaagatcgctttcatttgactctggcaaaaaggaaaggtcgagtcgagttttgtacacaatcaattgtagcatttgagcgattcataatggatctttgtagggtcataagccctacttaaggtacaaactttttgcgattaatttgccgcgcggcgggtagatcggtgtatgtatgtatgttgtggaaaattataaaagtccttcccgttaacggaagttaaccgggagattaattttggcattgaaaatgaaaatatgtgaagaaggctagaaaatttgaaagacctgtttacaaggaatgtacaaaagaaacgacacatcctatgttttgtgtgataacttaagatcacttgacgtaagatctttatagtgaaataattcatttctttgatcaacaatctatcttactttttagcatatcttcaaaccagccataaaacgcaacaagtatcttttcatatcgtttatttctcgacagtttaaacttagtggatagactaccaaaatgttcgctcgaagatcgcttacagatacataattctttaggcattacaactacgttaactttggcaatcgacaaagctgcaaatatcttacagtgcgtgggctatgtgaccatgaataaaactagatatctacaagtatgcgtgtatctatatatgtacataacgaatccaaatatcacggaacagcgttcagtcctcgcccttggtgaccacggagacgggtgtggaggcgttgctgctggcacctgccgcgctgttcggcgattgggcggccgtcgagatcagtccgcccgttagcagtccgccgcctccgttgccgcccgctgggggcgtggcatgcggcggtgtgggatgaggcactagcttgggactctcgcgcggactgctgttgctgcacggcgggctaacttggctcatcgcagagagtcctgcgtgcagcgatagattctgcggatagccggccgatgctgccgccgctgctgcagctgctcccgcgccaaagatcccattcagattgctcaggcccatgtactgggagagcagggtgtggaagttgggcagcttgtagtggggcgccatcaggtgctggggcagcaagccggcggcagcggctgcagcgggattaaagtgctggtggagggcaaagtgcgggggccagaactccgactgcatcgagcccggatgacccggaagtccatgtggcggcaggggaatgcccagcggaaactccggcagacctgcaagcggaaggcaaaagggcgatttcgttagtcgaaagtcagagagagcgggtggtggcggtggttatggtggtgagacaagcgacacaagcgacataattcctaattatgttgcacacgtaatttggcaatttgcggacaaatcaaatgcgtatcgctggttgggtgggtgatggctgggatttgatggggtggattcgtgagatgggggtggttaactcaccttgttcgggcagaaggtaaccggccttgtcctgattcataaacttctcacgtttgcgccatttagcccgacggttctggaaccacacctgcaagtgcacgaaaaagaagggagtttagagatggagttgtaggtatgcaaattttgggtgccctcggatttaaggctattataagctaaaggggtaataaaaaacataaaattatctgatatatcatttaccgaagagaggatatgcctttttctgacttatgtatacaacctgtatacttttcaaaaaccagcatacttttctaaagggtatctatccctcgatctaaacttgattagttctacaaaactagcgccttggcaagcgacttgtaattgctttgactttgaccaaaaaccgaacaatttcccaatctatcaatctgtgtgctcgcaaagttggaagcacttggtccttggatggctccttctgccgcctccagcctcgagtgtctgagccaaaggacttggacgccgtggagggttaggtcaaatacaatggcatccaatcggaagtgttctgctctgatttgcaacgctctctgtctgtcgctacccgtctcgctcgtcggacaaaagggtgtcttatgcatttttcgacacttgcttgggtttggggtggaccaaactcgcagccacccaaattcacccctatgcaaatgtgccccctaggccatccacaaaataggcgttggctgcacatacatttccgccttttgggggcgacgaattttcagtccgagccgaggctctcgtttttgatggcaaaattaattgtttgtaaattgaaatcacttgacaactgtctgtaacgctcgttgatgaattcgagacaatagagaaggctctgcaattatagacaccctgtatttagatgtaacccccttctacggccacccacaatctgcaacaatgtgtgcagttgagcgagtagtaaattagcaacgatttccttgctataattgctgccaattattgtcctgtgtcctgtgtgtgtctctgctgagaaa

SEQ ID NO: 39506 - DNA, 588 bp, DROSOPHILA
atgaatcaggacaaggccggttaccttctgcccgaacaaggtctgccggagtttccgctgggcattcccctgccgccacatggacttccgggtcatccgggctcgatgcagtcggagttctggcccccgcactttgccctccaccagcactttaatcccgctgcagccgctgccgccggcttgctgccccagcacctgatggcgccccactacaagctgcccaacttccacaccctgctctcccagtacatgggcctgagcaatctgaatgggatctttggcgcgggagcagctgcagcagcggcggcagcatcggccggctatccgcagaatctatcgctgcacgcaggactctctgcgatgagccaagttagcccgccgtgcagcaacagcagtccgcgcgagagtcccaagctagtgcctcatcccacaccgccgcatgccacgcccccagcgggcggcaacggaggcggcggactgctaacgggcggactgatctcgacggccgcccaatcgccgaacagcgcggcaggtgccagcagcaacgcctccacacccgtctccgtggtcaccaagggcgaggactga

SEQ ID NO: 39507 - protein, 195 aa, DROSOPHILA
MNQDKAGYLLPEQGLPEFPLGIPLPPHGLPGHPGSMQSEFWPPHFALHQHFNPAAAAAAGLLPQHLMAPHYKLPNFHTLLSQYMGLSNLNGIFGAGAAAAAAAASAGYPQNLSLHAGLSAMSQVSPPCSNSSPRESPKLVPHPTPPHATPPAGGNGGGGLLTGGLISTAAQSPNSAAGASSNASTPVSVVTKGED

SEQ ID NO: 39508 - DNA, 2168 bp, DROSOPHILA
cagtgtcctgcggtgcgcacgccgctcgttgtcgccaaattgcaacctggaccaatgggtgccgtgattccactgaatccagcccaggcaatttccagcctccacctctcccgaggacttcaatctaattacgggtctaatgacgcaattgcccgttcccgctctccatgcgatatatccggccagatatgttttgatacagtgtttttttttttcttctcaagtagatccttgggcgaactgcctcctgcagcttggccacgcccacaacaagagttccgacatgccgaacaactcccattgtcatgatatgttttctttttgctctctgggtggagttcgaggtcggtgtttgtcggaaagttttgaactgccctcattcacctttcccaactatgataaaatgtcccttgcgagcaatttgcatatgatatggatggcaatgtcaatctgcctctccactgctccggctcctttgcgaaaggatctatttgatgtggtcagtggagtaggaggacggttcggattttggagcaccaaatttggggggggagcccattggctgtgcatgaagtctaacgtgatattttgccctgctggtggtaagttgtaacgcattcaggatgttttcattatgtttaagatgtgtgtgagaaatatttcaaagctgtaattaacaagctagactaactaaataggtcgtaatcaattcaaattatacattcaaatttagaatttttaattcgtttacgcctgcccatagctattcacaaattaattttgatattggattttttaaatcaaactaagctaaacaatttattaagattctctaagaaaatgcaattattgtatcttgattatgtttccttttaagctttttgtgtgatgtactaagaaactctaacgcagatcgccgacggcaaacgatgaatttttgtaaaaaggatccccttacatttacattccagtaagttatccccagtttatatttgttaaactaaaactcaccactgcgcttgatctggtgctgattgcccaggatctgatcgatgctgtagacggcgcgggggcgtgagacaggactctcctgaacgggggcggggcgcatggctggcggcatgattggatggtgctgatggtgctgcgaggtcgtcgtggtcatcatagctccaccaaaagagcaactcgcgatccgtacggatttctattggtttacttcacttgctacaagttggttttttcttattttgttagcgattttccagattttcgtttttggcaacttttgtttaatgtcacaatatttgttgagcacgctttgaaaattagcttaattaattgctattatcgggtaaatttgtcgattaaacgatgcgatttcgatacggaatacggaacagccactgcgacgaactgcaatgagctgaatcgaatcgagtgaataactgcgagtgagtagtgctcgtgacgatcaacaaccaccgactgagtgcgattcctgccgcccgtaggtttaaatacgttgcctgtttttcgctagcaagtgaaatgggcgaggctcgctcgctcgctctcgaatccgaatcggaatcacagttcccaatccttcgctttcgcccatgtcctgccatgccagccgtctctttcgttcgcacacgctcgctctctccctctctctcctgctgtaggggtagtttcccccagtatctcagtatctcagtgccgtgtatctgtgtgttgggttggctcgctcggtgtgtgtgagtttgggttgcaggtagcttttggttttggcttaggggtgttggcctcctccactctctctctctctctgtctctcttttcaaatctctctggtacttttccttgacacctttctctttcctacccatttaatgcactctctttcggtagttgtaactaacatggtttgctcattaattgtgtttatttcacaaatttcgcttgttaaaaactatttcacccttccccctcttcctttatatatatctcactctctctcacagtagtttcctctccctcccgtttcccggctcatccacaaatcacaaaacaggttgaaccactcacgggattgccaaactggtacctgaatcaagtcggccatttgccaggtcctcttttattagttccgcttccatttc

SEQ ID NO: 39509 - DNA, 168 bp, DROSOPHILA
atgatgaccacgacgacctcgcagcaccatcagcaccatccaatcatgccgccagccatgcgccccgcccccgttcaggagagtcctgtctcacgcccccgcgccgtctacagcatcgatcagatcctgggcaatcagcaccagatcaagcgcagtggtgagttttag

SEQ ID NO: 39510 - protein, 54 aa, DROSOPHILA
MTTTTSQHHQHHPIMPPAMRPAPVQESPVSRPRAVYSIDQILGNQHQIKRSGEF

SEQ ID NO: 39511 - DNA, 2672 bp, DROSOPHILA
gcagcagtttgctgcgtgcactcgctgcatcatttcggcggcacttcatttccgcaacacacacgcagttgcagttgcatacgcacttgccacagttgcggcagttgctgttgcagcagttggtgcagttgcagctgctgcgattgccattgttcgcttaatccccgtgattgtcggcgctcaattctggcaattgagttcattggcaattcgctaatacgtacttattttataaagattaaataataagaactatttgcagggtatctgtggtacttaattttacaagtattatagtatagtattcttctgccttttcaattctacccatctatttcactattcacttgaactcatcggaagtagcattatatcatcataaaatacccaaatttgaatctttttcaagcgaggcctaaaagtatgcaacacattcgaaacactttcccagatttagcgcgtcctcattcctcctgatttccaaatggatgtggaaaaaacccgctcacctgtatccttttaccttcgagcgccgctcagcgttgtcctgattcagcagctcgaagcgaaattggcttcaattatgcgacagaattatgaaattacaaaaattgcgaaagtaagtagctgccgctgcttttcgcttgagccaaatgtaattgcggcaatttgcagttgcagccagtcggctaataacgtttattaaaaccacaacaacaacatggctggggaaagcaagggatcctgggacttaccaaccccccctctcccctcaccccacactgacaataagccgcagagaatgggggaatattgtgctgcaacattgtgcaaattacgcaaatccttgtgaagcacattaatgcgcacaatgacaattaatcgctgcaaattaaaatgatgacaatgttctggattttccatgcccacccatttcagaaaggattaagcctggcaaacggcgaaatgagaattaaatttaaatcataattatttatggctaagccggtggaggcggatagttcacattgtgttccccattcagtcgtcccacatcgcgatgtccttgctccgcccgccgctcctcgtgccgcccatccagaccaacgcccagtcgctcgatgaatttggacgagcggaatccgttcttctgcaaggatcaaggatcaattgttagttttgactgattacagggattatagattccacctacctcgtagtacagcgatctggccctcttggccgcctccggatcaaagtcccaagaagtccgctcgtgaagaaccggctcaccagccacgttattctgcagtgtctccgtaatcagtcgaatgataaagccatctgcaggtggactaaactgaagtagaagcaacagcagcagcggtaactggaaaaggtaagatatattatacctttcaatacagtgaatatgacctatataactgaaacttttaaacatataaatataatttataaatataattgccataagttttttctcatcttaattgttcacaggaagataacgaacaatgagattacacaataaaccaatcgatctgcgtttattactcatacgccccgcattacaatcacttcctctaaacgattttattcacggcttatttacttcgctttgagcagatttcggagcacttacagcggccataaagacaaatctcaggtgtaacattgtctcgattcgagtctgcttttcgacgctgaggagccgcccgtgcgagtcactggaccattgatcactgaagaccacgaatggcagaaatcgcttagttgcataaaaggcagccaagcgccaactcgaaaaaaatattgaaaacaaaatccaagctcgcgagcggctacaaaatatggcaaaccaaacacactttgagaagctacacagtcgaaacggagagttggccgaaaagagcgagattatggccaagatacaaatcggctaacaagtctttaatgaattttcaacaaatgcgctagcacagtggaaaagtaatcaccttagatgcataaaaatagtttattcagtatctcatataaatcatatcagtattttataaacttttatagtgtataaaaaagttaataggtattcagtgcctattaatggaatatgatctccgatctgtgactttgcttgcaaccttcgcgcgagtacttgaaagaccagctttgaactgttttaatttttgtagcttcgtttaatgacaatccaaatttgttttcatggcagacggaactaagtacgcatgggtataagagaaaccaaaggttactgccatttgccactgagcaaactgaaataaaaatgttaaaaacaaacgtcaactgaaatagaagccgaagggaaaatgcgaatgcaaatccaaatgcaaatgcaggcaaagaaagtgcgccggagttgcgaagaaatggcacagagtcgcgaaatgaagaaagcaaaaacaggttgtcaactatttattttccttctttttttttgtctccggcgaagcatgactctttatggctgcagaagttacataatgggtccatcgtcatctcgatcggaggtggtcatccagtcgggccacaaccactttggtaatctggccccaattccatttttgcccacttcaacagctgtttttccactcttttccacgctcttcgaa

SEQ ID NO: 39512 - DNA, 336 bp, DROSOPHILA
atggccgctttaccgctgctgctgttgcttctacttcagtttagtccacctgcagatggctttatcattcgactgattacggagacactgcagaataacgtggctggtgagccggttcttcacgagcggacttcttgggactttgatccggaggcggccaagagggccagatcgctgtactacgagaagaacggattccgctcgtccaaattcatcgagcgactgggcgttggtctggatgggcggcacgaggagcggcgggcggagcaaggacatcgcgatgtgggacgactgaatggggaacacaatgtgaactatccgcctccaccggcttag

SEQ ID NO: 39513 - protein, 111 aa, DROSOPHILA
MAALPLLLLLLLQFSPPADGFIIRLITETLQNNVAGEPVLHERTSWDFDPEAAKRARSLYYEKNGFRSSKFIERLGVGLDGRHEERRAEQGHRDVGRLNGEHNVNYPPPPA

SEQ ID NO: 39514 - DNA, 2510 bp, DROSOPHILA
atatatttcaggcccaagtaccgttatccctactacgatgaacacgggcgcggaaaacttctctacggctacggcggaccggaattgtaccaatacaagacctacacgcccttggagggcattcactagtcctaaatatcgattagatgcaatgtagtccgtaatttatgtattctattatttaaattaaactttctttattaccccaaaaagtgtttttgaattcctctcaacttgaacaatagatggcgctcttggtgaagcgaatgcaatggtcacatcgaaatgttgtgttgcaaccttaccaaacctgcagtgtgaccgcagcattgccggcataaaataacaactgtattcacatttgttatttattattgctgccaaaaggttttgtaaactgcatttattttgaaatcatctattgaaaatgtcccgcaaagaggccctgtcgcagttcatcaatcagatacacggacgccccgtcgccgtaaagctgaacaacggcgttgactatcgaggtgcgttcaatgagttcccaaacacactcatcacatttgacaattttcccaatccactgaccaaattccaggtgtgctggcctgtctggatggctacatgaacatctgcctggagcagacggaggagtacgtgaatgggcagctgaagaacaagtacggcgacgccttcatccgcggcaacaatgtcctctacatttccacgcagaagcggagggtctgaatacaggagggtctcaactggcatggcaccatgaagttcgtagttagagaactctgattcctctgtttccttcagagggaacctgcgacaacacaagtgtttcatacttcaatattaaagctgaaccaacttctcatcatcctgtatacaaaccaattccagtagttcttgatatacccccgatacattagacctcgttgcttcgtttcttaagtttattccataaatacactatctagaggcgctaaattgcaatccccactcaactgggatagtgcggtgtgccatactcgcggggaatggcgccaaagtggcgcagttgtggcaccgaataccccgatcccagggcagcgattaggcgctctccgcgatagccaaactttcgctcgtagaccggacgccaggagcgaccgaaatgcggatcgaaggggatctcgctgggctgctggaacggagagttgccgaagaacaggcggtccagatagtccagcaccgccttcttcttctgaaaatgcaccagcagtggattggcggtggcggcggtgcgcggatcctgcgatgccaggttcttgaagtactggaagttcaccagatccacattggagaagtcaaagaccccgggcagatcgtgcagcgtggcttggactcgcaccgaggagcactgtgttcagccaagggcaatgttaatgggctgattatggtggctggatggttgctttaattgaccacttaccattacggccagtgcagcaattaatacgtatttgcacattgcaattgacaccaagatcaccaagcagacgacgacacctatacgctaccccacgcggaatccaactgatttgaataaattcggccaactgcaggcccatcgatggcgctgcctcccatgtccgactgcccagcgatttgcaatcggtcccaggtcttgtactatgttgcaatatcccattgccgccgattcgcattgcccaattccgcccgacgcggtgtccaccagagcccagccaaatgtaacactcgccactaattggtatgcatgtcgcatccagaggcgttccaatcaaagcgctcgtcaccacagcggatcaattcacatgaccaccgctacttcattactccatggcgaccattggattgattacaatcgctggatcttaatgaggctgctttgtttaaggcgaaccaagatcggtgcatccagctgcatgtggagcatctgtttccataatttatgtatgcaaatcgaaactcgtaaggtgattagctgataaattagtgaaacatttagtgcaacaagcactgctcttaatctattaaagtttattcaacaaaaatctgtatgaatgaagaaatcgagaagttaataattaaattgaatttattatattatatatgaaacatatttctctataaaaggaaatttgacgcggtagttatgcactgacattttaacatacataactttgaagtagttctaaaattatatctgtgatgatatatcggatatctttatcctgctggatctaaacagcaaatcaaaatgttaatttacttgttgtacatattatagcttatataaaacgccacaaaagttaacaacaaaactgagcgtataaagttaatcaaagtatatccaaatttcacattaagtttagcaactccttggcaaaaatggcaggacttgcctttgttaaaggacctttcctgtatctaatcgatatgcaaatggcgatggtaaccgtgtgcgtaggtcgatggccaaatttcta

SEQ ID NO: 39515 - DNA, 438 bp, DROSOPHILA
atgtgcaaatacgtattaattgctgcactggccgtaatgtgctcctcggtgcgagtccaagccacgctgcacgatctgcccggggtctttgacttctccaatgtggatctggtgaacttccagtacttcaagaacctggcatcgcaggatccgcgcaccgccgccaccgccaatccactgctggtgcattttcagaagaagaaggcggtgctggactatctggaccgcctgttcttcggcaactctccgttccagcagcccagcgagatccccttcgatccgcatttcggtcgctcctggcgtccggtctacgagcgaaagtttggctatcgcggagagcgcctaatcgctgccctgggatcggggtattcggtgccacaactgcgccactttggcgccattccccgcgagtatggcacaccgcactatcccagttga

SEQ ID NO: 39516 - protein, 145 aa, DROSOPHILA
MCKYVLIAALAVMCSSVRVQATLHDLPGVFDFSNVDLVNFQYFKNLASQDPRTAATANPLLVHFQKKKAVLDYLDRLFFGNSPFQQPSEIPFDPHFGRSWRPVYERKFGYRGERLIAALGSGYSVPQLRHFGAIPREYGTPHYPS

SEQ ID NO: 39517 - DNA, 3835 bp, DROSOPHILA
actcgagcaccgtcttcgcagcggtgaccaccgagggcaaggtccacgttttcgacctaaatgtgaataagtacaaggccatctgcatccaggccgtggtgcccaagcgaaagaacaagctcaccaggttatccttcaacgagaagctcgccttcattgtggtgggcgatgagaagtaagcaccataccaagtattcaatctatataggcaatatatatttatatattccaatttctgtctttaggggcgtcaccacttcgctgaagctatcgcccaatctccggatgatggtgaagccgccgaagaagcagctgtatctcgaccagaacaccctccagattggcaagttggagaagctgctttccctggtgcgggaacttccggaaggttcaactgcggtgcccgatgcagccacaaccgtgcgaagttaaatcccaacttttaaccaattccagaaacacactgttttcagagttgatgtattatattttacacatatagattatctgctggttctgaaagaatcctgattcatccgtcttgtgttacgctatgtttctatccatctaacaaaaatttgctatcaaccaacaaaaggaacttagaagcaatgtatatatagtcacaaaattgtatatatgcttaaaaacgaaataaattatagaaacaactacgatcaaatccgtttttaagtagtttttgtagatcttaggatcataagaagattaggatacattataatgctagttgaaaacattgtactttaaaaatgatatttcatataaatgaaatttgtagggattgttcgttcagtcggatgtttagtatattgattttaaaacaacattaatatcaagaatctgaactaatagcttactttaattggctgcatcctataattccttaataatcacgatttcgtttagcaaaaaaaaattaaaatatccttttcacagacattttgtgttttttaaaactatatttttaaataaagctgcctcaatcctcatccgcatccaagtcggcggacttcacccggatgcgcttctcctccagatactccagtacattgtttgggcacataacgctcttgcccagaaagagcaccgtggacatcggatgcaggtagtccgccgagaagcttctggccttccagccgaagaagccactggccttcgcctccgttccactgatggaatagggcagtaggttgacgcccacctggttgggctttgagaactggacgcggaaatgatggccatcggtggccttaatccaatagaaaccctcgttgtccacatagggcttgctctgcgacttcttcatcgcattggatcgctccaggtcctggacattgaagctaatgtcgatgtcgtaggcatccggagacaggtgattggtttcgatggcgctctgcagggctcggttgtccagccagtagcgtatgcccacgttctcgaactcctccagcacatggttgaaggtcgtcctcagcttgtccaggcagcacggtggcgtatgcttgcccaggtaggagtagtacggtctctcgttatagacactgcctatgcaggacttggtggtccgctcgcagccgaacagatcgatgtcggtgatcaggggcagcgaggtgttcgaggacgagaactgaccatccaggaccaagccgtgaccctgaccccaaacctcccgggcctgagcctttcctggcactctgtatgcccttctcacgatccgcttgatctgcagtttcttgtacatctcacggaactgccgacggcgcaggtccatcctccgctgtttggtgtgaaaggaggcgaatagacgccgtccctcttgaaaggcttgcgggaacaccgtggtctggacaggatttcagttgttattggtgctgggaaacaagcataaaaaagtactcaccgagagattggctatcttggcctgcatgtagagcatttccggaaagggcagggagaagggctcgggcatggctgccagagcagctgcatccaacaggattgcgtgcttctgcaggaactgttaagaacatacattatttttgcaacttataaaccatatccctgaattttacccaccaaatcacatcgtctcgtatcgttggttgccaccagctccagtgtccagtcgggcaaatccaggttcatcttgacgcagctgctgaaggacttcagattgccggcgaagggtactagcaccatgcgtcgcaccaactgctccggcggcactggaggtcgctgctccttgggctgacccggcaggcccatggagttgatctcgcgcagaatcttctgcaggatgttcttgctgttcagccgcacgccgtccggcatgatgagagcgtatttggtccgaatggacgccaagggattcagctcctgccgcgttcgccgcacatcgaaggacagactctggaatagcacggtgcgctcctcgccggcggttaggttccgttcgtagttgaccggcggataggcgtactcggcaccgccatcctgaagcaccaggatgggcatgttgggtatcacgtccaggatgctgtcgatcgatgccttcagatcctgctcaaagttgtagtggccatagaacacgatggtgatggacttgcgtatgtgtttgttggcattgcgcagcttctccttgggcgacagcttggcggcctttggcggttcctctgccggctgagattcaccggacagagccctacttatccgccgccagagcagcgtgttccacgtgtaatagagaaacaccagattggccagcagaaatccgagcagcagcagcttgaccagacgcagtcggaacaccttcatggcgagtgtgcaggatgtgctcgcgattcgctagattctgatgttgtgtgtatctgtatctgtttgtccacccgggtatctacactgcaactacatgaccgcgttcttcatcagcacatccttccaaggatgattgttgctcatactcaatgtgcaattggcttgactgaaggactcatttaactttttattttccgcttttcgagaactttgtttttgtgcctattcctttttcttcggctatgcgcaaataccgatttcctaccccgcggaaaagcgctttcagctcgaacagctgatggcgccggagctggaaaaacggatgaaaagcttcctcccaggatatgtgaccgtatatcatgccatttttaagagctttccactacgcttttcccgcgcaaaaaggacaaaatcatttttttttttgtaaaacattaaaagcgattgttctctttaattcaatacagtataaaatatttttctgagaaaatgtttatcaggtaagtgtgcttaatgaagttattgtagttttctccacacaaacattaaattttcgaataaaattgtggatgggacatctgtgagacccttcaaataatactgacttttaagcgatcaaaactagaatgactactttcccatgccggcgaagagcagcgggaagggcacctcatcggtggtcaggatctgcggagtcggaggacgcgcctcgccctcggaggtgctattcagccagtaggtggtgaccgtgcccttgccctttagctcgacatcgccgcgctgctccatttggaaggtgccgaacttgtccaggatggccttggtggccgaggacacatgtatcttgcccggctggccagtgctctccattctcgacgccgtgttgaccgtgtcgccaaacaaacagtagtgcggcatcttcttgcccacgactccggcgcacacggaacccgaatgcatcccaatgcgaatctgtatcttgtattccggtttatggcgg

SEQ ID NO: 39518 - DNA, 1719 bp, DROSOPHILA
atgaaggtgttccgactgcgtctggtcaagctgctgctgctcggatttctgctggccaatctggtgtttctctattacacgtggaacacgctgctctggcggcggataagtagggctctgtccggtgaatctcagccggcagaggaaccgccaaaggccgccaagctgtcgcccaaggagaagctgcgcaatgccaacaaacacatacgcaagtccatcaccatcgtgttctatggccactacaactttgagcaggatctgaaggcatcgatcgacagcatcctggacgtgatacccaacatgcccatcctggtgcttcaggatggcggtgccgagtacgcctatccgccggtcaactacgaacggaacctaaccgccggcgaggagcgcaccgtgctattccagagtctgtccttcgatgtgcggcgaacgcggcaggagctgaatcccttggcgtccattcggaccaaatacgctctcatcatgccggacggcgtgcggctgaacagcaagaacatcctgcagaagattctgcgcgagatcaactccatgggcctgccgggtcagcccaaggagcagcgacctccagtgccgccggagcagttggtgcgacgcatggtgctagtacccttcgccggcaatctgaagtccttcagcagctgcgtcaagatgaacctggatttgcccgactggacactggagctggtggcaaccaacgatacgagacgatgtgatttgttcctgcagaagcacgcaatcctgttggatgcagctgctctggcagccatgcccgagcccttctccctgccctttccggaaatgctctacatgcaggccaagatagccaatctctcgaccacggtgttcccgcaagcctttcaagagggacggcgtctattcgcctcctttcacaccaaacagcggaggatggacctgcgccgtcggcagttccgtgagatgtacaagaaactgcagatcaagcggatcgtgagaagggcatacagagtgccaggaaaggctcaggcccgggaggtttggggtcagggtcacggcttggtcctggatggtcagttctcgtcctcgaacacctcgctgcccctgatcaccgacatcgatctgttcggctgcgagcggaccaccaagtcctgcataggcagtgtctataacgagagaccgtactactcctacctgggcaagcatacgccaccgtgctgcctggacaagctgaggacgaccttcaaccatgtgctggaggagttcgagaacgtgggcatacgctactggctggacaaccgagccctgcagagcgccatcgaaaccaatcacctgtctccggatgcctacgacatcgacattagcttcaatgtccaggacctggagcgatccaatgcgatgaagaagtcgcagagcaagccctatgtggacaacgagggtttctattggattaaggccaccgatggccatcatttccgcgtccagttctcaaagcccaaccaggtgggcgtcaacctactgccctattccatcagtggaacggaggcgaaggccagtggcttcttcggctggaaggccagaagcttctcggcggactacctgcatccgatgtccacggtgctctttctgggcaagagcgttatgtgcccaaacaatgtactggagtatctggaggagaagcgcatccgggtgaagtccgccgacttggatgcggatgaggattga

SEQ ID NO: 39519 - protein, 572 aa, DROSOPHILA
MKVFRLRLVKLLLLGFLLANLVFLYYTWNTLLWRRISRALSGESQPAEEPPKAAKLSPKEKLRNANKHIRKSITIVFYGHYNFEQDLKASIDSILDVIPNMPILVLQDGGAEYAYPPVNYERNLTAGEERTVLFQSLSFDVRRTRQELNPLASIRTKYALIMPDGVRLNSKNILQKILREINSMGLPGQPKEQRPPVPPEQLVRRMVLVPFAGNLKSFSSCVKMNLDLPDWTLELVATNDTRRCDLFLQKHAILLDAAALAAMPEPFSLPFPEMLYMQAKIANLSTTVFPQAFQEGRRLFASFHTKQRRMDLRRRQFREMYKKLQIKRIVRRAYRVPGKAQAREVWGQGHGLVLDGQFSSSNTSLPLITDIDLFGCERTTKSCIGSVYNERPYYSYLGKHTPPCCLDKLRTTFNHVLEEFENVGIRYWLDNRALQSAIETNHLSPDAYDIDISFNVQDLERSNAMKKSQSKPYVDNEGFYWIKATDGHHFRVQFSKPNQVGVNLLPYSISGTEAKASGFFGWKARSFSADYLHPMSTVLFLGKSVMCPNNVLEYLEEKRIRVKSADLDADED

SEQ ID NO: 39520 - DNA, 3263 bp, DROSOPHILA
tgcgccagaaactcgagagcacggagcgggcgatggcccagttggtggccgaaatgaacaccgatcagtatgaggcaaaggttagcatccagcatccagtatccagtagcttcctaccatcgtcatcgaatcggaaaaaagcagatacagatacagatatagctatacaacgcgactcagatacatctagtagcacatcatatatcgtagtgatttcagttggaccatctcgctgtcatttgaattaatatttgatctcttttgtgttctcattttcaagatgattgccctcaagtttctcaagcggcagccaaacttctaagacaataataaccatcattcagttcacatagaatcagtcagtaaaacagaccaaaatcagaccaacaacaactcagatcacaactaagtacaacgaacaaagtcaactagattatttctgttttcaattggtttctagtgaatagctgaatcctcggaatggtttcttttacccccctgccacatcctcccccccaaaaaaagccttcagttctaaaactatgtcactctgtccttaatcttcaagtctaacaagtgcatggaacggaattctcccgactctgtttctaatttaacctgcttgtctgctgtcggcatgcgatatatgcatatatatatatatatataaacatatcttttcacatactcgtatctactaacgaacccagtctaatgtgtttgcatctcactgagtactctcgatctgaactaaactaaactcttatgatggggacatattttacgattcaaagcagtcttattcgaaatctattcgaacactatacgtaactttacattgccaataaagataatcgcaaacatcatttcatactcagagctacaaagaaacaactatataaatattcactctctgtgtcgtttctacgtttttcatgtttctcgcaaaaacacaaaaaaaaaaatgaatgtaaatcccaaattgataccctgtactttcatggggctagttgttacggccatacaaggtttgatagacgcggccgacgagcaattgaatggccaagacaagcagagggcgacgagcgacactgaaactgattcgaataaggttagagaccttcaaagggtccggcacggcaatccttgaacatataatttgtaacaagaacttaatctttttgtttattaaccaagatccttcgactaattgagttttgttgcgtttcacctaaccacaacgaattgaagtaattaatgcgttcgatttctgatttcttgcgttttgaggctgtatagaattgcttagctctcacattctactgactgtttcgagagtgtcctctctaaccgtattatatcctgtgtatcctgtgcagaaaaacgacaacgaaaaaacgagggagcaaccactagacaagcagaacctatccaatggacatgcaagcagcaccgaccaaaatccggagcaggagaccgtggcgaagggagccaggaaacggcgggatctaagcgctgaacaggaactgacggtatgccattatataccctgtatagcacctttgagtacgtagatctttgccgtaaataatcgaatattggtgcaggtactcggcatggagttaacagccagttgcgagggcggccacaagtggactggacgccctccaacgcctgttttccgagcgccaagcgaacatgtaagtgccactgacgcacagaccccccaccactttcaagttctcaacttaactagactagtttcgactaactgctaccctaacgctttcaatatatccctacaaaaaaaagtgattaaactgggatgtttcctacgctctcaacctcctctgcgcatatgtgttgaagcttttaaatatgtatatcagaaatactaaatagaatccctcttcgatttcagtccaaattggaagacaacttgccggagccgcagtccatttacttggaaggcgctttggcccatgagtcccagattttggttgccgactcccagatcaaacgcgaagaagtctacgactcggagctcaatggctcagccgaggaaccagccgtatggataagccattctactaaactatatcaattaattaacttaattaacttgcagatcattcttagcagcagaatgacattgtcattgattaatttggacgcaaatcaacaaaatggaaatgcaggcaaatccgcagtggaaagtcctctggctgatgacatcgaaataattggacacgacgagcagtagatcgatttttatatatatataatttggcaatgaacacgacttgattcagacgaaactaactaattgcaagggccgagtgaaatttcgttgctaatttcgttgaacgacgaacattatgactgattgccacgaaacagatttgccaataatttgatatctgatttgtatatatatacatattgtatgttttgatatcttcgttttgattttaaaacgccaacgttgtgtctactccctctaaagtaaaccttaaaactttatgctcttgaaaaccttaatcattttcggtcaaaacttaaagccaaacttgcatgtctagaaaactctttagctcgtttagaaaaccgcgtctttgtgaactgcatgattttgtgtgaatactcttagttgaaagtcaatgcaaaactagtctaccattaagctaagcgcatatgtatttcaagccgcatcgtctaatcaaaatccgtagctacttggcaatgaaattaccttaaaaaaaaatccaatcgatcgcacgtaaatcgtatgattaaacaaataaagttagtgccacggcgtttgtgaacctagtataatgaataaattgaaaaccgaacttgacatccacatgtgttttgaattttaaattaatacatagttataatgaaatttcattccttaatattttccaattataattttctaaaaaattagtttttcaaactaacagtgctgtaacattttgattaacagaatgcgccttacagcacaaagagtgaatttttccttctgctcgtgtgtatacactggcgaacagctgttttttgtcaatctccgccacaataattacgtaaatttcggcaggttagcaattttttgtatattccacagtaattctgcgcaacttaccactagccatgctcctaagggatagcgttcacagaacaatcactaatgttccttgtgactggagacacaatgggtgttccgtaattcttacgtttgattgtggctaatgttt

SEQ ID NO: 39521 - DNA, 642 bp, DROSOPHILA
atggggctagttgttacggccatacaaggtttgatagacgcggccgacgagcaattgaatggccaagacaagcagagggcgacgagcgacactgaaactgattcgaataagaaaaacgacaacgaaaaaacgagggagcaaccactagacaagcagaacctatccaatggacatgcaagcagcaccgaccaaaatccggagcaggagaccgtggcgaagggagccaggaaacggcgggatctaagcgctgaacaggaactgacggtactcggcatggagttaacagccagttgcgagggcggccacaagtggactggacgccctccaacgcctgttttccgagcgccaagcgaacattccaaattggaagacaacttgccggagccgcagtccatttacttggaaggcgctttggcccatgagtcccagattttggttgccgactcccagatcaaacgcgaagaagtctacgactcggagctcaatggctcagccgaggaaccagccatcattcttagcagcagaatgacattgtcattgattaatttggacgcaaatcaacaaaatggaaatgcaggcaaatccgcagtggaaagtcctctggctgatgacatcgaaataattggacacgacgagcagtag

SEQ ID NO: 39522 - protein, 213 aa, DROSOPHILA
MGLVVTAIQGLIDAADEQLNGQDKQRATSDTETDSNKKNDNEKTREQPLDKQNLSNGHASSTDQNPEQETVAKGARKRRDLSAEQELTVLGMELTASCEGGHKWTGRPPTPVFRAPSEHSKLEDNLPEPQSIYLEGALAHESQILVADSQIKREEVYDSELNGSAEEPAIILSSRMTLSLINLDANQQNGNAGKSAVESPLADDIEIIGHDEQ

SEQ ID NO: 39523 - DNA, 2570 bp, DROSOPHILA
ggacgccgagaatgagtaccagctggccatttcggagaactatcagacgatgtcggacacgacattcaaggcaatgcgtcgccagttgcccatcaccaggaccaagatcgactggagcaaaatcgtctcgtacagcattggcaaggaactgaagacgcaataagaccaggaggtgcaagcggaagaggagcggacacagtcgacaaagcggcccaatagtcttccacttgccatggccaagcgagcataggaaccgatcaccagcattaacaccacagcatccgaaacgaagtagcaggaatacgagaaacgagggcggccaggtgcaggtgcctgccgaaaaagcaaatgtctgtaattggctatatacatacgaacatatacctacttatatatatatatacggcctgtatttatactgtgttatacaacgacgaaagtgcgtaaacataactacacatatatcgagtacgatcggagacgatttgattgcaaggatttggatgactttagcctgacggtgaacgatgcactgccgcctcgtctacgtcacgatcgccaccaattgtcgcctttatcgtttaagaagagcattaaacgcggattttatcatgtcctctgacctatgtattattctaattttaaacgaatcaagctcgagatctgcgctctcgatgagccagtcaattcttcgtgtctttgaagaccaaccagccgactctcgactattttaagtggtatcattaggagcactcattcaagtttttcgctttcccgattgttcacaaaccaaccacctagtatgagcatgaataataactatgctaaaccactgatcatttttgccagctctccattgacaaacaataactaaagactttgattttataaaaacaataaatttgtaattaaaataacataactataaaacatttaagattgcttgaattagtcaaatttaaagagaataaactaattgaatcggacattcggattgtcttcactttgaatgtgtttctggttgttgatccgatgcggatagaatgacattggaatcaacttgctgggcagtttgtttggttatactctcgggcagatcgaaggttagttcctcggattttttaagcaaaaatcgtttctctgggttgagttttgtttccagctccagtcgatcgatcagccagcctctatccggctgattggacgcccaaaagtataaagttcctgcaaatataaggttggtaaacgccaaagatttgctttcaaaatcgatggatctacctttatccttgctgccccgcacagccacctcacaacgcgcctcctccgcattgcaattgttgttggcgttggacagatcgatgccagagtccttgatgggttcacccaggagaccaactgctcctcgatggctccgcagtgccttcaaggccagtttgtagtactctgcggatttcacccgatcctccatcttccatttcatgtacatcacagcggatatggaggccaccgcaccgtagacacaaatattgcccagtgttcggttcgacggaaacttgagtccaaccatcttgctaacgcttttttatttacaatccagctgctgttacttgtgtaatataccgtatagccggcgtcgaattagcgatgacagctggtcgatatcgttatgtgaaaaggcttattaagaccgaagtccacctctaaatgcatttatatgcaaattatttgcagaaaatataacaacatcatctattgttatgttgttttagtgacaattaagtcatattataaaattgctcataaaattgcttttcatttaaaaataatttcgatagttatttgttttgaaaaatcagctgactggtcgtatactttataaccagggctgcagtgccacacttatagttagcagattatacaacaaaacgcacagttttgtaaatatctgtaatttatcatttgtttttctattaaagtgacgaaaacggattaaataaagcacatagcagacatgaccagcctaaccgcagttttccagatggcgaggcagcgattgatagccccagcgataggaaactgggcacgtttttatgctgcaaaaccggcggcgccaggtgagcctccacatccaggttaaatagttaacaactaatagtaaatgcattccacagcgggcaagaagaaaaagcttggcaagctgggtcccatcatggagaagaaagtcatacccgtggaaacggatgccaacaaattggtgaactatgtgtgcggaagtaactacatgaaaacaggagaagatatcaaagtaagtttaccctttcaattcctcaatacactcttctgtacgagtatctttgctgaacagatcaaaccggattcggaatatcccgactggctgtggacgctgaatacggaaggcatagttccgctggacgaactggaccccaactccaagcagtactggcgccgcctgaggaaactggccttgcggcgcaacaatcagctgtccaagctaaagaagttctagaacccatagccctaggtgttatcgttgattttggagacac

SEQ ID NO: 39524 - DNA, 513 bp, DROSOPHILA
atggttggactcaagtttccgtcgaaccgaacactgggcaatatttgtgtctacggtgcggtggcctccatatccgctgtgatgtacatgaaatggaagatggaggatcgggtgaaatccgcagagtactacaaactggccttgaaggcactgcggagccatcgaggagcagttggtctcctgggtgaacccatcaaggactctggcatcgatctgtccaacgccaacaacaattgcaatgcggaggaggcgcgttgtgaggtggctgtgcggggcagcaaggataaaggaactttatacttttgggcgtccaatcagccggatagaggctggctgatcgatcgactggagctggaaacaaaactcaacccagagaaacgatttttgcttaaaaaatccgaggaactaaccttcgatctgcccgagagtataaccaaacaaactgcccagcaagttgattccaatgtcattctatccgcatcggatcaacaaccagaaacacattcaaagtga

SEQ ID NO: 39525 - protein, 170 aa, DROSOPHILA
MVGLKFPSNRTLGNICVYGAVASISAVMYMKWKMEDRVKSAEYYKLALKALRSHRGAVGLLGEPIKDSGIDLSNANNNCNAEEARCEVAVRGSKDKGTLYFWASNQPDRGWLIDRLELETKLNPEKRFLLKKSEELTFDLPESITKQTAQQVDSNVILSASDQQPETHSK

SEQ ID NO: 39526 - DNA, 3421 bp, DROSOPHILA
aattatttaggattttcttaagcatttcctagaaagtgtttcaacatttgtgtgtaagccaaatgacaacggcagaatatattagacacaattctatgaaaaggtaaatgactgccgatcatgaatgactaataccgtcagttcttttaattttatgcaaattattaagcgccagaaacgcgagaaaacgctaagagctgataaattatgagaggaaaatgaatacttcaataatgcctagctaatgagaaaacatatttaaatataacaatatagcaaactatttgagataacaaaactacgcgttaaccagaacaaaactcgatttcagaatttcggcatcggctgaggaagccgaaaacttgactaattataaaattatcatggctgtacactaccagaaattggaaaacattttagtcgataggtaaaaaataattgtacgctgtaactaatgttaactttaaacatttgttaaccaccttatagccaataatattaattaaatcatagcattaggcattacatagaccatttttttcgtcagtgtacgctgagatccgttgggtcttctaggtcttggacttgttggcaggcttgtgagctcatgactttcgatgtcgtcatagtcggcagccggagattcgtggccgatacaaatactacagcattatgcccagcgacaacagcagcgatgttggccaaaatatttggcgtctgttcagttcgcattggattcaggaacgaggcggtcggaagcgggaaaaaaaagtacgcgaagaaataaatacgcggcgccttggaatcgcgacggcatttctacttataaacttaaaaataatacaaatatataagtacaaccgccgcgatatatgtatgtgaacggaacttgaataatgaccataaagtgcccaatgttttgagttcctacggatatcaattagaaaattgcaaagcgaatccatatagattcccggatataccaaaaaaaaaaccgaccatgtcgcaaacccagagcataacacccattcccagcacaccgccgccttcacggcgggcaaatcgaccgcccaggatcaacatccacaatctgaccagcggatcggcaatgagccaggcatcgatgccacccagtgcccagccaccctatacggcccaaacgaacttcacgggcaatggaacacagggaccctactggccaccaatggccaatcccttcggatacggcaactttatgaccaagggctacgagggcttcctcgatatcacaaagtcgggcttgagcttcggcgagaagatgaccttcggcatgtacaagtggtcgcgccgatggttcacccacatcttcctcatcctcatcctggcactatacaatatcggcggtgccgttgtattccgcacaatcgaaggtgagatccatgacccagaacatccagcttctatagatcaattggcttatcaactgcctgaagataaagtgctctcctctagagacaatttcattaggttacagccgaaaaagttaagatattcaagaaatcctagagaagaagtgcactgaatgagtttgtttgcttatcaagctcttcggaaaattgtttggaaaatagtaaacagttcagttgccagccattcaaataaatacacctgtgctgtattgtaatcgtaaaaacatccccatcaatttggcagacgactgatttcggtatccgagttcatgaaacactcgaaaaaacaagaacttatttaagttttaaattgaattttattgagttttaaaaacaaaactatacagctgggtcttttgattcaattcgattggagtaagatgttttatattagttggctttaggtttttttgatatcatttggaatatttgaactacaattttgctattagtgtaggcacacaatacacccattttttgaatgaatcacatctgcgaggggaacaatctgtcgtgtaaacaaccaagacgtccagttgcagatgattaacgggcggatggaggagtcccgaatcaggggctgctccatgggccaggcgcttcaatggaaaacttctgaattcaaattcgaattccttcgtttcagttcgtcatgcaaatcaggaaaagctggtggtgcaggatcagcaaaagagtttcttcaatgaaatgcgtcaggtttccggcgatctgagcggggtaagtcctaataggaattaatactaatgccaagctaattaatcattttgtgttaatcaatcattttcagttgagcaaacttgaattcgagggtcaggtgctgcgcatcatgaacacctatccaacggtggtgcaatcactattgcgatccggaatggtagacaatacggatccgtggtccttctgggatgccatggtctattccgctacgatttacacgaccataggtgagtagagctagaagattccttctcgattgctggtgcaaagactcccacgcagataagatatagtatatatatgtatatgcacacatatcagttcttaggacgcaagtcggtctatttatgtatgttgtgctttcttcattattaagccaacgaaatttttgtgacacaaaagatggaaatagtttctgatatttttgcgttcgtcggcatttgtgagataaaaaatgcgtgtctcttcgcgtgcagacagttatgagatttctcaagaggattccaaattccttggaatactgtcacttttcgcaattgagacttgtaaactcacgaaagaatttcctcgaattaacactctacacacattctcgattaaattggttattcatttcacttttaattacaaaagacttttcacgaccataaacatgccatgaaaatggaaatcattacgaccgaacaaatcgtttgtggtgcatcatttaatcataatttaaatgattgttattttttaagaatttatgtttcacattcgtgatgcggttagttaatggcttgatagcctccttattattcgattgtctacctttttggatttgttctaaaattaatgtttggcacgtcgacttgttaaactttcggtaagacaaatggaaatatggcgagcgtatttctggtaaataaattctggccattcgtcgccacttttgacaagtttttcccaacggccaaaaagtgggaaattcgaataaatctgcgagtgtggaaaactttgcacccacatcaacgcaaaagcaattaacacaaattgccaaattattgccacaatgcgacgacacaatttgctgccttgtaaacaggatggcaaattgtgctgagtgctgagtgcattcggtataatcaacttgtcaaaattggcacagatatgtataaacaaaacgtagaacctcaatgggatttttttttatgatctagcgcacttaatttgaaatcgagagtctgccttggagg

SEQ ID NO: 39527 - DNA, 666 bp, DROSOPHILA
atgtcgcaaacccagagcataacacccattcccagcacaccgccgccttcacggcgggcaaatcgaccgcccaggatcaacatccacaatctgaccagcggatcggcaatgagccaggcatcgatgccacccagtgcccagccaccctatacggcccaaacgaacttcacgggcaatggaacacagggaccctactggccaccaatggccaatcccttcggatacggcaactttatgaccaagggctacgagggcttcctcgatatcacaaagtcgggcttgagcttcggcgagaagatgaccttcggcatgtacaagtggtcgcgccgatggttcacccacatcttcctcatcctcatcctggcactatacaatatcggcggtgccgttgtattccgcacaatcgaagttcgtcatgcaaatcaggaaaagctggtggtgcaggatcagcaaaagagtttcttcaatgaaatgcgtcaggtttccggcgatctgagcgggttgagcaaacttgaattcgagggtcaggtgctgcgcatcatgaacacctatccaacggtggtgcaatcactattgcgatccggaatggtagacaatacggatccgtggtccttctgggatgccatggtctattccgctacgatttacacgaccataggtgagtag

SEQ ID NO: 39528 - protein, 221 aa, DROSOPHILA
MSQTQSITPIPSTPPPSRRANRPPRINIHNLTSGSAMSQASMPPSAQPPYTAQTNFTGNGTQGPYWPPMANPFGYGNFMTKGYEGFLDITKSGLSFGEKMTFGMYKWSRRWFTHIFLILILALYNIGGAVVFRTIEVRHANQEKLVVQDQQKSFFNEMRQVSGDLSGLSKLEFEGQVLRIMNTYPTVVQSLLRSGMVDNTDPWSFWDAMVYSATIYTTIGE

SEQ ID NO: 39529 - DNA, 5200 bp, DROSOPHILA
ggctccacggccgccaccacgtccacctccacctcgaccgaatccgccgccacctccgcgtcctccgccacctcctcgtccacctccacctccaccaaatcctcgtcctcctccgcctccgcctccaccgaagcctcttccgccgccgccaccgccgccacgaggtttaccaaatcccattttcaaatattattaaaattgaacgcaaaaacacgtgcgcgttccgatcaaccaaaatatttagagacggaagaaattcaaatttcgttatcgacttatcgatagccacggccatgtgtttcagtatatacggttgtatattatacggtcacactaggcacaaggggcggattttttgaaacttctatttcaataaaattatttaaaactatttttaacaatcgacctgattattaatttcttagtctttttttttaaaaacagttatttttttatgcatatgaatagttttaatgaagatcgtttaactaagacaaattcctggtgctttttttataagcattaaatattcactaagagaacataaaacattgagtaagagagaatcatcaaaaacatcatcggatgcattatagatatatatatatatagatatctatagccgaacagctgttgagacatctaccaaaaatatagacaagcaaagtgaaaatgaatatttgaattttctccaactgctgagagcagttggatgccagccgtggacgaggaagcgagaaatagaagctaaatctattcgatcgtgtcgcgacgtcgaaagaagcagatacataaaattctatatgcaaatagataatatagcaaaataatttcaaaaattttcggacaagtgcagactttaaaagtttcagaaagtgcacaatacatacatataatacgaaattgcaatcgaaagtgatataattacccgaggcatattttcatatgtggaatatgaacgcctcgttgggcagttaaaaatagattaatagatggctaaatgacgagcacgagcacaaagatagatcgcgaaagtagcacacgactgcggctggacaagatggagcagccgatggacgccaggcagcagcagcgccatcgaaggcgcctgggtcgcagccaccgggaaccgacgcccgtcactggagacgccctgccccaggacgatgccagtccggatgccctccctgatccatcacctcagatggtgcgcatgcagatcaggccacccggctcgatgtccgcccacgagagcaagatcctgcgaaagcgggacaagtccttcgccagctcctcggcgcgtagtcaatcgcagccacgggaggctgagaagctgagtagtccggatgccaatcatctgatcaagcatcgcagcctctcctcgccgcggcacaaggaggagtccagcgagagtgagctgaccaccggcagcagtagtcagcagcaaaggcccattcctaatcttggccagacacaggatacgctaagcagattggagcagaatctgcagcgcttcgaggacgaacgacggcgtttcgaggccgagaagaggctctttgagcgcgagaagcgggagcacaagatgcgccatcgccagcagctggacaacgaggagcgcaagcgcctcctgcagagctaccgcaagctcagcgatcgcatccagctgccgcaggacgaggaggaacggcgccgcctcatccacagcctgcgtctgcagcgacacgaggcgcccaagactcggggtcgcaatcgaagtagcggctacgatgagtcctccacccagttcagctcctccgatgccgatgcgacggaggagactcacccgcggccccgagcacctaagattccccagggctttgtggcagccccaatccgcggcgcacctccaccgccgccatcggcgtcgacagctccaaaaccaccggaaaggctgtctgtgagtcgcaacaactccctgtcgcccgtgagaccacagcgacgatccaagactccggagcaacgggaggagatcctccggaagcacgagtacttggaggtgggcgagtccagagacgaggtgataaagccccgcatctcggaggcagaacagcagtcggagctgatgcaaaagtacatggaggccgctgagcgggcggcaaaagcggaggccgccctggcggagcaaatcctgacggcggagggagtgcgtcgcagtcacagcttgagattagcggataaggaagagaagcctcaaaagcgcagctccagtttggagcgtccactaagacccaagcgatcgggcagtttggaaagaaaggaacaggtaactcaagagctccttgagggaactactacaaatgaagctgatacggaaccaaaatctcttggggatcaacccttgttgccagaggaatccatctcagaggcgaaacccaaagttaccttatggcagcggctgaaaaatctgtttaggcgaaagaagaagattcaggcaaagggcgaagatgtcacagatctgtccacagaattgccactggagaagttggcctccaggggtctgctgtacagtttcagcctagaagcccggcatgaatggaaacgcctcaagctggactatccccaaaaggtgaaggaactgcgtcagctacgcaacaggtgcattgcctatctcatctgcatggctatgcttctgggattcggaggactcctgttccggtacacggaaggagcagcggagaatatatacaagtgcgaggtgcgcaaggtgaagcgggatttcatagaccgactgtgggacgtcagccacaacatgaggtagtaccaatggtgccaagtggtagcccagttctgtgagtgattcatttgtatctttgccagagaggaggactggaagtctcttgcccgccagaagctgcgcagcttcgaggatgaactaaataatttagccgagttgggactacgccgctatccgggccaaaagtcctggaactttgtcaattgcttcatcttctgttggaccgtgatcacaactataggtaatgggttacaatggacccataaccatccaaaactcctaaatcctttcgttagttcttatatatgagcatatttccattttaggttctttttttagttagtcatatttaacttattaactcccatgccttcttctcttcctttccaggttacggccacatcactccaaagacgggcatgggtcgatccctgaccatcgtctatgccatcatcggcatccccatgttcctgatcgtgctggccgatctgggcaagttattcacgcgctgcgtcaagttcctgtgggtgtatgtgcgacggatgtactacacgcgctcctgccgccggatacgaaagcagcagcagatccggagcgccatgacaggcttcaatacgatgtacgacatggccatccgcaggccgagcatgttcttcagcaactctgcgccagagaacgatgaggagtcgcaggcggatgccgaggccgcaagatcggtgggcacctcgcacccggagacacccacatcaccctatccagagaccttcgaggtggacgacgagttcaatttgccagtgtcggtggcctcgctgctgctcattacgtacatcctcctaggatccttcggctttctaatgatggagcccagctggactccactggatgccttctactacgtgttcatctcgatgtccacaattgggttcggcgacctggtgcccagtaatcccttctacgtaatggtcagcatgatctatctgatgttcggcttggccctgacctccatgttcatcaatgtggtgcagatcaagctgagcgatcacttcaaaatggccagcgccaaagtgggcgccaccattggcatgaacatgaccagcgagcttggtgatgagggcggctcccaggtgaagactccctccgagcttgcctcggtgcacggttcgcgactggacaggatcgaggaggatggccaggaggcgaatggcaatggccactccccggtgccaccactcacctcgatcctgcgcgcaccgcgtcctctatcgccggcgtccaatggagtggatgctaatggagttggagccgatgctgttggagctggggatgttactccgccacctctgctgcccaggcgtcaggtttccgtggatccccagccgccggcggagggggagaacaagaagaagaaaaagcacaggtttttctagaatccctgggatcttccgcctccaaacaaaaaaaaaaccgacaaagttaacgtgtaagaaacctcaaaaatgacaaggcaatttcaatcgaatttaccgtaacgcgaaactctatattcatttatttgttatttaattttactcaccatcatcgtagcataagtctaatgttaatgaaataaagcgcgcgagttgacaacgcaaattgatgtttttaattgttgtaaattccgcttaaggatcataatcataaagttgtataatttttcaacactctattatcctgttatcagcgtggttttttgctcaatccggaatcgaattgccagatgcgtatgctttgtacgggaatgcatcccaaaatcccagtaacagggagtcgggggcgcgaatccaaatgcagtcgcagtcggcagctgcacatctgtcgctcgtaggaaatggaagaggaagcagccacaggaggcgttgtgcggagagagagagagagagggagagagggagagacccattcccattgagagcgagttgtggttctctctgcctctctttcgctgacacacgacaggatggcatgcttcgcactcctgcttcggctggcattcgtgtgcatgttccgtttccattccgttccgctacgagcacttcgcctgagttgacggcttctgttggacgcccagttgttgttttggcagcgtgcggttcggtcgacgggttacatcgccttctctcctctaccaaaataaagaggcgccaaattcaatcaattggacaatatcacacgcaactcaacgggcacgaaagtgtttgtcaaacaacatagattgtataacattataaatatatgcatattcaggcggtactcgctcagtggctaaagcaaacattcagtgccagcgatccggagaattccgatcgatcgcgtcggtacaaaaaaaattgagcgagaacaggaagagccggctgttggcttcagtctacaaatcctcaccctcgtgaa

SEQ ID NO: 39530 - DNA, 2988 bp, DROSOPHILA
atgacgagcacgagcacaaagatagatcgcgaaagtagcacacgactgcggctggacaagatggagcagccgatggacgccaggcagcagcagcgccatcgaaggcgcctgggtcgcagccaccgggaaccgacgcccgtcactggagacgccctgccccaggacgatgccagtccggatgccctccctgatccatcacctcagatggtgcgcatgcagatcaggccacccggctcgatgtccgcccacgagagcaagatcctgcgaaagcgggacaagtccttcgccagctcctcggcgcgtagtcaatcgcagccacgggaggctgagaagctgagtagtccggatgccaatcatctgatcaagcatcgcagcctctcctcgccgcggcacaaggaggagtccagcgagagtgagctgaccaccggcagcagtagtcagcagcaaaggcccattcctaatcttggccagacacaggatacgctaagcagattggagcagaatctgcagcgcttcgaggacgaacgacggcgtttcgaggccgagaagaggctctttgagcgcgagaagcgggagcacaagatgcgccatcgccagcagctggacaacgaggagcgcaagcgcctcctgcagagctaccgcaagctcagcgatcgcatccagctgccgcaggacgaggaggaacggcgccgcctcatccacagcctgcgtctgcagcgacacgaggcgcccaagactcggggtcgcaatcgaagtagcggctacgatgagtcctccacccagttcagctcctccgatgccgatgcgacggaggagactcacccgcggccccgagcacctaagattccccagggctttgtggcagccccaatccgcggcgcacctccaccgccgccatcggcgtcgacagctccaaaaccaccggaaaggctgtctgtgagtcgcaacaactccctgtcgcccgtgagaccacagcgacgatccaagactccggagcaacgggaggagatcctccggaagcacgagtacttggaggtgggcgagtccagagacgaggtgataaagccccgcatctcggaggcagaacagcagtcggagctgatgcaaaagtacatggaggccgctgagcgggcggcaaaagcggaggccgccctggcggagcaaatcctgacggcggagggagtgcgtcgcagtcacagcttgagattagcggataaggaagagaagcctcaaaagcgcagctccagtttggagcgtccactaagacccaagcgatcgggcagtttggaaagaaaggaacaggtaactcaagagctccttgagggaactactacaaatgaagctgatacggaaccaaaatctcttggggatcaacccttgttgccagaggaatccatctcagaggcgaaacccaaagttaccttatggcagcggctgaaaaatctgtttaggcgaaagaagaagattcaggcaaagggcgaagatgtcacagatctgtccacagaattgccactggagaagttggcctccaggggtctgctgtacagtttcagcctagaagcccggcatgaatggaaacgcctcaagctggactatccccaaaaggtgaaggaactgcgtcagctacgcaacaggtgcattgcctatctcatctgcatggctatgcttctgggattcggaggactcctgttccggtacacggaaggagcagcggagaatatatacaagtgcgaggtgcgcaaggtgaagcgggatttcatagaccgactgtgggacgtcagccacaacatgagagaggaggactggaagtctcttgcccgccagaagctgcgcagcttcgaggatgaactaaataatttagccgagttgggactacgccgctatccgggccaaaagtcctggaactttgtcaattgcttcatcttctgttggaccgtgatcacaactataggttacggccacatcactccaaagacgggcatgggtcgatccctgaccatcgtctatgccatcatcggcatccccatgttcctgatcgtgctggccgatctgggcaagttattcacgcgctgcgtcaagttcctgtgggtgtatgtgcgacggatgtactacacgcgctcctgccgccggatacgaaagcagcagcagatccggagcgccatgacaggcttcaatacgatgtacgacatggccatccgcaggccgagcatgttcttcagcaactctgcgccagagaacgatgaggagtcgcaggcggatgccgaggccgcaagatcggtgggcacctcgcacccggagacacccacatcaccctatccagagaccttcgaggtggacgacgagttcaatttgccagtgtcggtggcctcgctgctgctcattacgtacatcctcctaggatccttcggctttctaatgatggagcccagctggactccactggatgccttctactacgtgttcatctcgatgtccacaattgggttcggcgacctggtgcccagtaatcccttctacgtaatggtcagcatgatctatctgatgttcggcttggccctgacctccatgttcatcaatgtggtgcagatcaagctgagcgatcacttcaaaatggccagcgccaaagtgggcgccaccattggcatgaacatgaccagcgagcttggtgatgagggcggctcccaggtgaagactccctccgagcttgcctcggtgcacggttcgcgactggacaggatcgaggaggatggccaggaggcgaatggcaatggccactccccggtgccaccactcacctcgatcctgcgcgcaccgcgtcctctatcgccggcgtccaatggagtggatgctaatggagttggagccgatgctgttggagctggggatgttactccgccacctctgctgcccaggcgtcaggtttccgtggatccccagccgccggcggagggggagaacaagaagaagaaaaagcacaggtttttctag

SEQ ID NO: 39531 - protein, 995 aa, DROSOPHILA
MTSTSTKIDRESSTRLRLDKMEQPMDARQQQRHRRRLGRSHREPTPVTGDALPQDDASPDALPDPSPQMVRMQIRPPGSMSAHESKILRKRDKSFASSSARSQSQPREAEKLSSPDANHLIKHRSLSSPRHKEESSESELTTGSSSQQQRPIPNLGQTQDTLSRLEQNLQRFEDERRRFEAEKRLFEREKREHKMRHRQQLDNEERKRLLQSYRKLSDRIQLPQDEEERRRLIHSLRLQRHEAPKTRGRNRSSGYDESSTQFSSSDADATEETHPRPRAPKIPQGFVAAPIRGAPPPPPSASTAPKPPERLSVSRNNSLSPVRPQRRSKTPEQREEILRKHEYLEVGESRDEVIKPRISEAEQQSELMQKYMEAAERAAKAEAALAEQILTAEGVRRSHSLRLADKEEKPQKRSSSLERPLRPKRSGSLERKEQVTQELLEGTTTNEADTEPKSLGDQPLLPEESISEAKPKVTLWQRLKNLFRRKKKIQAKGEDVTDLSTELPLEKLASRGLLYSFSLEARHEWKRLKLDYPQKVKELRQLRNRCIAYLICMAMLLGFGGLLFRYTEGAAENIYKCEVRKVKRDFIDRLWDVSHNMREEDWKSLARQKLRSFEDELNNLAELGLRRYPGQKSWNFVNCFIFCWTVITTIGYGHITPKTGMGRSLTIVYAIIGIPMFLIVLADLGKLFTRCVKFLWVYVRRMYYTRSCRRIRKQQQIRSAMTGFNTMYDMAIRRPSMFFSNSAPENDEESQADAEAARSVGTSHPETPTSPYPETFEVDDEFNLPVSVASLLLITYILLGSFGFLMMEPSWTPLDAFYYVFISMSTIGFGDLVPSNPFYVMVSMIYLMFGLALTSMFINVVQIKLSDHFKMASAKVGATIGMNMTSELGDEGGSQVKTPSELASVHGSRLDRIEEDGQEANGNGHSPVPPLTSILRAPRPLSPASNGVDANGVGADAVGAGDVTPPPLLPRRQVSVDPQPPAEGENKKKKKHRFF

SEQ ID NO: 39532 - DNA, 2847 bp, DROSOPHILA
ttgtgcttaaaacgttcaactaatggtttgttcgaacattttaacctaatagcaccaatcacacctacaagcttaacgacgatcgaatatatatactattaaattcccacatcatctagaccggcaattattaacccctccgaacacacatgctccaaaatcgaggtcgctttgaaaataaaccagctttctgggtttcattcatgaatgttcgcgagacaatgcagctagtctgggttagatgccaagtggatcgaccaggttcatggggcttcaaccacgttggtaaagtgatgacaggtgtggattaaatgaaacgggagtagcatagccgacagttgaatggataaataagacaagaaggtgaaaccgagtgtattattgaaagtgcagcacttagtcctccaagaactggctaagaacgaagacccacaaccaactctcgagctaagttagcgggttaacaagaaagtgagttttggtttaccaatggtagcaatgatatcacaccattccaggcacgtggccatccaaacttccaccctgatgtttgcttactttttttgtttattttgatcccaactccccgccgtgagtagactaatttcgttggcactacaagtgcatttcgagttgaaacccaaaccaaccaaaccaaaatgtgtaattgaaactgaaacgaaagtggaagtgggagtggaatcatagccattggccatgtgtgggcggaaatgagtcacttgagacgaacgccctaaattaggttcaagagctgctccgttgcaaattaattttaatattttattgggcgaaacgaaaatggaaattcgatttggagcaccggcgcggcaaaccacacaaacaagccatctacataattgatagcatcatgcgacggttaaatttgttttaacatgcttaatgtattttacttatttagaccgtattaattataattaagtaaaaacactttatggcattcatttataatgaatacaattcacttttcattacctcagattcagattgcacttagattagaaattcttgctcaaattaaagtttatttaaatatgatttcttgaggaatttgccttacctttgctacccttgagaatgctgttgggtggaccgcctcgtccggtggctgctcctccgtgcactccgttgctgccaatgccattgcttggcaatccggagatgaactgattatgcaccgacatctggctgtttagcgaggaggtgccactcaacgaggcaacatcctcgcgtgaagctgaatttccaatcactgctgaggcggatttcttaagtgccggcggcggtggcggacgtagatggtggccacctggtggcgctaaaccgccagacttctccccgttcccagttacagttccattgccatgcccgctcccgttaccaaccacatctgtgccagccgaggacagtgtctgggaagcggctgccatttcgccggcatcgccaccatcgtccacattgtcacgactgcaattgaattttctgctgcttccgttggcaaggctagaatttagattcgagtttccgttaaatgttgcaaaactggtcgcggcggcaacaggatgtggatgtggatgtggatgggagtgctggtgttggtgggaagcattcagaggcgccaactgttgcggctgttgttgctgatagaagtgattgctgttgaaatgctgctgttgctgctgctgctgctgctgttgctgctgcagcattaggtaatcggtgggagacttggcggtggccacgcccctggccgccacacctgctcctccgccggctgtcgacgttgtcgtggccgtgattattggcattttaagccggctgactgcctggtttttagctgtctttagctgcgatcgcaatctctcacacagttgaattgttttcaggcactagcgctatttggctccattgcatttgagtttcgttatttaatacttttgtcgattgtctcgatttcgctttgtttcgcttgtctgcgtgaatgtttttagataaactttgaacgcttcttcattttgccgtttaaataattgttatgtcattgagctgtcattccggttcgtgaagctgcaaaacagaacaatcaaaagagaaaccattaattagcagtatgcaaagtaatataaacaattaccatgtgtatgcatacaataatcgtaaagcaataaagaacgcttcagttcgatttggcatgatgctcatttttattttaagatgcaaatatgtgcgacctcttttaatatttgctaaaatgtatttaaaactggtgttttaaagcaatatatttagcaacccaatagaaacagctgagttccattaactggaatctcaagagattgggaactcttgcttgaagatttacaacactttattattatgaaattccttaatacccgcaacttaaactgcatggcatgaaaatcatcgccacatactttgaatatccaacattgctgggtggtaccagctcgctctccacctccaaacctccaaaccaagtcccagagccaactatccagttagacagctcccggccagacaagcgcattgttcgatggcttggtccagactgcagttgcaagtggggccaatcagtagattgttcagttaggctagtcagtatccatggcaaccatagccgcagaaaaaaaaacccctccattgttgacattgcaatttaacggcgagctgcttcgactttcccatgccagacgcatagttataattatttttgtgtgcatttcatggcgaggtttatcttaaattttcgccacttaaagccattttttgcagtcttcaagtgcgctt

SEQ ID NO: 39533 - DNA, 762 bp, DROSOPHILA
atgccaataatcacggccacgacaacgtcgacagccggcggaggagcaggtgtggcggccaggggcgtggccaccgccaagtctcccaccgattacctaatgctgcagcagcaacagcagcagcagcagcagcaacagcagcatttcaacagcaatcacttctatcagcaacaacagccgcaacagttggcgcctctgaatgcttcccaccaacaccagcactcccatccacatccacatccacatcctgttgccgccgcgaccagttttgcaacatttaacggaaactcgaatctaaattctagccttgccaacggaagcagcagaaaattcaattgcagtcgtgacaatgtggacgatggtggcgatgccggcgaaatggcagccgcttcccagacactgtcctcggctggcacagatgtggttggtaacgggagcgggcatggcaatggaactgtaactgggaacggggagaagtctggcggtttagcgccaccaggtggccaccatctacgtccgccaccgccgccggcacttaagaaatccgcctcagcagtgattggaaattcagcttcacgcgaggatgttgcctcgttgagtggcacctcctcgctaaacagccagatgtcggtgcataatcagttcatctccggattgccaagcaatggcattggcagcaacggagtgcacggaggagcagccaccggacgaggcggtccacccaacagcattctcaagggtagcaaaggtaatgaaaagtga

SEQ ID NO: 39534 - protein, 253 aa, DROSOPHILA
MPIITATTTSTAGGGAGVAARGVATAKSPTDYLMLQQQQQQQQQQQQHFNSNHFYQQQQPQQLAPLNASHQHQHSHPHPHPHPVAAATSFATFNGNSNLNSSLANGSSRKFNCSRDNVDDGGDAGEMAAASQTLSSAGTDVVGNGSGHGNGTVTGNGEKSGGLAPPGGHHLRPPPPPALKKSASAVIGNSASREDVASLSGTSSLNSQMSVHNQFISGLPSNGIGSNGVHGGAATGRGGPPNSILKGSKGNEK

SEQ ID NO: 39535 - DNA, 2403 bp, DROSOPHILA
cacttcgtttccaacccacaaaatctaaacatatcttcccattttcgtagatatcaggagcagttgcaaatgtttctcaaggaacaccccgaaattgtggccaacgagttggccaaagccaagaaagccacaaaactggatggttcgcccaaggaaaagacgccgaagggtgaatcagccttgggcaaggcgaagaagaccaaggcaaagccggttaagcggcagagcgaggatccggatgatgtgcctctggccaaggtgaagcgtgcccagacaccaccgcctcccacaccgccagcggctccagtacagccccctcccagcagcgtgccacctgcgacacctgcaccacgaccgctgcagcccggcgagatacccatctacaccaacgagttcatcgaacacaatcgcagcacggagaatgagctgaggacgctgcgcaaggccaagaccgatctggagcagcagaacgctgtgctggaacagcacgtagataatacgaaagccgggtacgccaaggtgatgggcgaggtaactgagctcatggaggagaaccaacgcctggagacctatttgcgcgccttgcgccagaaactggtcgcagctctcggcggaatctcgatgccaccactggagccaagtggtcccagcgttggcaacattgacaagtacatccggcacttagccgggctcgtcactcagccaagcaacgtcactttgattaaggcacgagaggcgctgcgtaaagtggacaccagtagcttgctaaaaccgtgattcatagtacagtattcatagcgttaataacttcaccataaacaatagtcatagtcatagaacaatagttatcaatgccaaggatatcaaaagagaaaaccgaataacaataaaatatccgcagcatttgtatgtagccaagttttgggagcgcccacttttgtatttgttaacgtctgtaagttaggagactactcgtatgtacccaagaatatcctcatttttagttgtccttgggagcgtcaacgccgagagcgaggctgcgatgagagggaaaacgtggcactttacgtggtcctgccgtgatcagtccggcatcgccatccacggaactctgcagccttggcgccttggtccgacgattcaaacagttgcgtagaatatagtagcctcccagcatcaggggaatcaccattaccgggtgacacgctatcccaagcacaaacagaaatgtggacatcatcaggttgattagggcctctgtggatcgggtcgtgccgattgagtaaggcgaacatggtcgtgagcgatacacttacgttcaatgctcgaaatggtggccactgttgtgtagatcgcatacgaaatggcttcaagcacactataaatatagtagatcagcattttggatttgttgaatttcctggtggaactgaactgctaaagcgattcgggcaactgggaaaagtcaaaaagtacaactgaagcaaaggttcctacgactatgaaacaataagaaaaactaaattaactaaattaatcaaaatagaatttatacttgcttctcgcagcgaaaggtttctttattattaaacaaaatagtcgacgtttcacttcgcgtaaataaactaaagcgtttctcttagttgttttcgattttttgtttcttaggaacagcagaactaaacaaaaataaattaaaacttaaaagaaaatcgtttttcgtttgatgtttgttttcaaaaagtataggttctaaattatagcatacatttaaggttttataacaaaaataatttaatgagataataaatcaagggcgcagacttcaaaaatattccattgaatcgttgggcaagaggcagaggtcgtgcaaaactcctggcatctccccaagatcatggccatcacttcggttggtccaactctgtcacagcgtttggtaaaaaatagaaaacattttacataggattttggggggtacttccttggctttcttcatgaattaaaaaatatacgaatcgccattttcattttgttattatttttagaaatttgtgttctgttcttatcgctctcaaatgtttctcgagttctcgaatcatcttgttaaagtaatcatgtacttttcgtgttagagggagtttactaaatgtgtatgtggtgtgtggtgtggtggcgggcagccgatttaaaacagtgctttaaatgatctgagaatattgaaacgggcggtcagttatgtaaggaaatttctgtttggaatgccgaattaattgaggaaattggatttgattgaacaatttgaatttttggaagggggggaaatgtttagcagttttgagctgcattcatcagtgctgcctgcgcttctgtggcggtgattaaattttaaaggaaactgct

SEQ ID NO: 39536 - DNA, 344 bp, DROSOPHILA
aaatgctgatctactatatttatagtgtgcttgaagccatttcgtatgcgatctacacaacagtggccaccatttcgagcattgaacaggccctaatcaacctgatgatgtccacatttctgtttgtgcttgggatagcgtgtcacccggtaatggtgattcccctgatgctgggaggctactatattctacgcaactgtttgaatcgtcggaccaaggcgccaaggctgcagagttccgtggatggcgatgccggactgatcacggcaggaccacgtaaagtgccacgttttccctctcatcgcagcctcgctctcggcgttgacgctcccaaggacaactaa

SEQ ID NO: 39537 - protein, 113 aa, DROSOPHILA
MLIYYIYSVLEAISYAIYTTVATISSIEQALINLMMSTFLFVLGIACHPVMVIPLMLGGYYILRNCLNRRTKAPRLQSSVDGDAGLITAGPRKVPRFPSHRSLALGVDAPKDN

SEQ ID NO: 39538 - DNA, 7997 bp, DROSOPHILA
tgtacagtcagatcggactcatatgtgctccatgcaggagattgtgattgggttggctaaaaacatgcgatgtattatccattaagttgaacgagttaaacttattcaaagggaagaggaggacaccacacgattagccaagatgcttcattgacttttcatggaaaaccaaaatgaaagcaatttttaatattaattaaagaatcaatacggaatgcaaaacattatcaccaaaaacacaacaaaacgaaaaaaaatcgaacaaaaaaaaaaacgaaaaatcattgaaaaaaaatgtataaaaacaaacgaaaaatattgaaaaaaactttaaaaaaaaatgtaatctagataaaattggcactaacctatatatgttagtagctattaaggcggatgacgatttatttaattgctcaaccttgtttaaaacaattttacatcatcaacgaaagttggcgaattgaagagaagtggagtgaagtttaaacctcctccagatgaattatttattttttccctttataactgtatttgtactttcttttctcgattaaccaactgaagaatcacatatgtttttcgtactttttttacttttcattacctaaacaaacaagaaacattgcaaatcgaagacttaaggaaactaaaaggaaactaatggaatatgggtttatgtattaaaaccttcaatcacaatgtcatatttttctactatttctttttcatgttgtgaacaatatattaaaacaaaccaataaatacgatgaaaagtaatgccatatagagcgtatattattacctggtagttatacctggagttccagacccggtgccaggtagcaattagcggtcgtcagtcggggatttattggattacgatgtggaaaagtggcgaacggacggacagggctcatgtccgtgcttgaggagatctacgggtgcctgggaattttacctgttgataagaagagaattaagtcgtctgcccacatttatgatacggatcaagctctcattgctgactatccgcgatatcattcacattcatttagttagttgcgatatcattcatacgcgtttacaactgtattgtcagctggcgtggatgcttcattagatgcctctgtatcaatttcgattatcaatcgcttgctaattgaatgagtggccggccaaatcagaaatatccacatttgaactgtcaaaatcccgaaaacaattcaatttccagtcgcagagtgtatcagtttccattgctgttatcaaagagagcgcttctctctccactccgaattttccatccgaattttcacagtgcagtgcagtgtcatctgggagcgtgcgtccgctttatcagcatttttcggtgtgctttgctcgggcgatcggattgtcggagtccgaaaggccaaaaactgaaacgatcgtttcaattctgtgtctgcggttgaattgaacggttccggccaacgtgcgcgctccgtaacgattgctataacattctacggcgtaatcataactaaaaaatattgataatataacatataaagctgtttgaatattacatatatataaaatatataaagatcacagaaaatcgaagaatcctagaagagcatagagtgatgtgtgtgtagtgaactaacaagaatcctgccattttactaggattatcatcgccgactttaaatgggattatacctgaacacttgaatttccccagcggtaagcggacggaaaaatctgtttggattttttttgatttttttttgttgattattttgctttcttgatggtagtattatggggtctggcgggttatcgtgaatggtgcacatagtactacgactagattgcacaacagctgtgtaagctatattgaattttctaatcaggaaacttagcattgaaatgtgcgccagtctctggattctatatgctctatatgcaaccaaaagagtctccacgacagcataatgcgatagaatccaagttaaattgatttcaattagcggaggcagcacaacggcaattgtgagcctttctctgtgtgtgtagcacacatatcttgcagataaaataaaagtttcactatatactatatactacttgctgtgtgtatctactaaaagtaacgcttcagcagggctgtttattcagtaattaactgtggtaaaaacacgtagggaacacctgcttatcaaggcgcagactaatctttacagccagtgtgttctggaaaagtaatcaaagcctcgagaatagggaaacgttctcaacaaagaaaagttatacaaaatgtcatattcttaaataataaacacatgatcgaaatatgatattttcgactggcattccgataaagtagagtagtcactgtatttggatacttttgtttttttttttttttgtttttttcagtccctgggcaaatgttttcttgattgtgtttaattgaaataaatgaacaacgctcttttatgctacaccaatctttacggggccgtttcaattaatttttttttttattgttcttggcatcgccgttataattttgaaagaagctatcagcagaatggggacttacacgataagagcacttgacgtactctgataagcttcggttttttttgaggaaaatatgattgttacccaatggcatttctgggaggtgggtggtaatgagaaggtagcccagatgggaaggttgtctcaaagcaatgtttcatcagtgcatcagagagagagagagagagaagagtccaaacaaataaatctttatcgtagcaacgagaaatgtgaataaatctcggggccctccggtgcacacacacacacacgcacacctgttgggggtcggccagggagggggtggagctgaaagatatatatgccgatcggacggggtatagccgataatatatgcctacttctgcgacgcccacaatgtgtgacaggaactatcacaagagcacataaatccattcacaaatgtttagaatgttattaaaatatttgatactaatttcgtgttttttttttatcttccgattttttttttttgtggtgggggattttcgatttcatgttgcgttttgttagtccaataatcgcttggctcggcgaacagataaataatccctcctcgtcatatttatcatatcgggcaggctgcaatccgttggtcgacagtcggatacgggcagctgggtgaatgaatcgctagcgccttggaccattccgatccgtaacccatttctgccaccccattcgcctttccatggcattgtttgtctggtctgccgcctgattgggtataatatataaataaatattgaagctgaacaaatgcggcgaaagtgaaaaacataaattgtgaccccaaccaataattccaactcgcaaagaactaatatctaaggctaattcggattcaccatttgatttgcgggacgggatcacttttatggccatagccgccaagtggatctaccatttggtgcctggcattagccctttttatggccaatttccttgaattcccagccccctaacaaaagttgtataataaagtcagtcagctgggggatgcgatgcaatctcctcaaatccaaaagtttgcatttggtcgccactgtttatgctgccatctcattctggccactgttttgggcttttctggttaattttaatttaaatatatgaaatatatttatagccattgttgcggttgctgtcagtccaagagaatgtgtgtggaaatcgcttcaatatttcttttgatattttctgcttcgttttttcgctgattcgacaggcggctctaatgacagaggtagccgcaccacactgggtggcaaaagtgtgcgccacgcttccgctagtggagcaaacatattggcagaaactgtttttcattttctatgttttcatttcgtgagcacatgcctctcaagtggagcgcaacattttttggtcaaaggccaagacacttcagctagctggaaaataggcaaaaattaataaatggtcgaatcatgatgtctaaatggggaccatgaatcacttaaatttttccaagccaacgcagctagtatgagcaacgacgaatggttactaactttataattgattagcactcttttgttgcctttgcaagaggccaagatcttatcggccaactgggcgctccatatgtcttaattccgccacttggacgggctcaaagtgatttgccaatatggatggatatctacgacgtcgttcatcattcattggtaagcaagcgtttgagcttcgtgtaaatagaactatccacttttgctgacccgcaattgatttcacgggaatttcagcttcgttgggcgaaatgatgaaaacttcagctgcgacagcaattagcccgaatgtcacaaatggaaaattacaatactcaagacattactcatgttgttcggttttcattttcacatttttcacaatgcaaaatcacgcaaagccagctgatacaaagttgggaaacgtgcaattttctaattgcccttcaatggggcgtaacagagacattaacaatggattctggccatttccaattcccaaatgtgcataccgagtgggcttacatgtttagatcatgtctagatatatgtacttatcctgaggtataaatcacgtcgaagcattcctatttctggcccataatcgattattggctttcattttcaccaaaaacacttatattgcttttggcaaatttcgggaaatgcttttgtgaatctgacatattgaaaagagccataaaggcattttaatggaatatttgtttgatttatggctaccccttttgctgtttgatgtagaatcaaaagatttacacgccgcacgataagatattggagcaatggcaagtgcttcccaaaatggcagtgagtcagttatttttcgggctagttgcttttattactattatagggccgccaaatgtttccgccgccgcaatgcggaatcatcttttgttgatgtgcatgaatgcagcgggaatgacactgattgtgtgttacgtatacgtaatatgaatatcgcgtatacgcaggccaacagcagctgacctaggcttcgaatttgagctcagtttgtatctgtatctgtatctgagctgccatggtttaattccatctgtcaggtgcggtagatccgcttgattgaatgcattcagctttggatgcgagtccgcattcacccccaaaaaccaatcaaaacccagacccagacccccagcgatcggcaatgatcttgtaaattgttaattcgaaaataaacgctttgacgagcccatgggcgattgtttgcttaaatttattgttctagttttaatcaagaatataaacaagttagcgccgaaatgaagtcccatcgtttggatttacattttcatctatatgtatatatgttaatttattttggcagagcatggaactgcattggcagctgctgacgttcatcgtgtgcctccagttgttgcattccgccggattcatcattcagtcggaagtgcgcaagtgcacgtacggccatatcgataagctgctccggattcgttgctacgacttggacctcaaggaggtgccacagaacctcaagagttcggtggaggtgagtaacgatcgaggggtcaggcgatcagacttggtcattgctgggcccctcgtcacagttagcctcaattgagcttaattaaagaataaagaagttgcccacaaacataaatttatccattacaccgacatgcatagtcgatgtgtatgggaaccctacccatgccattcaaaactctctactgaaattaaatgatctgacaattcgctgaatgttttttgcaggttctggatctatcgcacaatcgcatcaggaagctgaaaactagctcgtttcagcgatacacggacattaagtttctgatgctctatgataacatgatcttatcggtggaggtgggaaccttcgagccactcacctcgctccaggtaacaacgacatccaattaatcaacgagtgtgtctttaattaatttcttaatcgaaattcccaggaaattgatctttcgaataatggactgacaacgataccgctggagttgttccagctgccgcgactgagaaacctatacatcgatagcaatgagctaacatccctcaatcttcaggcactggagaagcccattcgtgctccactggagtacctgaacgtggcaggttgcgagctacaggagttacccgatctgggcatacttccaagtaagcagagatatgtagatatatggaatctatctaatattgaacgattctcttcagaactctggcaactgaatgcctcgatgaatccgctgcagaacttcaggatcgacagcctggcgaatatgtgccacctgcaggtcatcgatctgaccaagtcgcagttgagccagtgtggctgccagcaggtcaccaaccatcttatgatgctcggcgccagtccgaagttcgtgccagtttgcttgggtaagtagtgatggcgatgatggcgctgcagtcggagcagctgcttatttttggcacatgaccaacttgcaattccattttcagaggcgctcgacatccgcgagtgtccactgccctacaatcgaacgatccattcgccaacattcgccagttgccagacgacactgcagtttgccgaaacgcgcagcttctggctctttggagctggctgctttggcggagtttgttttgtgcttttaagtgagttacgaattagttctattcgacataagtaaatacatttcccacctcccacagttgtcatcttctgcgtgatacactgtaggagaaaacgagcccagcgacgaaagaggaatgcccagaagcgaaagccgtttgtgatctcgcccagaaacgccatcaacaaccgtcagccggaggacgagcctctgcactgtgatattgcccgaaaatagcactttagttagttaattagttgcttagttagttagttagtcttaggtgccagttatttattacctaccatttatgcgttagtttagccttaggacaaccgtctacctagcaaactgccttgaatcctttaccaaaaatcacacaaaatcaccaaaaaccaaaaacagcgccatcaaagaatattgccttgctcaaaagccatcgcttatttatttggtttaatacgtaacatagatttaagccagcaatggagtggattttttataacgaatgacaataaaacgttgatttaaagaagaagtctgtattgagtttgtatttagacttggatatttagtttcttaacaacattatgtatttttatgaataaggaaaaatattagagatatacattatttgaatatatcgttatttatttattttagtttaacttaaaaattgtcctaaatcaatttaaagtgcatcagcctgaaagtaggcaagctattttgcaaccgacttggtggtgaagccttttcatcacggccaacaagtatgcaatggttttacaggcttagagcattcagttccatgttcaatcgacaattcattttaattgaattaccaaattgctaatgaaaaaatcgtattaattcgattttaatttatatattaatttcgattttattaggctttttctttacaatttgttcggcctgcgttctcttaaaatgcttttgtatagtctcgtcgctcttcgtctctttcacaactactactcaatgctcgcttttgatgactttctttcgcaccttttttatcgcgctctctctgcgcctctctcttttacgcttatagccggcaagtaaagaagaagcataaatagaaatgaaatataagtaagcggaatgcaaaatactttttctttggcgccttcctcctcacacacacacattcgcattcgtatgtgaaaccagaaagaacaatatagtattcatactgcacctgtatatcgactat

SEQ ID NO: 39539 - DNA, 1092 bp, DROSOPHILA
atgatacggatcaagctctcattgctgactatccgcgatatcattcacattcatttaagcatggaactgcattggcagctgctgacgttcatcgtgtgcctccagttgttgcattccgccggattcatcattcagtcggaagtgcgcaagtgcacgtacggccatatcgataagctgctccggattcgttgctacgacttggacctcaaggaggtgccacagaacctcaagagttcggtggaggttctggatctatcgcacaatcgcatcaggaagctgaaaactagctcgtttcagcgatacacggacattaagtttctgatgctctatgataacatgatcttatcggtggaggtgggaaccttcgagccactcacctcgctccaggaaattgatctttcgaataatggactgacaacgataccgctggagttgttccagctgccgcgactgagaaacctatacatcgatagcaatgagctaacatccctcaatcttcaggcactggagaagcccattcgtgctccactggagtacctgaacgtggcaggttgcgagctacaggagttacccgatctgggcatacttccaaaactctggcaactgaatgcctcgatgaatccgctgcagaacttcaggatcgacagcctggcgaatatgtgccacctgcaggtcatcgatctgaccaagtcgcagttgagccagtgtggctgccagcaggtcaccaaccatcttatgatgctcggcgccagtccgaagttcgtgccagtttgcttggaggcgctcgacatccgcgagtgtccactgccctacaatcgaacgatccattcgccaacattcgccagttgccagacgacactgcagtttgccgaaacgcgcagcttctggctctttggagctggctgctttggcggagtttgttttgtgcttttaattgtcatcttctgcgtgatacactgtaggagaaaacgagcccagcgacgaaagaggaatgcccagaagcgaaagccgtttgtgatctcgcccagaaacgccatcaacaaccgtcagccggaggacgagcctctgcactgtgatattgcccgaaaatag

SEQ ID NO: 39540 - protein, 363 aa, DROSOPHILA
MIRIKLSLLTIRDIIHIHLSMELHWQLLTFIVCLQLLHSAGFIIQSEVRKCTYGHIDKLLRIRCYDLDLKEVPQNLKSSVEVLDLSHNRIRKLKTSSFQRYTDIKFLMLYDNMILSVEVGTFEPLTSLQEIDLSNNGLTTIPLELFQLPRLRNLYIDSNELTSLNLQALEKPIRAPLEYLNVAGCELQELPDLGILPKLWQLNASMNPLQNFRIDSLANMCHLQVIDLTKSQLSQCGCQQVTNHLMMLGASPKFVPVCLEALDIRECPLPYNRTIHSPTFASCQTTLQFAETRSFWLFGAGCFGGVCFVLLIVIFCVIHCRRKRAQRRKRNAQKRKPFVISPRNAINNRQPEDEPLHCDIARK

SEQ ID NO: 39541 - DNA, 2389 bp, DROSOPHILA
taaagttagatttaaatgatacaaagtaattgttttgaaaaggtagcgaggaggctgctgacacacagattaaactaagtgaaataaaaactttgacatataaaaacgaaaagttaaccaactaacccggtatcaatgaaccagaatcagaatggataaccccaatcgcttgcataaccaacgcacagtaacagtcatctaagcctttatataactccgatggaaaccacaattcccaaaggctttggccccttcgtataaatttcaaatttgtttgtagcaatttgtcgtttttggggtgtccactgaaaatgcgaatgggctttggccaactaccgaagctgacccagttttcaagagacgcgtgaggcacgtttaaaaataaatcgaatggggaaaggggggaatgaacagaatggtggtagaggggtgggggattggaaaaacaaacagaggaattttatgtttaatggctgcggggcgaaatgaaaaatcacacagcaaattatgttgcatgttgttacacatagcattttgtagaacgcagatgaaattcgcttttcgtagctcacttttgcttttcgaaaatatatatacacagtatttctttgggttatttctgtgtcacgtcacgaccgaagcaaatattcgagataaagtgtaattttatttaaaaaaaaaaaaaccaattcatttaaatgttttgtgcattcgtttcatttgcttgtcacggtttatttgcagagtgcaccataaaacaaactaaagtcacacaccataccaaaactcagattatgaattatgcaaccaagcatccacagcagcaaaatagagcaactagagccacagcacgaactgcttaatgcacacaagtagcaaatcctagagcaacttgaccgaactcgttacggaaaattgccggcgaagaccacagaccacacaccggacacaaacggaaatttcccaggagttggaccaaacgagatcaagagaagtcgccatggtggacgacatctcaccgatgcatcatcggatgcaaaagaagacgcgcagcgcctccatttgtgccaccggcgccagcatcgagacggtcatccatggaatgcccggcgcctccggcagtgccacgcccgagggcggtactcccgggtaccggcgacgccgaccggccacgcgctcccagagcgcccgcatcacctccggcgccagatcggtgagtacgcggggcgtatacgtaatgcgcttggaacgcatccaagcggtacagatttttagcattagcatttgcatctgcccgtcactctggcaaaagttgcttatttatttatagctttagataaatgcacgtttgcttactataaatacgtcgtcttttagcccatttggtagtcacgcacatgcagattgacatttcaacaatattataatgtgttttttaattcccaaaaggaccatttgattcgcaaatataattgattgattttatgaaatggcacttagagcatcaataaaaatattactctgaattgaatttattatatttgtttgttagctttgcagtttacagattataatgttcaatcacgaatcacatttttaattttaaagccaacttgaaaaaacttcaatgggttcgtctgacaacaaattttgaagtgtctcacttgattgaagtgaaaacttaagctcacttttaatcgagtgtgctcagctgaaagtatctccgaattgaggtgcataatcactttgaagtttacttggtaaacaactcccatttgcgtgccacaaatattgaagggattgagttaactgggtataactacatttccgccggcatttccgagaaacggagaacgcaatcacgtgcacttggcccaattaattgatcgattacaatccgagttgacctcattggttggtggcgtcgtgccttttttcgggggaaatgctaagggcgcacatcagctgatcccttagggtgcgttcatgttgctgattggatacggatacggcttcttccacgacagaagcctcccgacttagactcctggtcgtcctcgcgctgccaatggacattttccgttccactgagccgctttcccgcttcgcagtctgtgcctcgttttgggccattctctcaaaccgcctggcacatcgcttcttcttggcatgactgagatatgcgtcggactgatccttgatcttctgatggtgttcgtacggcggacacatcggtggcggccgcatgcatttgcagaagcttatgttgtgcagaaagtattcggcaaagtcctcgttgggctccaatagcttcatgtagcactccattcggtacagatccaagggatccaacagacgcgccgcgcaatccagctgaaggtgtccactg

SEQ ID NO: 39542 - DNA, 225 bp, DROSOPHILA
atggtggacgacatctcaccgatgcatcatcggatgcaaaagaagacgcgcagcgcctccatttgtgccaccggcgccagcatcgagacggtcatccatggaatgcccggcgcctccggcagtgccacgcccgagggcggtactcccgggtaccggcgacgccgaccggccacgcgctcccagagcgcccgcatcacctccggcgccagatcgcccatttggtag

SEQ ID NO: 39543 - protein, 74 aa, DROSOPHILA
MVDDISPMHHRMQKKTRSASICATGASIETVIHGMPGASGSATPEGGTPGYRRRRPATRSQSARITSGARSPIW

SEQ ID NO: 39544 - DNA, 4197 bp, DROSOPHILA
aaaagaagagcaattactggtcacgagagcccatgaaatgccaggataaatgcgtacatacgtatacagtccggttcgtagttatatgtctaaactcgtatgtgtgtgtgtgtgcgccataaaaagcgcaaaagagcggccactaaataaacaaggaacgtttacactgacagctcgcctaatgaccgccgccccgcccccttggccacacttcctgcggatttggcggctttgccggtccctccaactgaccagaaactcaacgtggcccaaatccctggccacttgacagccgacgccacgtagcaagcgcttccggcgtgccgttttccagcgatgagaaaaccttgtgcgggaacagtggcggaatcagcgtggctttcaggggattaaggttcccgatcagcaacaaattcaggccaaaaacctttacggtcataactcaatcaaacatatagtagatttttttaaagcaaactggtttcatttattttaaagatgttccatgtagaaggcctaattttaaacataattttaaatttaattaagaaatcgtatcaaaggcttaaagccataagttgaatacctatacgtatatataacatactccccgcaaaaccaaacccattaattagaatcaaggacataagcggcacaacttaataacttcgaactgccaactaattggtccccaacacccaaatcatattgttcgccctcgcccctgtttttttttgtttttttttttttggatttttgggccaaggaaaacggaagtggctaacaaagttggacgttttgcatgcggctatggccacagctataaatatatatcgccctcacactggaccaaagaaactgaacaagaagcttacattgccggaacagtggtgaaattagttttcgccccgtcgtcagctagcagtcaggcaggcagccagccaggcttccaatggagcaccgcagagctgaggcggcttgacaggcacttggacgtggcatgaaggatttggaacagggacacgtcctcctgctccaacctacccgccaatgcctgagcaggaaacttttgcggcgggcgaaacaagcattggcgctgattgcatttggagtggccgaggcgtttaaccttgacatttaggtggatatccctactctagttcccctcaaagaggatcgcgcaggagcccttctagcgaggaccagggccaggacaagccgataaattatgccattgacggtggccaagtgagatgggcgtctggggcgtctgttacgccaaaggacaaacaaatgcaatttgatttgtgtgagaaatgcaatttaatttctcagtcaatcggcaagggcagtccataaatcacagcgattgccttgggccgcgtttgatagatagctatacatagctatacatagttgcccgctctaaagacacgcctcctcctcctttccacttgcaggtccgccagaagaccaaggcgcagcagcagcagcagcaacagcagcacacgctccaggagacccggagctactgcaccagtgagccccggctgagcgagacggagacgcctccgcagcgccgcaagctatcgcagcggaggccacagacgcacggtgagtaaattacgcccggagatgagcatctacaattgcggtgaattaaatagataccaagtgaatgccaaagaaatgaaaatgcagttgatgctaagctggtaaactataacattgcagttcataggattacctggtaactttgtagataagaagcttagcttggttcactgaaatgtagtagtagtagtagtataaaacaaacctcaaaaagatttaaaaagtttgatagttatgctcctttagcactttttcatcctcttattacttcctcaaattacttacttaggatattcaagctactattatgccttaaaaccaaaaatgacaagcacttagttgttagcttgaatttaaaactaaaatgtatcactctactcgcccaagcttttaaaccacttccattagtagcagcacagttcactagaatttcgaccacacttgtacataagttagttaaagttgtggcttttaatggccggatggagccatcaaagcggcgaaacaacggcaacaaattagccaagtgctaagcctgatcttttatgtggcataaactaagctctcagccaaattgctcgcagcacgagagcggcggcaatgtaaaattgaccattaggtcctggtgtgcaaaaggagcatggagcatcctgcagcagtgcaggtccttaaggcgaggtgttgaagctgaaacagagcatatggttgtttcattcgtccctttgttaagtacctttcactaatgttgattcaattaacgtgggcgttcgatgaacttaaccattgacccagtttacccgggcagcaagtgagctacatacgtgtgtggcacttctcactgtcaactcgacatggggaaacggaaaccattaaagctgtccaaatgtcagccagctggagcagggaatactgaatcaataatgcagcacgtttaaccgaagggtttctcgcatatttatctacgttcgggtttttgcgtgccaatgtttattcatatattcaaattctttttactcgtagagttaaaagggtatactagacttggtcaaaagtatctaacaggtaaaaggtagcttttccgctgttttcgcagcttttcaattaaaagtgcatttatcatcatcataagaatcaagtttcatttatcagtatatttgagtttaaagtttaaagcatctgtaaattattcaaactaggcagcttagcctaatggttgaacctaatccctaatgcaatccacattaatctctttcagcacacagaaaatcaaacgccttcctggacgtgcccaccatgaacatgcatcacctgcgcgtcaacgacgacgacgaggatgtggacagattgcgcactttcagcgcctccaagggaggtgagttgacccgagtggcgcaacaaagaccactgaggagcatttattaatttcgaaattgaaagtcaacaaagcccgagggccagatgactgggattacacatcttaacaatgcggccatgggtttggaggccaacagggagccagggagtcctgggacctgggaacacgcacatcatcttggggacacacgatacacgagacggcataaaattatagtttcgttccgggacacgcagcgcagcaatccttattgaaatcttaaaaggctgttacccgaagatgttaaggagatatcagtggcactaaatgccactcagcatagaatatgaatacccagaccaaaaaacacatatgcatatgtacatatgcacacacacactcacatagccacatagtcctgcgaacttttgccattacatatgtgtgtgtttgtttttttcctccctttatattctacatttgtgtcacgttattgttacacatacgcactgtgtgccatcgcaacccacttacagtgcgattcggaactgtaaggcacttggttgaaagtttgaagatgatatctcgttgagaaagtttgcaacaatttcaagtgtcttaaattcaattaagatcgattagcaagctaaactgcttggctcaggtgaattggggattattagcgcattaaagtgtcttttagttcagtgattctataaaataactgattgattaagcctgaagaaacaaatcaggttttgactaacaattgctacttttgcaagagtgatttcaaaatccctttacttctctgtggttacatagataggtggtgagcattatagttgctatctttagccgctcccgcaagcgttttgcatccataaatgcacgtcagacttaaagtacgtgtttaagctgaatacggaatacggaatacggataacggagaacggagtacggaacacttgagcagacatgacaggaaacagacgacaagcctgcgtactaacagcacacgaggtgtcataacttagtcatgacggaggagccggaaccatttgacagacgcaaaataagtagatatatggaatggaacatagctgcgaatagatgtgaatgaaaaacacaagttttaaagtttttccacacgttttttttctataatccctcttttcccattttattctgacagttaactacgtttaaaaaagtatttctttgaataa

SEQ ID NO: 39545 - DNA, 549 bp, DROSOPHILA
atgaaggatttggaacagggacacgtcctcctgctccaacctacccgccaatgcctgagcaggaaacttttgcggcgggcgaaacaagcattggcgctgattgcatttggagtggccgaggcaggatcgcgcaggagcccttctagcgaggaccagggccaggacaagccgataaattatgccattgacggtggccaagtccgccagaagaccaaggcgcagcagcagcagcagcaacagcagcacacgctccaggagacccggagctactgcaccagtgagccccggctgagcgagacggagacgcctccgcagcgccgcaagctatcgcagcggaggccacagacgcacgcacacagaaaatcaaacgccttcctggacgtgcccaccatgaacatgcatcacctgcgcgtcaacgacgacgacgaggatgtggacagattgcgcactttcagcgcctccaagggaggccaacagggagccagggagtcctgggacctgggaacacgcacatcatcttggggacacacgatacacgagacggcataa

SEQ ID NO: 39546 - protein, 182 aa, DROSOPHILA
MKDLEQGHVLLLQPTRQCLSRKLLRRAKQALALIAFGVAEAGSRRSPSSEDQGQDKPINYAIDGGQVRQKTKAQQQQQQQQHTLQETRSYCTSEPRLSETETPPQRRKLSQRRPQTHAHRKSNAFLDVPTMNMHHLRVNDDDEDVDRLRTFSASKGGQQGARESWDLGTRTSSWGHTIHETA

SEQ ID NO: 39547 - DNA, 3642 bp, DROSOPHILA
acctcatgtccttgcttcaccagctcccgtatgatggcattggtcatcatgaagtgactcttgccaggaaaaaagaatgctgccaagatgcgggaaccggtacccaactctagttgctgaagagcaaccagacttaggagaaatatgtgcagagcacttttcaaagactgtaaaatgcaaaatatttataatcattatctaaattgaagcttaaatgcagcatgaaacagtccttcatttgaactcaaatagtattcggcgataacaggtaactttagtttaagtttcggaacttgcgtctattacgatttcaaagcttttcctttaatttaatttatacataaacgagagcttcaaaagcttatttacaacatatcaacataccattttgattaaacgacactagtagcaaccagcaaccgactcagtggaccgctctcgaacgactgcgaatgcgttcagatagatcgtttcgtttgggcctctctgtagatcggctttatatgtttatatacatataatgtttatgtatatgtttatgtacgcttttagaaccctagagaatagcaaatgtgaggttcgtgcgaaaaaaacgagagagctctttattatcaaaacggggcacttcatcagcgtgctctacaaaatatcccttatcatcatggaaacgttagatttcttgcggataatagaaagttattctttcttaaggtcgtattcgttgttttgggtaatctatttgctggttgtctaggtacgtaagttttcaaactatctttatccatatcattagcaagagagacaatcctcgactatcagataatatcgttttttctacctgttagatacttttcaacgaaactagtaaatcgtttgacttttcgatgcgaaatagaagatatagacagaaacatatactaatatattaagattttattgaagatattgtatttctcaaacatttttaaagtaatttgtttaaataaacccttaaaatactttaattttgcttagctttcctgtgtttcttattactgcccatcagtaatcgaatggccaatgagagagccatgacgccagctaaagcaatgatagccacaaatgctatgacatccagcaaatagaattggaaccagttgagatccaggcctgcggatctcatatgtgaagcacctcgatgccggatgacatattcgatccaatagacggcactttttcgcggctccagcggacgatcgcggaaaatatccgataccctctgaacgttctctttgtaggtcacattatggataagttggtccaaggagtgccgcaggatttcctcggtaatcgattggaagtgcagactaatggcatatccgcccaaaaccgctttgttcatattaaggtgctgcaacataatatattcctatagaagcagttatttatataattagtgaaatatacaaatacctgatcacagtagaagggtatacccagcatgggcacagcataatgcactccctcctgggtgccaaataagccaccgtgggtaatgaataccttcacatgacgatgggccagaatgtcggcctgtggcagccacttcctgaccatcacgttatctggcaattggctaatgctctcatcctcgaatttccacaatacccgctgcttgagcgaaccgaatacctgcaggaacaatcgcagcatttccacgggcatgtccttgctctggacattgctgcccaggctgaagaagatggccccctcggtggcgccatccaagagggcttgcatgtcagccggcagcggtttgggtggatagatgtgcatcccgcccactggcaccatggcgtccactgtgggacgtgccgtggtcagcggtgcgtgactgtttagtagcatcactgagatttgacgctccatgtgcttgaccttgggcacctcggctggaaaacactgtactcaggtgtatgttctcagataaaccattaccgtaactcactcagtacgggtccaaagaactccctggccaccgcatccattttcggaaaatagtttagcagcctgtccatgtcttcgtagaaggatgcataggagttcttcaccctctccaggaaactcatgcgatcggtgaagggcataaaaccgtgtggtacaaaggaccaaggtgtaatcagacccatcatctgactcatgtgattctcatagcccaaagtgctcgtggtcaccacgggtattttgtacagatgagccagtgccaagaaggcctcctgatagaactgctcggccaggagaagatcgaagactccttccttttgctcggcatgaatgagagaccgaaccttgggctgccgcagggcatgttcggtggtcttgaggccgataatctccagcattttgaggaaatcatagttggtcatgcgggtcagctcgaataggtgttgggctccaaagttcagcttaactggttccaaacgtaaatatgatgatcattaaatcaagctccactcaccatcgtgccagaaatcgtagaccggttctatcaagatctccgtgtagttgctgccaagttgctctttctccagactaaaagctgttaccatggtcacctgatgaccactttcgacaagttcccttatcaaagcagtgtgcatcataaaatgtgattttcctaaaatattttccacaacataagccataagttggctttgtacatatcttaaaatactttacccggaaaggcatacacagccaggatttttgatccttcggccaattccaactgggaatataatgttccagtcagaaggaggccaaataataatggaaactgcatactgagcagctatactataattcttattttttgccaaatattgattttgtttttgtttaatactggcttgacttcttttgtttgtccgtaataatctgttaatagattttgtaagtttgagattctgaagtttgtagcttaatatcaaaagatagattaaaggtgcgcaaagttcttgttttgtaaacaagtttgactttattacagaaacaaaattatcaaatgaataaatgaaaataaaaaatgctggtcatcagcagctaatctatgttccataaagatttcaagcatttgtgaaatacaaattgtttacttttaatagggttgctgatataaagagtcaatttaattgatgatcgcgtgctcgaaaagctttccacttgcctaccgatgagatggcgaaggcgaagccaactattgaacctccgaatgaatactgaactcgagctcggggttccgagaaaacccaatatatttccgagtagtataataaaagtcaaaagcacgtagcaatttaagctttcttaatcgttttattttcatctttcaaacgtatttgcatgtcaatgtgtgtgttgtttggtccttaaatgctaggtattaagcaatcggtatattatatgtaattagattaagttaaattataacatttagcctataatgcgattacttgtcaacgaatctccacgcctaatgtaatttacattttcatattcgatacaaattgtttaaattattctcgtctttatacaaaaatcacattcgattcgttatgtattctgcttgtgtatgtgtgtgtgtgtgtgtgtgcgtttgcgagt

SEQ ID NO: 39548 - DNA, 1413 bp, DROSOPHILA
atgatgcacactgctttgataagggaacttgtcgaaagtggtcatcaggtgaccatggtaacagcttttagtctggagaaagagcaacttggcagcaactacacggagatcttgatagaaccggtctacgatttctggcacgatgttaagctgaactttggagcccaacacctattcgagctgacccgcatgaccaactatgatttcctcaaaatgctggagattatcggcctcaagaccaccgaacatgccctgcggcagcccaagttctatcaggaggccttcttggcactggctcatctgtacaaaatacccgtggtgaccacgagcactttgggctatgagaatcacatgagtcagatgatgggtctgattacaccttggtcctttgtaccacacggttttatgcccttcaccgatcgcatgagtttcctggagagggtgaagaactcctatgcatccttctacgaagacatggacaggctgctaaactattttccgaaaatggatgcggtggccagggagttctttggacccgtactgaccgaggtgcccaaggtcaagcacatggagcgtcaaatctcagtgatgctactaaacagtcacgcaccgctgaccacggcacgtcccacagtggacgccatggtgccagtgggcgggatgcacatctatccacccaaaccgctgccggctgacatgcaagccctcttggatggcgccaccgagggggccatcttcttcagcctgggcagcaatgtccagagcaaggacatgcccgtggaaatgctgcgattgttcctgcaggtattcggttcgctcaagcagcgggtattgtggaaattcgaggatgagagcattagccaattgccagataacgtgatggtcaggaagtggctgccacaggccgacattctggcccatcgtcatgtgaaggtattcattacccacggtggcttatttggcacccaggagggagtgcattatgctgtgcccatgctgggtatacccttctactgtgatcagcaccttaatatgaacaaagcggttttgggcggatatgccattagtctgcacttccaatcgattaccgaggaaatcctgcggcactccttggaccaacttatccataatgtgacctacaaagagaacgttcagagggtatcggatattttccgcgatcgtccgctggagccgcgaaaaagtgccgtctattggatcgaatatgtcatccggcatcgaggtgcttcacatatgagatccgcaggcctggatctcaactggttccaattctatttgctggatgtcatagcatttgtggctatcattgctttagctggcgtcatggctctctcattggccattcgattactgatgggcagtaataagaaacacaggaaagctaagcaaaattaa

SEQ ID NO: 39549 - protein, 470 aa, DROSOPHILA
MMHTALIRELVESGHQVTMVTAFSLEKEQLGSNYTEILIEPVYDFWHDVKLNFGAQHLFELTRMTNYDFLKMLEIIGLKTTEHALRQPKFYQEAFLALAHLYKIPVVTTSTLGYENHMSQMMGLITPWSFVPHGFMPFTDRMSFLERVKNSYASFYEDMDRLLNYFPKMDAVAREFFGPVLTEVPKVKHMERQISVMLLNSHAPLTTARPTVDAMVPVGGMHIYPPKPLPADMQALLDGATEGAIFFSLGSNVQSKDMPVEMLRLFLQVFGSLKQRVLWKFEDESISQLPDNVMVRKWLPQADILAHRHVKVFITHGGLFGTQEGVHYAVPMLGIPFYCDQHLNMNKAVLGGYAISLHFQSITEEILRHSLDQLIHNVTYKENVQRVSDIFRDRPLEPRKSAVYWIEYVIRHRGASHMRSAGLDLNWFQFYLLDVIAFVAIIALAGVMALSLAIRLLMGSNKKHRKAKQN

SEQ ID NO: 39550 - DNA, 4287 bp, DROSOPHILA
cggaaaattgccggcgaagaccacagaccacacaccggacacaaacggaaatttcccaggagttggaccaaacgagatcaagagaagtcgccatggtggacgacatctcaccgatgcatcatcggatgcaaaagaagacgcgcagcgcctccatttgtgccaccggcgccagcatcgagacggtcatccatggaatgcccggcgcctccggcagtgccacgcccgagggcggtactcccgggtaccggcgacgccgaccggccacgcgctcccagagcgcccgcatcacctccggcgccagatcggtgagtacgcggggcgtatacgtaatgcgcttggaacgcatccaagcggtacagatttttagcattagcatttgcatctgcccgtcactctggcaaaagttgcttatttatttatagctttagataaatgcacgtttgcttactataaatacgtcgtcttttagcccatttggtagtcacgcacatgcagattgacatttcaacaatattataatgtgttttttaattcccaaaaggaccatttgattcgcaaatataattgattgattttatgaaatggcacttagagcatcaataaaaatattactctgaattgaatttattatatttgtttgttagctttgcagtttacagattataatgttcaatcacgaatcacatttttaattttaaagccaacttgaaaaaacttcaatgggttcgtctgacaacaaattttgaagtgtctcacttgattgaagtgaaaacttaagctcacttttaatcgagtgtgctcagctgaaagtatctccgaattgaggtgcataatcactttgaagtttacttggtaaacaactcccatttgcgtgccacaaatattgaagggattgagttaactgggtataactacatttccgccggcatttccgagaaacggagaacgcaatcacgtgcacttggcccaattaattgatcgattacaatccgagttgacctcattggttggtggcgtcgtgccttttttcgggggaaatgctaagggcgcacatcagctgatcccttagggtgcgttcatgttgctgattggatacggatacggcttcttccacgacagaagcctcccgacttagactcctggtcgtcctcgcgctgccaatggacattttccgttccactgagccgctttcccgcttcgcagtctgtgcctcgttttgggccattctctcaaaccgcctggcacatcgcttcttcttggcatgactgagatatgcgtcggactgatccttgatcttctgatggtgttcgtacggcggacacatcggtggcggccgcatgcatttgcagaagcttatgttgtgcagaaagtattcggcaaagtcctcgttgggctccaatagcttcatgtagcactccattcggtacagatccaagggatccaacagacgcgccgcgcaatccagctgaaggtgtccactgtagaagtaggcgaacagctcctccaccaggtcgataaagaactgaatgggcttgtggaaggcatcgcccagaatgaaggggctctcctcgctcctattcaacttggcacattcacggcgaaagacaagcacatacggacgcaggctttggatggcccaacactgattcttgtttgaactggctatcacctgatagtggatgtagaacttgttgatgatcgcatcatccgattcgatatcatagatctgcggacatgtgcagctggtgtccagctgcatggtgatcttgtagcgctggattagctggtgcagtgtttctgccgctatcctctggagctctagctccttcctatagctgtcaaagtaactccgatacttctcctcgatcaccagcagaattttgatcactctcttttctacagcatcggaacttctaagatttccaatcgcaaaattggccatgctcgcggtcaccgtgcctctcgacataaagctctggctcaccatcatttggtacagccgatcgcgcatttccattttcggttgtgtgtgttttagtgtatttccctgcaaaaacaaggacaacttctgatgaatgacatttaagtcgacgatgatggatacccctataccagatgatgaatcctaacaaactggaaatcagtaggcaatttattaaattctatacacctcatataaaataaacgtaactgcttacaaaatttaaaaacttatcatactttcagagaatttgtgggttcaccgaccatctgattactgaatcctttacagttagctcgtgtcggttgtcgggcagaggagtatggtaatcttccttagtaatacttattatagacctctcactgcgacgttggtgtctagagatcctcttcagttccctttcgttgtcctggtctaattcctgaccggtgcttatgccagacatctcactgggacgttggagtctaactatggacttctttcgatccagtaaattgctctcggcctcggccatcttttcgcatcgcctggcacaccgcttcttcttggcctgattgacaaaggtggcgttaaagtcctctttcacctgcggatactcgtgggcaggacaacggcgcggcatacgcaggcacttgcagaagctcatgttgtacttgaagtaatttgcgaaatcctcattgggttccaatagcttctgatagtactcgatgctgttcaagtccaagggatccaacatgtgggcagcgcagtcgaactgtacgtgtccactgtagaagtaggcgaagagctcctccaccaagtcgatgaagaacttgattggcttgtggaaagcgtcacccatgatgaagggactatcctcgttcagattcaacttggcgcactctcgacgaaagaggagaacataggggcgcatgttgtggatgacccaaccctggttattgttggaacaggctatcacctggtagtagatgtagtatttgttaatgatcgcatcatccgattcgatctcatagatctgcggacacgtgcagctcgtgtccaccttcgtgttgatcctgtaacgttgggtcagctgattcaaggtcagtgccgccatcttctgcagttccagctccttcttgagatcctcaaagtaactgcagaacatctcttcgatggccaccagaatcttggtcaccgagctctccaaaccttcgttgcaatccagattcaagatcgcaaactcggcatcactctcggtgaccgtgacgtgcgacatgacgctctgttggggtttcaattgctgcagctgagcggttgtttccatgattaactagtgtgtatatatatacctccttctctaataacgacgaacccgtccgacttattcgacaatctcaactgaatcttgactgaaaaggaaaggcctattttaggaagctggatttatttgtatttaccatcaccgcaactgaaataatacagagaaaaactgaagtcgctgacgtttccaattcaattgattccgtcagccagccgtccgaggagccttgaattcggaggagcacttgcagtgcggcgtgtgaattgagttatatcgtggcgaaattcaatttcatcggactgatgtgatggttgtctcgcacaaaagactttcgccacgtggcggcatacgctgcgtatgagttttcctggctggtttggtgaggggggggggggtgtagcttccagttcgcagcttctggtgctgaatatccctcgctggtgaatcccctgcttttctgcttctgctcgcgacattattagtaagcaaacgaggcaacaaaaagcagccgtacaaccatgcaacgtgctaaaaatgtcgttctcatcgcctgagatgcgccccgagctggtaatttatatagaaaaagtttccaagacacacgcacacacacacatatggtttcccgctttttgggggcggcatgttctggctgggcgtggccgtaatgagttcgcagctaagcaagtgagaagtaagtgcttggtgctaccgactattgaatacctggtttctaaaaatcattgcctacattttggcgtatgattgcacatatacataactcctctctaaacgaaatagatttcaaattttgttaaaaaactatatgcttaaaatagtaagtactacaaacacgtactggttttgccaagcaagttagtaaagggtattaaaaacgagttaggaatgctttaacgacttttgttataaggaagcggggagtaaggatacaatcggcaagcagcaaggaagtaaacttgaagtgctcagtgccttgatgttc

SEQ ID NO: 39551 - DNA, 1993 bp, DROSOPHILA
atggaaacaaccgctcagctgcagcaattgaaaccccaacagagcgtcatgtcgcacgtcacggtcaccgagagtgatgccgagtttgcgatcttgaatctggattgcaacgaaggtttggagagctcggtgaccaagattctggtggccatcgaagagatgttctgcagttactttgaggatctcaagaaggagctggaactgcagaagatggcggcactgaccttgaatcagctgacccaacgttacaggatcaacacgaaggtggacacgagctgcacgtgtccgcagatctatgagatcgaatcggatgatgcgatcattaacaaatactacatctactaccaggtgatagcctgttccaacaataaccagggttgggtcatccacaacatgcgcccctatgttctcctctttcgtcgagagtgcgccaagttgaatctgaacgaggatagtcccttcatcatgggtgacgctttccacaagccaatcaagttcttcatcgacttggtggaggagctcttcgcctacttctacagtggacacgtacagttcgactgcgctgcccacatgttggatcccttggacttgaacagcatcgagtactatcagaagctattggaacccaatgaggatttcgcaaattacttcaagtacaacatgagcttctgcaagtgcctgcgtatgccgcgccgttgtcctgcccacgagtatccgcaggtgaaagaggactttaacgccacctttgtcaatcaggccaagaagaagcggtgtgccaggcgatgcgaaaagatggccgaggccgagagcaatttactggatcgaaagaagtccatagttagactccaacgtcccagtgagatgtctggcataagcaccggtcaggaattagaccaggacaacgaaagggaactgaagaggatctctagacaccaacgtcgcagggtatccatcatcgtcgacttaaatgtcattcatcagaagttgtccttgtttttgcagggaaatacactaaaacacacacaaccgaaaatggaaatgcgcgatcggctgtaccaaatgatggtgagccagagctttatgtcgagaggcacggtgaccgcgagcatggccaattttgcgattggaaatcttagaagttccgatgctgtagaaaagagagtgatcaaaattctgctggtgatcgaggagaagtatcggagttactttgacagctataggaaggagctagagctccagaggatagcggcagaaacactgcaccagctaatccagcgctacaagatcaccatgcagctggacaccagctgcacatgtccgcagatctatgatatcgaatcggatgatgcgatcatcaacaagttctacatccactatcaggtgatagccagttcaaacaagaatcagtgttgggccatccaaagcctgcgtccgtatgtgcttgtctttcgccgtgaatgtgccaagttgaataggagcgaggagagccccttcattctgggcgatgccttccacaagcccattcagttctttatcgacctggtggaggagctgttcgcctacttctacagtggacaccttcagctggattgcgcggcgccccaacgaggactttgccgaatactttctgcacaacataagcttctgcaaatgcatgcggccgccaccgatgtgtccgccgtacgaacaccatcagaagatcaaggatcagtccgacgcatatctcagtcatgccaagaagaagcgatgtgccaggcggtttgagagaatggcccaaaacgaggcacagactgcgaagcgggaaagcggctcagtggaacggaaaatgtccattggcagcgcgaggacgaccaggagtctaagtcgggaggcttctgtcgtggaagaagccgtatccgtatccaatcagcaacatgaacgcaccctaagggatcagctgatgtgcgcccttagcatttcccccgaaaaaaggcacgacgccaccaaccaatga

SEQ ID NO: 39552 - protein, 587 aa, DROSOPHILA
METTAQLQQLKPQQSVMSHVTVTESDAEFAILNLDCNEGLESSVTKILVAIEEMFCSYFEDLKKELELQKMAALTLNQLTQRYRINTKVDTSCTCPQIYEIESDDAIINKYYIYYQVIACSNNNQGWVIHNMRPYVLLFRRECAKLNLNEDSPFIMGDAFHKPIKFFIDLVEELFAYFYSGHVQFDCAAHMLDPLDLNSIEYYQKLLEPNEDFANYFKYNMSFCKCLRMPRRCPAHEYPQVKEDFNATFVNQAKKKRCARRCEKMAEAESNLLDRKKSIVRLQRPSEMSGISTGQELDQDNERELKRISRHQRRRVSIIVDLNVIHQKLSLFLQGNTLKHTQPKMEMRDRLYQMMVSQSFMSRGTVTASMANFAIGNLRSSDAVEKRVIKILLVIEEKYRSYFDSYRKELELQRIAAETLHQLIQRYKITMQLDTSCTCPQIYDIESDDAIINKFYIHYQVIASSNKNQCWAIQSLRPYVLVFRRECAKLNRSEESPFILGDAFHKPIQFFIDLVEELFAYFYSGHLQLDCAAPQRGLCRILSAQHKLLQMHAAATDVSAVRTPSEDQGSVRRISQSCQEEAMCQAV

SEQ ID NO: 39553 - DNA, 2739 bp, DROSOPHILA
taaatcaatttgcacaattaatgaccgcagatgaggagccagcaaatgccaacgaatactgaaaaatctgcgatgtacattcatacatatagacgcgtcgatttcgcgcgacgactaaatgcaataaggctggcaataaatctatttatgacatttcaaacgtacacagcatacgcttgcagcgactgaacaagttgtacagtgtcggacatgtatatatacattcagaatgattacagatacatatgtatgtgtacatacatccatcggcctgagggattacaaatgacaatggccgcgacttgagctcaaaggctcttgactcggcatcttcgttgggtaataccattttcggtcgggcattatccctatgtggggcagctggggcgttggaagggtaacatccgaacagatgtgcggattatatctagatatagtcggcgtttgtttggtcaatcgacttgttatgccctcggctgtgttattaaattatgtgtgcggtttttcgccgcagctaagcagcacgaatagtcgaactgcattcaataaatgtatctaaataatttgatttcgtatatttctttgttttctatcaataaattgaaaacataatccatgtgactaggcaaaaaatgtacttaaattcataggcacattgttcgatttccggaacaaggcaatgggttaaaataaccattacgccttgtcccacatcattttcgatgtctttttaattgttttatttttatttaagagcacattaaatggctcagaatgctgccattaatattcattgtatatgcaaattatattgtaaatatttggcatttatatggtgcaaaaatgcaggaaacatcgtttaaatttttgaccgcaatatgagtttttctaactgctggcaggaaaacccagacagacaggtcagcgggaggggggaggacaaggcgggttggactgtttcggcacgaatgaaacacaaaaggcagattaactattgttgatgttgcccttgcggcaggaagctgtaatttctgccgcggctacgtggcgtatgcgcaacgagtcgcgaagtcagcgcacgttgcacatacgccgcgtatgacaggtagactaacaaaagtttccctcgtgcactgggaatacgaaataggtgacgtttttctcctttttttttgttagcaaactcaccgagtttttgacaactctattcactgttttccgttcgctacaggtatcatcaatcgaggtgactccttccgtcgccggcgctcgaggagcaacagcctggctccatccagtcccatgcacacacgcaatggtgtgggcggcctgggtggcgtggccgggggcggaagcagcctgggactgggttgtggctacaatggcggcagcagcagcaacggattcggaaatgccaatgcccaggagaaccatcagccggtggaattctatcgcgtcgaaatgcttggatccgcgggagtcggcaaacaggctttgctttcgcaattccgcacctcggactgcatcaatgcctacgatggacctggttagtgggaatgatgcgtttgccataattcaactgaaatattaaacctattgcagaatgcgacgatgccgagcagaacgtctcaatcatcttgaatggcaccgaatcggaactgaagttcctcactggaaatccagagagcaaggtaaatcatttgtcaagggtcctcagctttttctatttgtgtttgtaattgccgttgaatatttcaccattaagtggccagacaaatgagcttgtgtatcctggctgcctgactgcctgactagcaggatttgccctggggagcagggagtgatttgccaactgtgcgggcatgtagtgcacaaagtgaattaattacagatgcaaaatgagttgctgaaatgcgaaacctgcctctcgcacacaataacaaagggtgaatgctgggaaactcgagaaaaaactatgaaaacttttgcagaaagctgcgaaatgcggttaattatggcaaaatgcacggaatgctggaggctgccttgaaatttaaggaattcatttaaaatcctgccagacgggcgccgccgcctccaaccaaagcaatttgcaaacgttggcacaacaaaaatgtgggtaaatggggggaaaaaaaaggcagcacccagggcgggggaatgtcgaatataagtacagcgatttgagccactgtgcaatcgaaatgccaaattgctggacgattgccaaatggccaacgggccgtttgccgccgccgcctttgagggtggcaaacaatacaaatgaacacgataatgataattgtaatcgccgatgacgattctgttgatggtgatgacgacttcagtcgttcgacgaggacaaacaaaaggaaatggcaacaatttatccattcggcagtgcgacactagaatcagcgaattaaagccaaggcgctcgtgcatggcgcacagaaaaaattcgtggaaaagcaaataataaattgcttaaggtctgaccttaagcctccgccaatcccgagcaccttgatgcccggcgccaagtgccaaatttacaaatggcggatgaggatgtgccacggaaacggaagccagcacactgggccggagttgaaactgccgacgtcaccgcaggacaaagtgtatttggccaaaggttggacagctgaaattccttggcaaggcgaaggaagaactcacattgttgggtattcactt

SEQ ID NO: 39554 - DNA, 522 bp, DROSOPHILA
atgttgcccttgcggcaggaagctgtaatttctgccgcggctacgtggcgtatgcgcaacgagtcgcgaagtatcatcaatcgaggtgactccttccgtcgccggcgctcgaggagcaacagcctggctccatccagtcccatgcacacacgcaatggtgtgggcggcctgggtggcgtggccgggggcggaagcagcctgggactgggttgtggctacaatggcggcagcagcagcaacggattcggaaatgccaatgcccaggagaaccatcagccggtggaattctatcgcgtcgaaatgcttggatccgcgggagtcggcaaacaggctttgctttcgcaattccgcacctcggactgcatcaatgcctacgatggacctgaatgcgacgatgccgagcagaacgtctcaatcatcttgaatggcaccgaatcggaactgaagttcctcactggaaatccagagagcaaggtaaatcatttgtcaagggtcctcagctttttctatttgtgtttgtaa

SEQ ID NO: 39555 - protein, 173 aa, DROSOPHILA
MLPLRQEAVISAAATWRMRNESRSIINRGDSFRRRRSRSNSLAPSSPMHTRNGVGGLGGVAGGGSSLGLGCGYNGGSSSNGFGNANAQENHQPVEFYRVEMLGSAGVGKQALLSQFRTSDCINAYDGPECDDAEQNVSIILNGTESELKFLTGNPESKVNHLSRVLSFFYLCL

SEQ ID NO: 39556 - DNA, 3757 bp, DROSOPHILA
ccgccgcctttgagggtggcaaacaatacaaatgaacacgataatgataattgtaatcgccgatgacgattctgttgatggtgatgacgacttcagtcgttcgacgaggacaaacaaaaggaaatggcaacaatttatccattcggcagtgcgacactagaatcagcgaattaaagccaaggcgctcgtgcatggcgcacagaaaaaattcgtggaaaagcaaataataaattgcttaaggtctgaccttaagcctccgccaatcccgagcaccttgatgcccggcgccaagtgccaaatttacaaatggcggatgaggatgtgccacggaaacggaagccagcacactgggccggagttgaaactgccgacgtcaccgcaggacaaagtgtatttggccaaaggttggacagctgaaattccttggcaaggcgaaggaagaactcacattgttgggtattcacttttgcctagaagttgcgagtttcccatgcaaacgaatatataactttgaatcctgatatatctttacgaaatgggttacatgaaatcgttgacaaagatgtctaataatttgcaataaaaagtaacaagatctttgaaattcaagttcacatgttatttatgcaatagaccattttcagtgattaaaatttggctaaaatgcatttgaaaataaaagtgtattcaaacatgtcgctgtatcgcaacatcgcgaaatgctaatgaataaacgcattcgcacctttaagagaagcgaaactcaaaggacctgggcaatagagccgtctggtaaatgtatgggccagataaatgaacatcattaaaagtctgggcgagtcgaaaagtttttcccttcgctcgccacgttattgcgatgccaagtggccataattttaattttaacgagcataaaatgcaaaagtagcggctaacaaaaggaagccggcaaggcgctgggtgcggaaaatgttgggctacgttggttggcttgagttgtatggatgctcgacttttcgcacaacgcctgcacttgacggtgcgcagttaagaacttttaatttcgcctccactgggttgcaataaaacagggcattaaatactttcgtcagtcacgaaggcctgatgcccagaatgttgtaaacttgttgagttccgtgtttcaattggcccgtgtttgcttttgctgttttgtgtgccttgtaggatgaactggagcaggcggatgcctttctggtggtctactcctgcattgacaaggagtccttcacgcgggccaagcagatactatcgcgactgcaggacatggacctgctgcgccatcgacccaccatcctggtggccaacaaaattgatttggcccgctcacgcgccgtttccgcccagggtgagtattgcaattagccactaccgacaagtcgttgcattcatttgcatcgtcaattaagtggcgtgacctgaccgaatccgtatccaccaccattccaccattctgcttcgtagatggcaaatgcgtggcctgcacgtttggagccaagtttatcgaggtctccgtgggcatcaatcacaactgcgacgagctcctggccggcacgctcacccagattcgcctcaagaaggaccaagttcagttgcaggtatgttcaaagtcccaaacaaaactaaaaaagaagagaaaacccataggtctagctctagctctctatagctctagtttgctggttagctagttgtactcccatctatctctgtttttggtgtcttgtaatcaatgtacatcgatcgctttcgcagctaaatccgaaaaaatcaaaagataaagataaaaacaaatttaaagaaaacacaaacatagagactgtagaaactgataactgtctgactgatcttaaagccgacgacggggtaagtaaaactaaatgtacccccgactaaaaatccatttaaaatcacctgctatccggactgaatctaatcgatgtttaatcggtgtgttcttcaaaccccaacccgtaatcgaaacaagcatgattctatagatagaagttatataccctgtatatcctatttggtgtctaaaatataatgatgaacaaatgaacacattgtaaatcttataaaaccccaaaatacttttggagatttgtaaaagtatcctatagatactttttctgtgaaatccaataaaatccgagccataactccctgtttatgcgttgttgattgtattcataatatatatagaagcgccctgaactttcgccaaaagaacttgtgcctgtttgccaacaagaagaaaatgtgtcaagtgtccaagtgtagagaaactattccaagcacactgccaaaagtgttttgtttgtttgttgtttatcatcctgtgcccactcccagaatccgcacaaaggacatgaaaaatgcaaacttcaattggcgccccaaaaatggaataaccacaaaactgcagggccataaaaatgcagttgaatagagagccaaatgtaaataaagcccgtaaatccccgcccacccaagtgaagcatttgttccttttggcgaatacatagagtagagtaaatgtgatttatctaatattttggcccatttcagggaccaagggacgccaattcgccggcgcattggtacaaaagccgcagcgtgatgctggccagcatgaaggcccgccagatgctcacctggatcctgggcaaggaggactccaagttcaagcactgcgagaatctgcaggtgctctaaaagggcaaatcgatccaaaatctataggtctatacgagtatatgtacttagcggctaagtgtgttgatatgtgaatatgtatgtgtaaagctttatctctaagtgctccagatgggctcatctaatatgtaaacaggtttcgagatttcgaagctctccaattcgcctgtaagcagccatttgcataccgaggagtgggtgtgtgtgtgtgtgtgtgtgcgtgcagccagctatttgtagtgtctaacgtaagcctgataatcaaaaattaaatcaaatttaatgtaaaacctagggacgtacatatgtatgtgcaacgcttgcagcgactatgcgtatgagcaacttaatggaaccaagcgaaaggagcaaaaccaaaaattctaactaaacctaactaagctaaactaaactaaacacaacagaacagagaacaacactacttatgtacttaactagcaactttagtaacttttctaagccaggagcaagtggagggaggggggggtcgatatttttcataagctagcggcttagctgtttacaagcagaataaaggtgtgcaaaatgttcgcagcaaaaaagatagttatatatactatatatttaaccgaagagtaacgattttcatataatatttatatagagtatgtgttaaagtcggattgcagcactttgttattttcgttttcagcagcttagggaagtcttacagggagttagctagctgcgtagacagatttaaaataaaaacataaaaaaaaagaaatagccctcgatgatccatcgtatatatatatacatatatatttatatttatatttatattgtagcgttagcagtcaatattctttgtgtcttccttagtcaaatatgtatgtgtgtgtcggtgtgtttatattaggaatccttccaagaaatagtgcaatgcaaggaattcgcgtgtcctccacaaaagcctttaagtaaatgtgctcaaagtggaaacatgaaaagtaac

SEQ ID NO: 39557 - DNA, 501 bp, DROSOPHILA
atggatgctcgacttttcgcacaacgcctgcacttgacggatgaactggagcaggcggatgcctttctggtggtctactcctgcattgacaaggagtccttcacgcgggccaagcagatactatcgcgactgcaggacatggacctgctgcgccatcgacccaccatcctggtggccaacaaaattgatttggcccgctcacgcgccgtttccgcccaggatggcaaatgcgtggcctgcacgtttggagccaagtttatcgaggtctccgtgggcatcaatcacaactgcgacgagctcctggccggcacgctcacccagattcgcctcaagaaggaccaagttcagttgcagggaccaagggacgccaattcgccggcgcattggtacaaaagccgcagcgtgatgctggccagcatgaaggcccgccagatgctcacctggatcctgggcaaggaggactccaagttcaagcactgcgagaatctgcaggtgctctaa

SEQ ID NO: 39558 - protein, 166 aa, DROSOPHILA
MDARLFAQRLHLTDELEQADAFLVVYSCIDKESFTRAKQILSRLQDMDLLRHRPTILVANKIDLARSRAVSAQDGKCVACTFGAKFIEVSVGINHNCDELLAGTLTQIRLKKDQVQLQGPRDANSPAHWYKSRSVMLASMKARQMLTWILGKEDSKFKHCENLQVL

SEQ ID NO: 39559 - DNA, 3101 bp, DROSOPHILA
gtgcgttggaggcaccatcgaatgtcccgatgattaaggatgtgacggatgccctgatgcagccacccagagagtccctctcgcgaaagaactccgtcagtcatatggaaaagcaggtaaggcgacccatcaaaagtcttagaattgtaggatcggaaagttgtatatttaaaagaacaattcgctctaactcatgtgctttgatctattcttatttcgaccattttaacaatccgatatgaaatgcagtcaaaagtgcatgactacgagtatctgcaggtaaagctcagacactaagcgacacagactgaaacccaaaattccaagcccacatttgtgcaaacccataacagatcaatatcaaatgcctcagcaaacccattagcttatgagttttatctattgccaggtcacgctggaggagcagatgatctgcggcaccttgcagactctgaatgaggaggcgtacgaggatgtggccagtagcgagcgaccgagtcccacaggtgagatgttggcagcagtcgcacaactgcaattagcacccatccgcgagtcttccgagttcggatcgccttccgacgatcagaagcagtatggggtcaagataagcaacaacaacaacaacaaccagtacttgcatgcggagtacaaccggagcgtcagctcgcattccctgcagagtctgagcactctggtgggtgcacccgttggtcatggtggttcaggtggcagtcacctacacctgggcaatggtaacgatctgagcgatagcacgctcgatctaatgcatgtagactcggtatttggtggtggtggtggaggtggttatcatcgggcatcgcgccagatctcgataagcagcgagctgctgcacgagtccagttccttgcccatggtggtggtcattcccaatgcctcgggcgaacaggcctacgacgacaccaagctctgagaggcatggggctaacgactgcacttggacaactattaaagctgcatggggttgagtcgtacttacattttaaagtctgacaaactaaaccattttaatggctggaccaaaaaccaatatcatatcatccgaaacacgatttctcgtattacttgttttattcttgctttgtcatggtcagtattattgacaattactaatagttgcgttgtgcgattactaaattattccaatgtttatatgccgaagattagttattaattatttgcaacacatcccacacacaaacacacacacacacacacgatatatttaaaattgttaatcgcccacaacacatgaacaactaacctaatggtattctaaccactccactaaatcctatgtctatccctagcgttagatgaagcatcaaataaatgataaattttatgaacaactcgttacctcttgcattttattgagctttatatctgtgtttatgttacgcctttaacctttgttctgagttaattggttgctttaattcacgtggttaacatacataaatttgttgggaaatagcaccctttgcaatgggtaatccctccaagaaccctaacttaatcttcctcatccctatgatttttagaactcgacacaccgagtgccggagcagcaatgacgaccccattgctcggtgcctccggctctgtgccagcgccgtcaggtcgggaatctattttaaagcagcagggaagcgtcaaagcagacaagcgagtatcgattcaacaaatggcgaccagcaacaacaacaacaataatagtaccaagctaacgccaaatgtggagtatgtttccgaacgccagccggaagtccaaggtgccggcaaacgcttgacaaccaagccgccaccaggtaatgttcaccaggtctaaagccaaaacacgtacataataataagcaaatccttaataggacctcgacccgcctcgctgatcatcaccagaaacgattccaactcacagttccagctgctgcgctcctcctcagtggactacgacgacgtggaggcccaggaacaccggaccacgataaggaccaccttgctggaacagcaggaggaagaggaatcagcccctttcgtctttacagtgcgaaaatgacacaatcttctctactaggtgaaaccagccaatgagatggccatttagtgccagctacgcttagttacaaattagttataacgcaattagctaataactggaggactttgtggaaactctgccttttgggtgacacaatgatgtagttgtatagtcgatacgctaagaaaagacactttgtttgcaagtcctggttgtaagtcacagaaaacacaacttgttataaatgtataatgcatgtgcatccttatattatataaagaaaatgaaagtgggttgttggattagactatctattgaatactatggctgtcgaccctttattattgccagagcaggtgccaatgccctggagagcttgacggccatggtggcactaggcagtgtttggtagatttcctgcagggctaacataacgttcgactgatgctgagtcaggttcatggggtcaaagtgcggattttgccaaaaggccccattcagcttgctctccaagcgaacctgggtgccagcatcgcgggtagccgttctgcgctccgtttgcgtagctgcattcttgtacagcgtagccgtttcttgttcctctgtcggagccaggccctgctcaagttgctccttcttcagcttcagtattcgctgcgatggcttaactgtgctctgtagctccttaaggcgcgccacatcgatgcccagtagacgcagtaacctcttagtagcctcaggcactgtttccaagccccatttagacaaatcaatcctggttccgggcgtggaattgaacttgtagaccacattcatgttattgcaaattggcgaaggattctcaaagcaatcctggttcctaaaggactcattaacagggagtttgcagatggtgtccaccatgtggaattccggtggctcctctttgttggccttctgctggatttgttccagcaccaactccgctcgtgctacggccagactacgcttgtctgccttggacagattcacagtgttg

SEQ ID NO: 39560 - DNA, 468 bp, DROSOPHILA
atggggttgagtcaactcgacacaccgagtgccggagcagcaatgacgaccccattgctcggtgcctccggctctgtgccagcgccgtcaggtcgggaatctattttaaagcagcagggaagcgtcaaagcagacaagcgagtatcgattcaacaaatggcgaccagcaacaacaacaacaataatagtaccaagctaacgccaaatgtggagtatgtttccgaacgccagccggaagtccaaggtgccggcaaacgcttgacaaccaagccgccaccaggacctcgacccgcctcgctgatcatcaccagaaacgattccaactcacagttccagctgctgcgctcctcctcagtggactacgacgacgtggaggcccaggaacaccggaccacgataaggaccaccttgctggaacagcaggaggaagaggaatcagcccctttcgtctttacagtgcgaaaatga

SEQ ID NO: 39561 - protein, 155 aa, DROSOPHILA
MGLSQLDTPSAGAAMTTPLLGASGSVPAPSGRESILKQQGSVKADKRVSIQQMATSNNNNNNSTKLTPNVEYVSERQPEVQGAGKRLTTKPPPGPRPASLIITRNDSNSQFQLLRSSSVDYDDVEAQEHRTTIRTTLLEQQEEEESAPFVFTVRK

SEQ ID NO: 39562 - DNA, 5564 bp, DROSOPHILA
cgaccaccacgctgcccacggttggcagcttgcagcagcaacagcagcagcagcaacaacagggcggcatatcgcagcccacaacgcaacaggtacgcaagctggtgcagaaaaagatcctgatacgcagcgagaaagaataacgctcgactaaagccgtcagaccacgtcagcggcggagcatcacgagcatcacctccaccgccaccgccacctacaacacaccaactcagattcaaatcccacaagcacctcaaaatcaaacaccttcaactcagtcaaaagtcaatcaatctgatcctttcgaatatcaagatcgaacaaatttcaatagctcatctcacgccgatcctcatgcattcaatcagtcagtcagtcagtcaatcagcccgtcattgctaaattgatctcaatttctgtcgattggttttgcagccatgagcgatctaactgttctggaggattgtgagctcaaggtgaaacgctgaagattacaacgatgatcgcttcaatcagctcaaggcatggaagccgtattactaattttactgatccttagatatagcaccttagcttaagtgaaatttcattgtatctattcatattacgagaatagttttaaggaagtgtaggtggagtgcctagtgtgtaggctaactgctttaaattcaatatgtaaatcgtagttaactaagtatcagcccccctattcccgtagagcagtatgtacattggtaaatctaattcagatctatcagatactacataaacacacctaatatgtagctataactaaatgtcctttctagttgtatgatcgaaagcaaataaagaaaattgtaaaaaaaaagtttaaagttttgaaatgtgactacccttattgcatatagacttgtgatggatattaatatggttgccaaggcaacgtttttccttgcgaccacaacaatgtgaaccaaatcagaattggagtcgactggttccggcagtcagttgcaacatgtcgctgttcaatgtctgcagctggtggtctgcccagtgttccgatcctggagaggaatacgacgtggctagcttgctgtgcgctcgctttggcctggagacccaggaaaaggactacattattgtgggttcccagacgggccagctgagtatctactatccacacaacaggggttacgatgccaccgacctccttttggagacccaaatggaggctcctataataggtctgtatgctggaaagtttagtgggtaagtttattagaatttgaagcgaactatttccacgacatctgcacctaatctgcagaaatgttcgcaatgagaacgctaaccaattgggcgtgctcctgccaaacgctattgttatttacaatgttgttgccatcggaggattggcggaacatggagcccagttgcgacttcaggtgcaggcggagcacaagttccagcgcgtctcgtttggactgtgccaaggccattttggtcaggtgaagggacgggagtttttctgcgtggtgcatctggatggcacgctgaccttctttgagcaggatggaatatcctacgagtgtcgattccctggtcaccgggctcttcccgctccggtggcctattgcgagagaactgatagcttctttcggtttagtgccacatgggacctgcaatgctttagctaccaggatctgtcccactcgctggtcaccaagagcagctatcagcccacctggtcgcagggcgtcggcgaaggaattgtcgatatgcgggtggtgcaagtaagggagtaagtataatattataagaggcctcctttactaccattaatcttatatacaacccagaaattgttcgtacatcatgattttgggcgaacgaaacttcatctcactggatgacaatgggaagttcaactttatgctcaagctggactacgctccaaaatgttttaccagttttgtagttggctactactggggtgagaatctcttctattccgtacataatattatcttcaactagaattacattattagaacctggagctcgtctaatcagcgccatcatttcggactcctccaaattgcatctgtacgaagaggccaacataatttgggcagcacagtggccaaatcaatcgcccgctccggtggccatacagcgctcgaatgtccaaaacctagctggtggaattgttacgttaggcgccaggggtcagctcgaagtgggctaccttggcgccgaacccttccagttccaggtgcagcccctaaacgtggaggaactgagtttcgcccaggcccacaaggagctccagaagctggaggacgagatcaaggaagcagtggatgtgcgagacatggatgcgcttaaccaacaggcggcggatcaagtgcgactaagcttcaccatcgagcaggaggctaacgatgatctggacacgctcctcttggacgtgccagcggatgtggctgttaaggaattgccttcggccaagggcttactgcgctgcaaaatcaaggccgagctggccgagttgcagctggtgtttcagacgccaaatggagtccgttgcagtcaggatacattgagttttgttaatgtatccgcaggcacaagtaaggaatttaagctggacttttatattgcggagttgctacatattcatagcaccaaggtggaggtggtggcctccttcttaagtaccagagtgagtgaaaggatttggtacatagtaaacggagagtcataagagatcttcaattctttgtagggcattccgcgagtcatccagcaaagcgccaaccttcctttgtccatgttctatcgcatttgtcagccgcaaaaggcggctggaatcaagctgacctacagcatcaccagtcggcatgtgagccccaagctggccacctttttcggggagttcctagaggagaagagtgatacccatgctctgggtcttcaactactctgtccaggacttgagaagcagagtgaagtgatcaccgttgtggccgccaaaaactcgaatcgctttcgcatacagtccgactatgtggagaccttcgccatgattcttgagcggattgtggagagaactctgcagctggacagctcagcgggtctgatcaaaatggacaaaaagaagccgaagcgcggagtactcaatcgctgcgtcgaacgcctcatggcggctccttttctacccgcacagccaatccttcatcgggtcgacgtccaccacgaaactcagcagagtattaggaagcaaacggtgggttcgtattgtaatttatacccttacatccactttgtttcatccataggtccagctggaggagctgtggcagcagtttaagaccctgcagcgtcaattgcaggaacaatcggaaagtgaacccaaggaggctctcaccatgcaaatcgagtcgaactacgaccagcttatcctggagggtgataaactggtggagattaggagggatgaacgcaagtaggtgacgccgggtgctcgattgctagttaccaccatccattcggatatttttactttcaccatgccacctccacacaagcccgcttaaataattgtcatgcctatacctattaactgctaatggataatagggtatatccattcgatgttaaatttattattttattgatttactattgtagttatgaggcaatgcaaatacgattttgaagttgtaatattggtaaccatataaacatatttttgtaagtttgtatatccctagtcattagtagtacatggtattctgctgcctatgtactgatgtcaatctgtctaattattttttatcgatttcagacagcgctgcgacctgaactgcgccgtggcattagccaaatggattattcatgccttgaacctggaagaacgtgtggtcaatgtggtaagctcagtgctaagtgtacccatcgaggactggactgaactggcaagtgattaaaaattaaatgtggaaaattataataatattgaatttaattttaacagagttgggaggagtcgatggcgcccggaattgatatgctgcatcattttgggccgctgacccgctcgaaatcctcatccacacatggattgctggacgccaacgctggaaacagggatagttttgattacagccgctttagacgacactttgctacacttttcgacaggattgtgagattagcctcctctccagtggcagttaaccccgaaaagggcaaggaggagccttccacggaggagaagctaccgccgacacagcaggtggatgaaatcggcaatatgcagcgtatgctgggcgagaagggcttgccactggctccgccgaagcgaagagccaacatgagcagctccctggaggcagtggaagacgatgaggagtacgacgaggaggatcttcgcgaggatgtgggctatcgcaaggagtacggagcaaccgatcagaagaacccaaaccacaagaagcgatccgagtgggtgaacgaggactttgagctgcccaccaccgaggagctattcagcgacctgggcatctggtggtaggcttggacgacttggaacttgggttattctcgtcgcaataaacgtgcaaactgtcaaaacaaagatctttattggctcgctctcaacttgacaggatgacagcgcgacagctgctggacccgagatctgagattctggcggcgataaagcttcataatcggaatttgcataaccagcaacgacagccagccatccagatccgaattcatatccagagccagggtctgtgggagtgcggagatttgtgtggacaggatagacaggacggattcgtctatgatgcatagtcgcagataaagaaagataaaagttagggcagaggcttcactgtacacaagtcgaaagtgggcagagcacaaaggaagcagtgcactgaaacaaatggatcagagtttcattttctctgtcaattgttactattctttctgaacatttgttgaacatgaagtgaacattaggttaatttattataaatttcttacctttactcaatttttctgtgtgcacctccagctgggacagctgctgtgatcccttggttgctccacgtgaaatcccacacatggcgagctgagttataggagtcactgtctgatctaggctacagctccagttgctggaccgtaaattggccacgaaagacggctggaatgtcaggtctctcctttaggaccggtcggtcgcgtgtttgttgccaagattggaacacaagctgactccgtcatcgggtgcattgagcacattgtttgtgcgtttcattgatttttcaaggggtgggggggggggtagaggtggtgcagctggctcattgatgaattaactgctttttaatgtgatcccgagcaattaacaattaatttgcactttgatgatgggacatcatcgtttcggaaataatgagtgcaggatgggtcagtcacatgcaaaaaggcgtgaataaaaccaaatgcaccttggaatgaaatcaaattgttattgaaaatgattttaaaagtgattt

SEQ ID NO: 39563 - DNA, 2829 bp, DROSOPHILA
atgtcgctgttcaatgtctgcagctggtggtctgcccagtgttccgatcctggagaggaatacgacgtggctagcttgctgtgcgctcgctttggcctggagacccaggaaaaggactacattattgtgggttcccagacgggccagctgagtatctactatccacacaacaggggttacgatgccaccgacctccttttggagacccaaatggaggctcctataataggtctgtatgctggaaagtttagtggaaatgttcgcaatgagaacgctaaccaattgggcgtgctcctgccaaacgctattgttatttacaatgttgttgccatcggaggattggcggaacatggagcccagttgcgacttcaggtgcaggcggagcacaagttccagcgcgtctcgtttggactgtgccaaggccattttggtcaggtgaagggacgggagtttttctgcgtggtgcatctggatggcacgctgaccttctttgagcaggatggaatatcctacgagtgtcgattccctggtcaccgggctcttcccgctccggtggcctattgcgagagaactgatagcttctttcggtttagtgccacatgggacctgcaatgctttagctaccaggatctgtcccactcgctggtcaccaagagcagctatcagcccacctggtcgcagggcgtcggcgaaggaattgtcgatatgcgggtggtgcaagtaagggaaaattgttcgtacatcatgattttgggcgaacgaaacttcatctcactggatgacaatgggaagttcaactttatgctcaagctggactacgctccaaaatgttttaccagttttgtagttggctactactgggaacctggagctcgtctaatcagcgccatcatttcggactcctccaaattgcatctgtacgaagaggccaacataatttgggcagcacagtggccaaatcaatcgcccgctccggtggccatacagcgctcgaatgtccaaaacctagctggtggaattgttacgttaggcgccaggggtcagctcgaagtgggctaccttggcgccgaacccttccagttccaggtgcagcccctaaacgtggaggaactgagtttcgcccaggcccacaaggagctccagaagctggaggacgagatcaaggaagcagtggatgtgcgagacatggatgcgcttaaccaacaggcggcggatcaagtgcgactaagcttcaccatcgagcaggaggctaacgatgatctggacacgctcctcttggacgtgccagcggatgtggctgttaaggaattgccttcggccaagggcttactgcgctgcaaaatcaaggccgagctggccgagttgcagctggtgtttcagacgccaaatggagtccgttgcagtcaggatacattgagttttgttaatgtatccgcaggcacaagtaaggaatttaagctggacttttatattgcggagttgctacatattcatagcaccaaggtggaggtggtggcctccttcttaagtaccagaggcattccgcgagtcatccagcaaagcgccaaccttcctttgtccatgttctatcgcatttgtcagccgcaaaaggcggctggaatcaagctgacctacagcatcaccagtcggcatgtgagccccaagctggccacctttttcggggagttcctagaggagaagagtgatacccatgctctgggtcttcaactactctgtccaggacttgagaagcagagtgaagtgatcaccgttgtggccgccaaaaactcgaatcgctttcgcatacagtccgactatgtggagaccttcgccatgattcttgagcggattgtggagagaactctgcagctggacagctcagcgggtctgatcaaaatggacaaaaagaagccgaagcgcggagtactcaatcgctgcgtcgaacgcctcatggcggctccttttctacccgcacagccaatccttcatcgggtcgacgtccaccacgaaactcagcagagtattaggaagcaaacggtccagctggaggagctgtggcagcagtttaagaccctgcagcgtcaattgcaggaacaatcggaaagtgaacccaaggaggctctcaccatgcaaatcgagtcgaactacgaccagcttatcctggagggtgataaactggtggagattaggagggatgaacgcaaacagcgctgcgacctgaactgcgccgtggcattagccaaatggattattcatgccttgaacctggaagaacgtgtggtcaatgtgagttgggaggagtcgatggcgcccggaattgatatgctgcatcattttgggccgctgacccgctcgaaatcctcatccacacatggattgctggacgccaacgctggaaacagggatagttttgattacagccgctttagacgacactttgctacacttttcgacaggattgtgagattagcctcctctccagtggcagttaaccccgaaaagggcaaggaggagccttccacggaggagaagctaccgccgacacagcaggtggatgaaatcggcaatatgcagcgtatgctgggcgagaagggcttgccactggctccgccgaagcgaagagccaacatgagcagctccctggaggcagtggaagacgatgaggagtacgacgaggaggatcttcgcgaggatgtgggctatcgcaaggagtacggagcaaccgatcagaagaacccaaaccacaagaagcgatccgagtgggtgaacgaggactttgagctgcccaccaccgaggagctattcagcgacctgggcatctggtggtag

SEQ ID NO: 39564 - protein, 942 aa, DROSOPHILA
MSLFNVCSWWSAQCSDPGEEYDVASLLCARFGLETQEKDYIIVGSQTGQLSIYYPHNRGYDATDLLLETQMEAPIIGLYAGKFSGNVRNENANQLGVLLPNAIVIYNVVAIGGLAEHGAQLRLQVQAEHKFQRVSFGLCQGHFGQVKGREFFCVVHLDGTLTFFEQDGISYECRFPGHRALPAPVAYCERTDSFFRFSATWDLQCFSYQDLSHSLVTKSSYQPTWSQGVGEGIVDMRVVQVRENCSYIMILGERNFISLDDNGKFNFMLKLDYAPKCFTSFVVGYYWEPGARLISAIISDSSKLHLYEEANIIWAAQWPNQSPAPVAIQRSNVQNLAGGIVTLGARGQLEVGYLGAEPFQFQVQPLNVEELSFAQAHKELQKLEDEIKEAVDVRDMDALNQQAADQVRLSFTIEQEANDDLDTLLLDVPADVAVKELPSAKGLLRCKIKAELAELQLVFQTPNGVRCSQDTLSFVNVSAGTSKEFKLDFYIAELLHIHSTKVEVVASFLSTRGIPRVIQQSANLPLSMFYRICQPQKAAGIKLTYSITSRHVSPKLATFFGEFLEEKSDTHALGLQLLCPGLEKQSEVITVVAAKNSNRFRIQSDYVETFAMILERIVERTLQLDSSAGLIKMDKKKPKRGVLNRCVERLMAAPFLPAQPILHRVDVHHETQQSIRKQTVQLEELWQQFKTLQRQLQEQSESEPKEALTMQIESNYDQLILEGDKLVEIRRDERKQRCDLNCAVALAKWIIHALNLEERVVNVSWEESMAPGIDMLHHFGPLTRSKSSSTHGLLDANAGNRDSFDYSRFRRHFATLFDRIVRLASSPVAVNPEKGKEEPSTEEKLPPTQQVDEIGNMQRMLGEKGLPLAPPKRRANMSSSLEAVEDDEEYDEEDLREDVGYRKEYGATDQKNPNHKKRSEWVNEDFELPTTEELFSDLGIWW

SEQ ID NO: 39565 - DNA, 6784 bp, DROSOPHILA
ctctgcttcgcctgcctcttcttttcgtatctttctgcccgttgttttgctgcgtttattttcgttgcatttatttttgctattttgcgcaccttttcctctccgtatttacaaaattgcactcgcgattcttttcggggatgtacaaatttctttacactcgagtgccgaccaaacaacagacacgaaatcgcgctaaaatccggacgtaaccgtgccttcttcgctccgtaaaattttttcgaatgacttggccaatgttaccagatgcagaaacgactcaattatccaagctgtgcatttcctaaaaaataccaattcttatgcttagctgggtgatgacttaaatagacactccgaaacgcgtactcatttaaaatttatatatttctgttacaatttcgcgattaaaaatgttactttaacatcttgaatttttttggttttattcttatgttactgtttgtttacatgatttgcttaagatattattatagaattattaaatgtttgataggcaaataataattcaatcaaatataattaacattttgaattcatttaaatcggcaagatttcatatttaaatgcttatagtatttttcttgagctaagctgcggttacactgatttacactgtttcggttgctcgtacgttcactgttattctgtgatactgttagttcagttgtacaacccaacatttttttaaaaacacagactggcggctaaaatttcccagacccaatgttaatagatttgtttgaattcatacgcattaatattgaacaattgaagcattcatattcgtgtaggacccgacagcttttacctattattattttcaaatttgaaaaggtgttacggtttatgttaacattgtaacagtaacagattatagagaaagatagaacgagatagcatcataaaatactaaatgagaaaggtgctaatttgacttaattttttttgtctttgcaacactgtttccatggctatttttaggcagtttcttacaatgtttttcgtcaccgagtttttgttaataaattagcgagaagaaaacaaagtaaataaggtgattgcaggtgcttaatattgcttattaaaggcgaatacgtccttgttttcctcattgccttgttatgactatattcgaggtgtgaaaaaggtatgaatcacaagaccgttttttctccacatctttttgtgttgttttttctcttttgcgtttttgtgaaaatgcaagcagataaacctggttggttcaattttatttaaggtttctgcggatttggtggccatggacttggtggacattgatcaggttttggacaatctggaactgagcattgccgccgatgagcagctgagtagaaatgcagcggcagcagcagctgcaggtgcaaatcctggccgttttctgggcgacggagcaagtgcatcgatcagtggagttggagctggcgccggagtatcgggagctgcgggagtaacaccaacaccggcgtctggaaagtcctttgtgggcgtctctcaggttttcaacagcctggatgactacagggaaaatgtgaagtccttgcaggtggatgcccaattacccagctacgactggcaaacggaggcggaacacgaagacgacatccacaagttcagcgaacaggcgtccaaaaataacggccagacgatagtatcgtcctccgaatcgctgaccacctcatcctgttccaccttctcgtcgggtccgtcgcccgtgagcaatggcagtcactcggaggagctagcaacgccccccgaagatgagaaaacgagtgaagttcaggtggagccaaaggaacaggatcaacagccggaacaggtcaagcatgaggaccagcaccaagatcaggctgttccaccgccaacgcaatccaaacaaactgtagaggagttagcagttggattgtcatccatctccatcactgcgtccggcacagaatcgcaatccctattgccggaggaggtcaccgcatcgtctgttctcgggcaggtcctcgaggagctctcggaggaatcgtcgcccagtagagaacccgaaaccgaaatgaccaacggcatagatgtcccattggccaatttagtaagtactattaccttactttgtttgtgtaaatgactaataagtgtagcgcattagtttaaaaatattatcagcttcataaatcaattaaggttataaactatcttgacatatagtatagtttattaataatggtgttacattttcagccagcatctgttgcggaagtaccggtccctaaagagatggagcagccagtacaaacggaagaagaggatgtggagctgccacaggagcagcatcccaggcgtagtcaaccgttgaccttctgctccaccatggacgagatctcggacaccgaactggacagcatgctgcaagagatggatgcagatgacaaccaggcggacgatcagcaaatgcccgacgatgagaaatcctgctccgcctcgccagtgaccgaggaggagtcggtgcggattctatccgatgagcaggagacaacctcgaacgatcagatgaacgtggacaacttttcgcaggcctccactgtggagtttgctgatctgaagcagccggagtccacaccagttaccgcgatgggagaagatgtagcctccagtttcagcagcacggaatcggattccctttcgggcaggaaactagatggcgaagtggaggtcgatcgagagcatgaagatgccagcctggcaacggatgccctggaaacccaagagcagcgcccccagcgaccacaaaccctaaatttgaatggttgccaggcagaaagttccacgccatctcaagatgaaaatcccgaaattcaacaggaaactttgcagcctaccgaagtcagggaaggagcggcaggagtaggtgttatacccggcgaggatgacgaggaaagtcctatctacgaagcagtgggctacagcgatccgcatgccaatctgggcaaggtgccacccatatgggtcccggataacatggccgggcagtgcatgcaatgtcagcaaaagttcaccatgatcaaaaggcgtcaccactgtcgcgcctgcggaaaggtcttgtgctctgtctgctgttcgcaacgattccgattggaattcgccaccgaacccgagtctagggtttgtgtgcagtgttatatgattctctctgagcggcaggctaatggattgaattctgagtcagcaccgggttcggcattgccgcccactcccattcgttcgccaaacccaaacaatccaatggaatattgttctacaataccaccacaccgtcaggtggccaactcaccgggtgctccgccacctagtgtgattgtgcccgtgggtgtgttgaaaaaaaccgatggcagctcctccaattcctccagttcggatggccaaaagggccaaagaaagcgaaagagtgttatgttcagtgatggcattgcgcccggcagcgaactggccagtaccatggagcagcaatggggcgagtccaagcattctcgaaggggactatccaggagcggctcgggagctggtcaaaagccaccaacgcctgcgacagaggagccacctcgcagtattgacactagctctacattgggcctagtggcacagctattccgcggttccattccaccaagcgcagcggctgccacattatcggctaccgagacaagcggtaagggaaagcttcacttttatcgaaatcgtttttatgtaatcaatgtgtttgtatcctccagctggtcgctcctcatcccaatcgcaggcacagacctcgccgcgtcgcaaagcggaatcatcacggaatcgcaaactaccgccaaacggagatgcccaaggctgctatctgccgccggaggagaacggcctgcccccaatttgtataagcagcaaagagggcggtgaggtggactacaaagtagtgcgcaacgatggatcactcctagatcgattgcagaacgaaacgctcaagttcattataaagaacaacttctttgtgctggtcaagattgttaacagtcagtattttggaactttaaactaatctaaatttttctaaatggcatttctttaacccccagtgagctgctgtatgaatcgatgggtgctgaactttacgacatccggactacatcatatgggcagcgatgagttgatcattctgctggagattaagcaacccaagcaagaagaatacgtgaagggggaagtcgcaattccgaaagatttgttccagcacctgtacgagatctacgtggaggcggagcatgcccggtccggcacccatgagttggctttcaccagtccgcgaaatgccaattttctgggttcccgggagcatggaggatttatctttattcggccaacgtaccagtgcttgcagggagttattgtaccagacaatccgtatctggttggcgtgctcatccatagacacgaggtaccttgggctaaggtgctacctttgcggttgatcctccgcttgggtgcccagtatcggtactatccctgtccattgatctcggtgcgcggcagggagtcggtgtatggcgaaatagctcaaactatcattaactttctggtggattttcgcaactattcgtactctctaccggccatccgaggattatatatccacatggaggataggcagacgacggtgattattccaaagtaccgccagcaggatgtaattaaggcaatcaataatgctagtgatcatatactggcttttgctggcaacttctcaaaagtggccgatggtcacttggtttgcatgcagaatatcaacgacgatcgatccgagatgtactcctactccacgcaggcgattaatattcagggtcaacccaggaaaatcactggagctagcttctttgtgctaaatgaagccctcaagagcagcagtggcttgtcgggtaagtgcagcatcgtggaggatggcctaatggtacagattatgcctgccaaaatggaggaagtgcgtcaggcgttgcgcaaccaaaacgacatcgacatcgtctgtggacccattgacgccaccgacgatcagagtgagattgtaagcattaagtgggtggacaataatcgtgacatcaatgtggggtaagttcacctgcaccacttacaaagaataagtataacttaaatttgatttatagggttaagtcgcccattgatgaccagcccatggatggcatttcaaacatgcgagtgctgaaatgggccagctttaactattccaataccaactatgccatccgcctgagtgatatctacattattaaggtatagttaagttctcaccactttggttgacaaaactttactactaactttgctttacagtgcgaggactggtatgcaacaaatggtggaaactgtgaggagataacacggattgcggagcaactggctcgcagtgcctcgatggctctgctgccacttctcgatcttttagcagctgctggcattaataagcttggcctaagagccacgctcgatcaggataacgtatgtctattcaatgcggaggcaattcaaatcactaataatattatccactcctaggtgggctatgaagccggagctcgtggctccaagctaccgccgttgtacatgaacgcgctggacaaccatctgatagccacgctgcatggcgaatcctccggcattcaagagcccatcattctagagctgatcttttacatactgaacgcttgactttagtccctcgtagtgcaattctcccgctggatccgaagaccaaacggaaacattcttaactctaagctcgacgcgatcaaagccaatggacaactacacgagtccatggggcaagaaatgaggacatgttggtattgttggatggctcagttaactgtgtatatatttaagtagctcatcgtttggtttttgtctatacatttctacaacccccccatttctaacctttcacttcaactgttatattatttctgatttttattagttttgagttttcattgaaagtaaaacgtatctaagaaacctaaatatatatatatttgtatgtgatgttctttaatatgctttacacatttaccactcgagtatatatgaataacaactatattaaaactgttgatcaaatggctgtttcactttgtggatataagataaattagaaaaaacaaaggccgcgtcttgttaaattattgatagcaattctttattcaatttaaagtgtttcaattgacttcgtcttgagagtgtgtctgatttacaatatacgatattatacgatattatctttacgatgggtctaaaaatcgtcaccacccgcagccgacacaaaatatataacaacctataaatgtatataaaaatgatgttcattctctctcagattgtacataatttaaactacgtctagtaccggggttacagacacacaaactactaatgcactcctctaatgtgttggtgtttagatgcagatgcagatgctgatgctgatgctgatatgtatgctatatacaaaatgacatcgggaagcatttggttgcactcgatttattgctcggctcgtgcctcatctgttgtatatgttctatttttgtgtatatatttgggttttatataacttaagcactcgtgtcccttcgatgttgacggcaaaccaagaacccccattattgagcactacagctcgtcgtgtttgggtcccgagaactcatcgtgc

SEQ ID NO: 39566 - DNA, 4068 bp, DROSOPHILA
tttaggcagtttcttacaatgtttttcgtcaccgagtttttgttaataaattagcgagaagaaaacaaagtaaataaggtgattgcaggtgcttaatattgcttattaaaggcgaatacgtccttgttttcctcattgccttgttatgactatattcgaggtgtgaaaaaggtttctgcggatttggtggccatggacttggtggacattgatcaggttttggacaatctggaactgagcattgccgccgatgagcagctgagtagaaatgcagcggcagcagcagctgcaggtgcaaatcctggccgttttctgggcgacggagcaagtgcatcgatcagtggagttggagctggcgccggagtatcgggagctgcgggagtaacaccaacaccggcgtctggaaagtcctttgtgggcgtctctcaggttttcaacagcctggatgactacagggaaaatgtgaagtccttgcaggtggatgcccaattacccagctacgactggcaaacggaggcggaacacgaagacgacatccacaagttcagcgaacaggcgtccaaaaataacggccagacgatagtatcgtcctccgaatcgctgaccacctcatcctgttccaccttctcgtcgggtccgtcgcccgtgagcaatggcagtcactcggaggagctagcaacgccccccgaagatgagaaaacgagtgaagttcaggtggagccaaaggaacaggatcaacagccggaacaggtcaagcatgaggaccagcaccaagatcaggctgttccaccgccaacgcaatccaaacaaactgtagaggagttagcagttggattgtcatccatctccatcactgcgtccggcacagaatcgcaatccctattgccggaggaggtcaccgcatcgtctgttctcgggcaggtcctcgaggagctctcggaggaatcgtcgcccagtagagaacccgaaaccgaaatgaccaacggcatagatgtcccattggccaatttaccagcatctgttgcggaagtaccggtccctaaagagatggagcagccagtacaaacggaagaagaggatgtggagctgccacaggagcagcatcccaggcgtagtcaaccgttgaccttctgctccaccatggacgagatctcggacaccgaactggacagcatgctgcaagagatggatgcagatgacaaccaggcggacgatcagcaaatgcccgacgatgagaaatcctgctccgcctcgccagtgaccgaggaggagtcggtgcggattctatccgatgagcaggagacaacctcgaacgatcagatgaacgtggacaacttttcgcaggcctccactgtggagtttgctgatctgaagcagccggagtccacaccagttaccgcgatgggagaagatgtagcctccagtttcagcagcacggaatcggattccctttcgggcaggaaactagatggcgaagtggaggtcgatcgagagcatgaagatgccagcctggcaacggatgccctggaaacccaagagcagcgcccccagcgaccacaaaccctaaatttgaatggttgccaggcagaaagttccacgccatctcaagatgaaaatcccgaaattcaacaggaaactttgcagcctaccgaagtcagggaaggagcggcaggagtaggtgttatacccggcgaggatgacgaggaaagtcctatctacgaagcagtgggctacagcgatccgcatgccaatctgggcaaggtgccacccatatgggtcccggataacatggccgggcagtgcatgcaatgtcagcaaaagttcaccatgatcaaaaggcgtcaccactgtcgcgcctgcggaaaggtcttgtgctctgtctgctgttcgcaacgattccgattggaattcgccaccgaacccgagtctagggtggccaactcaccgggtgctccgccacctagtgtgattgtgcccgtgggtgtgttgaaaaaaaccgatggcagctcctccaattcctccagttcggatggccaaaagggccaaagaaagcgaaagagtgttatgttcagtgatggcattgcgcccggcagcgaactggccagtaccatggagcagcaatggggcgagtccaagcattctcgaaggggactatccaggagcggctcgggagctggtcaaaagccaccaacgcctgcgacagaggagccacctcgcagtattgacactagctctacattgggcctagtggcacagctattccgcggttccattccaccaagcgcagcggctgccacattatcggctaccgagacaagcgctggtcgctcctcatcccaatcgcaggcacagacctcgccgcgtcgcaaagcggaatcatcacggaatcgcaaactaccgccaaacggagatgcccaaggctgctatctgccgccggaggagaacggcctgcccccaatttgtataagcagcaaagagggcggtgaggtggactacaaagtagtgcgcaacgatggatcactcctagatcgattgcagaacgaaacgctcaagttcattataaagaacaacttctttgtgctggtcaagattgttaacatgagctgctgtatgaatcgatgggtgctgaactttacgacatccggactacatcatatgggcagcgatgagttgatcattctgctggagattaagcaacccaagcaagaagaatacgtgaagggggaagtcgcaattccgaaagatttgttccagcacctgtacgagatctacgtggaggcggagcatgcccggtccggcacccatgagttggctttcaccagtccgcgaaatgccaattttctgggttcccgggagcatggaggatttatctttattcggccaacgtaccagtgcttgcagggagttattgtaccagacaatccgtatctggttggcgtgctcatccatagacacgaggtaccttgggctaaggtgctacctttgcggttgatcctccgcttgggtgcccagtatcggtactatccctgtccattgatctcggtgcgcggcagggagtcggtgtatggcgaaatagctcaaactatcattaactttctggtggattttcgcaactattcgtactctctaccggccatccgaggattatatatccacatggaggataggcagacgacggtgattattccaaagtaccgccagcaggatgtaattaaggcaatcaataatgctagtgatcatatactggcttttgctggcaacttctcaaaagtggccgatggtcacttggtttgcatgcagaatatcaacgacgatcgatccgagatgtactcctactccacgcaggcgattaatattcagggtcaacccaggaaaatcactggagctagcttctttgtgctaaatgaagccctcaagagcagcagtggcttgtcgggtaagtgcagcatcgtggaggatggcctaatggtacagattatgcctgccaaaatggaggaagtgcgtcaggcgttgcgcaaccaaaacgacatcgacatcgtctgtggacccattgacgccaccgacgatcagagtgagattgtaagcattaagtgggtggacaataatcgtgacatcaatgtgggggttaagtcgcccattgatgaccagcccatggatggcatttcaaacatgcgagtgctgaaatgggccagctttaactattccaataccaactatgccatccgcctgagtgatatctacattattaagtgcgaggactggtatgcaacaaatggtggaaactgtgaggagataacacggattgcggagcaactggctcgcagtgcctcgatggctctgctgccacttctcgatcttttagcagctgctggcattaataagcttggcctaagagccacgctcgatcaggataacgtgggctatgaagccggagctcgtggctccaagctaccgccgttgtacatgaacgcgctggacaaccatctgatagccacgctgcatggcgaatcctccggcattcaagagcccatcattctagagctgatcttttacatactgaacgcttga

SEQ ID NO: 39567 - protein, 1291 aa, DROSOPHILA
MDLVDIDQVLDNLELSIAADEQLSRNAAAAAAAGANPGRFLGDGASASISGVGAGAGVSGAAGVTPTPASGKSFVGVSQVFNSLDDYRENVKSLQVDAQLPSYDWQTEAEHEDDIHKFSEQASKNNGQTIVSSSESLTTSSCSTFSSGPSPVSNGSHSEELATPPEDEKTSEVQVEPKEQDQQPEQVKHEDQHQDQAVPPPTQSKQTVEELAVGLSSISITASGTESQSLLPEEVTASSVLGQVLEELSEESSPSREPETEMTNGIDVPLANLPASVAEVPVPKEMEQPVQTEEEDVELPQEQHPRRSQPLTFCSTMDEISDTELDSMLQEMDADDNQADDQQMPDDEKSCSASPVTEEESVRILSDEQETTSNDQMNVDNFSQASTVEFADLKQPESTPVTAMGEDVASSFSSTESDSLSGRKLDGEVEVDREHEDASLATDALETQEQRPQRPQTLNLNGCQAESSTPSQDENPEIQQETLQPTEVREGAAGVGVIPGEDDEESPIYEAVGYSDPHANLGKVPPIWVPDNMAGQCMQCQQKFTMIKRRHHCRACGKVLCSVCCSQRFRLEFATEPESRVANSPGAPPPSVIVPVGVLKKTDGSSSNSSSSDGQKGQRKRKSVMFSDGIAPGSELASTMEQQWGESKHSRRGLSRSGSGAGQKPPTPATEEPPRSIDTSSTLGLVAQLFRGSIPPSAAAATLSATETSAGRSSSQSQAQTSPRRKAESSRNRKLPPNGDAQGCYLPPEENGLPPICISSKEGGEVDYKVVRNDGSLLDRLQNETLKFIIKNNFFVLVKIVNMSCCMNRWVLNFTTSGLHHMGSDELIILLEIKQPKQEEYVKGEVAIPKDLFQHLYEIYVEAEHARSGTHELAFTSPRNANFLGSREHGGFIFIRPTYQCLQGVIVPDNPYLVGVLIHRHEVPWAKVLPLRLILRLGAQYRYYPCPLISVRGRESVYGEIAQTIINFLVDFRNYSYSLPAIRGLYIHMEDRQTTVIIPKYRQQDVIKAINNASDHILAFAGNFSKVADGHLVCMQNINDDRSEMYSYSTQAINIQGQPRKITGASFFVLNEALKSSSGLSGKCSIVEDGLMVQIMPAKMEEVRQALRNQNDIDIVCGPIDATDDQSEIVSIKWVDNNRDINVGVKSPIDDQPMDGISNMRVLKWASFNYSNTNYAIRLSDIYIIKCEDWYATNGGNCEEITRIAEQLARSASMALLPLLDLLAAAGINKLGLRATLDQDNVGYEAGARGSKLPPLYMNALDNHLIATLHGESSGIQEPIILELIFYILNA

SEQ ID NO: 39568 - DNA, 9452 bp, DROSOPHILA
catataccatttcgtgtggtcgaggtgaaaagtgcaagcgcaactttatcagcgcccataaatcgagcagcaaaaggtcaaagttgagctagactaacagcttttttagtggcgaaggatggccgcggaatttgcgagtgcccatgtacttggcaactttaaatgcggtgtcatttgtgtttaggttttcagactagggcaacaaatcattgttgtttttgtgtgattattcatcagttatatggttgataaaaccagtaattatgccataaaagttggtcattttatttgatcagctgaaatcaagcatgttcctttcaataacagttgataaaagaattgtcttgtatgatttcactgtacttacttacttaacttagttatttgtttaaccaaagataaggcttgatgagatgtttcgaaagatattggagagtcaagaatccagtttgaatcgcagctaccaagataagatagctggaaaccataaaagcgatgcatcgttccatttggaagtcacgacttatgccattctcttcattttacgtcgtgattttatgactaaagtttcaattcgaatggctaaattatgcagttaccattgcagctaaatgagcaataaaatacttaagtcgttggcttttgaataataaaactctagaacaactctggctcggcatcccaaatcatccggcttgtatacattttgctgtatgtttaccctggagccacattcatcatacgcactgaggtcccagctcggaaatgaattcaaattgcttggcttgactgggttctaaaacctaagacgcaaaaaatagtagccataacgagttttgttttgtttatcgtttgaacttatacacttgcccagtgaccaaccagtacataacatgtatataattatctgtatctggagctgcgtcatagcatttggagtgcttgaagcgtttgcatttgcttcgttgctgtccggtgattattagttgataaattcgagccgcatgacgcacttaatcagtgcaaaaaaaaaaaaaaaaaatactacacgacgaacgagaacgggaggaggaaaagatgtgtgtggcctcccggggatgtgtgaaattttcatgcctccgttccactttggcttcaagccagggcacgtggagagcaggcctcaacccttggcccaaactgggttaatgtaatgcatatgtgctacattggcgacgtaggagatgggaatggttcgggggggttgcagctgcagcagtctctgtgtgccccaatcccaaacccagatccaaaacccacatacccacatcgccttcctctcgcggcttggcctgcatattttgtttcaagtacgagcattgacgccccagctcagtgctcccccctgcagtggagcttggatagtgatggcagaaagtgaggttgaaggtcttgagattcggctgatctttaaggtgcaccagattctgattaacataagtccaataatgcttatttcatgtcatgtcaagtcacatagtgcactcactggaacgtttaagaacattcttatcgattcgatgtggaatagaaaatgttcttgctttgatttacttctatgaataaggatgtggaatttattacatttgactattcttttacttcttcaaacttatctcactctctcaaaagaaatcgattaacaactaaagggtttggattttgaatacatttttatttggccctggcttattatcgctgtttcttaaccataaagtttaaaagttgatcgctttaccgtatgactttgagcataactaaccgaattttggtgctggcttcgtcaaagcgatgccccactgtagtggcttgctgcttcttaaccaatgtcaatcatttgatactgtggacccccgccaatccggctttcgtgtgactcaatctcatcatcattctatttgcttttgttattataattttattttctttgtttttttatgtgatttatgttttgtgacgttgtgatgccgctgctgcgctgctgctgcccaaaaaaaaaaaaacaataataaacatatgaatatttgaatgtcaacgaaatgcccattgtatttgtctgtctgtctgccggctataatattacacacatcggcgctgatgaatcaaaagcattgtttataaaaaacttgaaaacagaaacgcacccacacaccgacacttgcatgcacagtggaacactcagttctgactatcagaaaagaataaataaaataaataaaaaacaaagcacaccaggctaagtacttaagcgagaaattcgagcgaagtcgaaagataactagccggttaacaaataaatcagaaatcaagcgaaagacccaaaaaagcatgccacagtcagagggcggctatgtatcgctgccggccgtcaatggcaatggcggcgccatctatcagtcgaccacagagcccacggccccgccctccgtttttgcgagcgtgaagcgggccattggccaggccatcaagtcctcgcccaccgacagcgaggagctgctccggtcggaccgcctgccggtcatcgtcggcggctccaggtaagtccatccaaccggggcttagccaccaacttttcgcctcctcctctctacgggcgacgcgacggtgagctctctccgccaatcattcttaatcacccaccacaatgtggccccacaaccattgcccccgcttaggcacatacacaaaacccccactgaacgcacgcaccacaccactgaatcattaaacaactgagtgacccactcgcagctacacagagaacaaaaagaacggagtcatcaaataaatttccaactttaatttattgacatatatatatgtatatactgcaaatgcttatctgaaaactaattcgcacagcaaacagccactttcgttgcaatttaattgtaattaattactcaacattctttcaaattacttgctcaacaattttccacaaataagattgcatcttctttgagccgttttctctgtgtagctcagttaaacagcgaacatcaaagctcaattttgcctttgccacctgacttcccataaccccagaagcttaattgcgattgcatgtcagcccaaaagaaatgtttgatttttgcttttcttgcttttgattgtttgtgcttgttgccaatgttgttgttatatttctcttcattttccaaggcaccttgcattattatattgaaattatttgcccagcagaaggaagaactaattgtatatatttgatgtaaactcaaaggttcacattccacattacatcatcatcatcatcatcagcataaagcttactgctctaagggaatttcccaattatacctttcttagatgaatcagacactttgcaatgaaaagtgccctgaaagtagagcattttgaaaagggtctaggccccaaaagaagaatagcgtcggaaatgtaacttcgtttctggttagccatgacccaaggtcaaactgcagtttgcagttgcagcagttttgtcaatacaacaatcccgagagcacagcaaacagagctcagaaactaaagtgaactcttgagtcgtttagtttgggtttagttggccgccggttgcgacccacattcgttttaatttgcggtcactcttcaaattattcatactcatacgcagtagagaatccacgattatacgattattcacgattgcgctggcgatctcaagtggccttaattagtatttccgcagccactggcatcgctcgtaagtgatttggtccacttaatgtgttatttccagatgcgagatcgcaccgtctgtttgcattccttcagccaagtgcattgctcttggctccctggcctggagttaaccgataccgagcagttctaaccggttggtggccgtaccggtttaagctggagattcaaagtaaattgaaaagaaagtccagcaagtgtatgcaaacagctgattaacacaaataatccatccgcttgcgtgctgtaccagaaattgattgttcagattaataatggatgtacagggaaatgtaaggcttacgtcggtagttagtaataatgcaataataatattttaattatggaaacacaaagctcaggacgttgcatatttcaagagctagtcagtcgcgttcataagtttcatcttatgaatttatgataataatagtttcctcggcacatctatttttctttgccataagagctgagctctgcttatgcaatttccctttggctcaatcacgtaaccaattaaaggtgataatgaaaacggccatgaccccaaacgtacatatgtatatatactagtgtgtatataatgtatgaggataatgaactctcatccctcacctgagcttatccccacaccaccagcattaactaattgagttcggtccctgcagtaaaagttttttgttagcccaagaaaaagaggaggatgtaggtaaacaaaagttttcgagcttttcacgtttttacaggggacgcaaaggagaggaaagtcaaattagtatgccagctggtcgcattttcctggcgccacttgtttgtcgctagccattttcatacatcgctaaaacatatccatcgacatttaccccgaatgacattgcgtgactcattcgcttacgttttacgttttacgtaacggaacgcgagaccttgacgagaattcccccgcttcattcaaccgggcaaacaaacaagtttgcttctccgctctttctttctactgttctatgtctgcttaattccctacttcacaaccgtcctgtgaatatatatttactcctaagatctcaaatttcaagtccacaagaaaatatgaatatatatacggtgaaagtttttagccgatttggaacagagtctgccagaaacttgcctcgatttttgcgttcctttggttattctttgcttgcatgctcatagaatctctttcagagaccgcgacaaatccggtaagacactgaccaccaagatgccgtcagctccaacacacactgccgaggaggcacatctgctggggtaagcaaaatgaaagaaagaaaagaaaatactcccagggtattgtgtaattaggtcccaaaatttccgaaccatccgaatcgaatgtatgtaagatatatgcaagacactcaaacaccccaaaaaacacaatcacaatacacaagtttagagtttttgcgtttgaattaatttttcgttacttttgttcattaacccttcacatagtttttgatttacgagtaaacgtattgttaagagacaaccattagttcgtaagtacttgccctagacttgagtttgacaactaaaccctgtaaaagcatcccaaattgttctatctctccgaatgtttattaaccgatatcttacgtcttgatttatttgagttttgcatacatttgaaccccataactagagtagaggagagcagcgagatcaactcacgcctgccatatatgtattacccccaagatcagtagcctcttagtatctagatgagatccgaatcaaggatgcatatcctgcgacacaaagacacttaaactcacaggatgccagtctatgaacagctacccagctgctgctgccgccgcctaaaaatcccaccaaaaacatattgtctcggggattaagggagagccatatgttactaacttacatcttttttttatccatcccaatagcaccatgcccgttgatcccatggatgacatcgaactgcgctccgtgcagctgcaattccccaatgcccgcggctccatcctggaggcctgcgaacagcgacgcgtgcccacagacaagggcgatgtccacgtggccatacagggcgatacggccaagccggccattatcacctaccacgatttgggcctcaactgtaagtgttcaaatacctgctcaaatcggatcgtactaatcggtattgttctaccattgtagacgccaccagctttgctggcttcttcaattttccagtgatgcgaggtctgctggagaacttctgtgtttaccacgtgactgctcctggccaggaggagggtgcacccactttgccagaggagtaagaaataattgcctaccgcgtaatacatttcttgtcaatctttcataatcgcaatactagctctttgttcagtaaattataagtaaacaaaagaaaactttcaaataattccaaattatataccatatatttctaaaaatattcctatcacttgcagttacgtctatccgaccatggatgatctggccgcccagctgcttttcgtgctatcccactttggcctaaagtcggtgattggtttcggcgttggtgccggggcgaatattctggcccgtttcgctcacgcccatccggacaaggtgggcgccctgtgcctgatcaattgcgtgtccacgcagtcgggctggatcgagtggggctaccagagcttcaatgcccgcttcttgcgcaccaagggcatgacacagggcgtgatcgattatctgatgtggcaccacttcggacgcaatccggaggagcgcaatcacgacctggtgcagatgtacaagcagcacttcgagcgtggcgttaatccgaccaatcttgccatgctgatcaacgcgtacatccatcgtaacgacctgcatctggcacgcactccgccaggtactccgggcagcgaaacggcggccaccacgctgaagatgccggtgatcaatatcacaggttcgctctcgccgcacgtcgacgacacggtgaccttcaatggccgtctagatcctacaaactcatcgtggatgaaggttcttacaaattttaaccaacatacatatgcggttgtaataattcaattataaccgaccgcatatctatgtattgttattaagttctgttcgattgtaataagcttgttttttccacacacagatttccgattgcgctttggtgctggaggagcagccggctaagctggccgaggccttccggctcttcttgcagggcgagggctacggtaagtgttagaacaccgcacaccacaccaccaagatccaccacagcaacaaaaacaactagaactacagcaacatcaaatgctacaacaactgaacaacctcagcaatctctgctacaatctcaacaatctactactgtacccactctatctaattcttctattaacccgcaactaccttaactacttaactacctaccacctaaatttcttagtcaagtacttccgacccggcgactgggatggcactcagttgagcagcttcatctagaagtccattccgtttggagcaagatatcccctccatagattcagttcagttcagttcagctcagttttcccacaggagatgctcctcctagcttagcccccgattttctccgtggagacacacgcacacacaaagtacacaaacgtccctgacccaacctgattttagtctaaacgaaaatctttgagaatcaaaagctttttgagatgcattgaaacgaaaccaaaaatctattgtgcaaaattttatatttacaaattggttagatatacaaaacaaaaaaaaaaaactaacaaaattgacattgatcgttcatatatatgttgataataaaccaaagtatttgtacgcaaccaaaagtatttccaaataaatcgaaaagttgttgaaaatcaagcgtttactttctacacacatatatttaactactttcaaaccccaccaacctatttccccgaatagttaggaccccaaagagtacacacaatttcgcatccacgacagcaaccaaacaaaaaaagatattcaagatgttcattactttgtttttcatttctttttcctttctccaaaactgcttgtttttgctaaaccaacatacaaaacaaaaaataaaaaaaaaaacaaaatatgaaaaaaaattctatgaaaaacaaacgaacaacacgcaacatgaatccaaatgaaaaacaaaatatatacaaacaaaatctttcacacgaaattgcaacttcaaacgatcaaataccccaaaatccgcaccccataattccataatcttcattcgatttcatggtctatgcaatccaatccatcgacttggtctctgctgcattcaccaacgacttttcccccgttctgtttcaattcgtttcaattctaactctgattttcttttcgtttcgaaattggtttttccaatccaactcaactcgaaatgatcgacaaataactaattaactaatgcaactgcgcgttcactgtaatttcaacaacaaaactaaatataataatcgtttatatggtatgtatatttgtacaccatcatattcgcacctgtgatcgtagtgtccgagaaacctcagtaggaagatctgccggagcaaccaagcagtaatatacccaacaaattgcaaacaaaaaaaaaaaaacaaataaacccgaaatctagttggaatgcatttagctaattaattaatacaataattcaaattaacattatatacaactatataggcaaagtagagcttaaaaaccacccatacacacacacacacagctagtcaaggttctttcgatattttaaggtgttaacgggtaaattaatatattgtcaaaatactaatagcagtacattttattttatgaaattatacaaatttatttatattttctataaatacaacttgtcttactaatttcctgacttaacgcccgacaccttaagattttgagagttgaatagtgaaaatgacttacactagcctgcatctgcgtagatttgcttctgagtacagtgcaacctcgttagctgggccattgatgcgctttcgcttttccaacgctctctttaattttctcctccacaaaaacacacactctcgcacacgccttttgtttcgaataactctttcatttatttgacctatcattttgttttgtttatttacacgcaaattgaaaacaaattatacaacaacgaaaacaattaccacaacaaccacaaacaactgaacattgaatttcgaaaaccccaaaagctgttggcacactgcaaaagttggcgcgcaaaatctcatcggtcagccggagcagttccacgcaaattgagctcactgtacagtgaacgacggcggcagagcagaactatgtgagcgaatggagagagcaacagcagtggcagcggcatcggcagaagcggcagcatcggccccaattcggtggggcagagtgagtgagagagagagagagagcaattggataatcacccgacgccgatacacccaaaacaaaaaattagaacaataaccacactgagaaaaatggtttacagctttgcttttaagggcaaaataatcttgcttcggtttctccacttctgtgatttgcgttgaaatttatcgttgctcttttgttttatgttaaatact

SEQ ID NO: 39569 - DNA, 1721 bp, DROSOPHILA
ccgcatgacgcacttaatcagtgcaaaaaaaaaaaaaaaaaatactacacgacgaacgagaacgggaggaggaaaagatgtgtgtggcctcccggggatgtgtgaaattttcatgcctccgttccactttggcttcaagccagggcacgtggagagcaggcctcaacccttggcccaaactgggttaataaacgcacccacacaccgacacttgcatgcacagtggaacactcagttctgactatcagaaaagaataaataaaataaataaaaaacaaagcacaccaggctaagtacttaagcgagaaattcgagcgaagtcgaaagataactagccggttaacaaataaatcagaaatcaagcgaaagacccaaaaaagcatgccacagtcagagggcggctatgtatcgctgccggccgtcaatggcaatggcggcgccatctatcagtcgaccacagagcccacggccccgccctccgtttttgcgagcgtgaagcgggccattggccaggccatcaagtcctcgcccaccgacagcgaggagctgctccggtcggaccgcctgccggtcatcgtcggcggctccagagaccgcgacaaatccggtaagacactgaccaccaagatgccgtcagctccaacacacactgccgaggaggcacatctgctgggcaccatgcccgttgatcccatggatgacatcgaactgcgctccgtgcagctgcaattccccaatgcccgcggctccatcctggaggcctgcgaacagcgacgcgtgcccacagacaagggcgatgtccacgtggccatacagggcgatacggccaagccggccattatcacctaccacgatttgggcctcaactacgccaccagctttgctggcttcttcaattttccagtgatgcgaggtctgctggagaacttctgtgtttaccacgtgactgctcctggccaggaggagggtgcacccactttgccagaggattacgtctatccgaccatggatgatctggccgcccagctgcttttcgtgctatcccactttggcctaaagtcggtgattggtttcggcgttggtgccggggcgaatattctggcccgtttcgctcacgcccatccggacaaggtgggcgccctgtgcctgatcaattgcgtgtccacgcagtcgggctggatcgagtggggctaccagagcttcaatgcccgcttcttgcgcaccaagggcatgacacagggcgtgatcgattatctgatgtggcaccacttcggacgcaatccggaggagcgcaatcacgacctggtgcagatgtacaagcagcacttcgagcgtggcgttaatccgaccaatcttgccatgctgatcaacgcgtacatccatcgtaacgacctgcatctggcacgcactccgccaggtactccgggcagcgaaacggcggccaccacgctgaagatgccggtgatcaatatcacaggttcgctctcgccgcacgtcgacgacacggtgaccttcaatggccgtctagatcctacaaactcatcgtggatgaagatttccgattgcgctttggtgctggaggagcagccggctaagctggccgaggccttccggctcttcttgcagggcgagggctacgtgtccgagaaacctcagtaggaagatctgccggagcaaccaagcagtaatatacccaacaaattgcaaacaaaaaaaaaaaa

SEQ ID NO: 39570 - protein, 425 aa, DROSOPHILA
MPQSEGGYVSLPAVNGNGGAIYQSTTEPTAPPSVFASVKRAIGQAIKSSPTDSEELLRSDRLPVIVGGSRDRDKSGKTLTTKMPSAPTHTAEEAHLLGTMPVDPMDDIELRSVQLQFPNARGSILEACEQRRVPTDKGDVHVAIQGDTAKPAIITYHDLGLNYATSFAGFFNFPVMRGLLENFCVYHVTAPGQEEGAPTLPEDYVYPTMDDLAAQLLFVLSHFGLKSVIGFGVGAGANILARFAHAHPDKVGALCLINCVSTQSGWIEWGYQSFNARFLRTKGMTQGVIDYLMWHHFGRNPEERNHDLVQMYKQHFERGVNPTNLAMLINAYIHRNDLHLARTPPGTPGSETAATTLKMPVINITGSLSPHVDDTVTFNGRLDPTNSSWMKISDCALVLEEQPAKLAEAFRLFLQGEGYVSEKPQ

SEQ ID NO: 39571 - DNA, 2540 bp, DROSOPHILA
cttaaatgtacgagagcaataagtttaaacacactatacaaatatacatacatgacaacgctattatatacaaattacattacactaaccatactcaagtcgagaaaaacgataaacgaaacgaaaattgaaaagtgtaagcttttgttgtatatttgagaattctaaataaacgaacgaacaacgtgaatttcgaactgtaacggtgcggccagagtgatatactcctccgagatatgaatatatctggtgttgatggtcctctggccactgggagtcgcgtctctttcccacagcagcagcatcgtcgtcacagcagccacatccaattcaatcccagcaaagggagctcatcgcatcgcatcgcatcgcatcgatccgctcatcgaccatcgcgaaatctcagcccagcttccttcccttcccctccatctcgtccatcaactagaacaacaacaacaacaaacaacaataataataaaatttattaattataacgataatagaacaacagcagcagcagattgtcgccgctttcatctcgaatcatgcaaaatgcacaccatacacattacattcagatacagatacagatacacttgcagctgcgattaaaataaggatagaggtaaattatttagattcatgtgttgtaagctgtttttatagcttcagctaactaaagatagtttcaagtgaacttagccttattaaacaatataaagactgaattaaacgatgtaaattgtaaccataatcaatgatgagattattgaatactacatagttatctttacaatggacataaagccttaacttccattcgaattttaagagttaagagagtcaagcaaatctaagaattttatttattttaatcgcagccttttgcaaacgtacagacatcaccacacgtacatacatttcaaaaacagcaggcaagccttttagaaagtgtataaagaaaaacacccatcaagaacaagaaccaacaacttacatgttatcaagtgacataacgtaaataacaaaagccaaactactactaccttccccccaaaacaacaacaactccacttataaaactgcaacagcaacgccgctgtccacgccagcgagttcgccctgtggaactaaataccacacctactcctccatcttctttgccaacttccgggagcagcagcagcaggcgatggaggagcgcgatcgtgagcgggaaagggagcgggatcgccagcggcagctgagccttcgcgttggcaatcgccttcgggagacggccatcaattgcaccagcagcaactccaacaccaccgccggccagggggacaataataatgcggatggtcgcagcgtcgacggggacgaccaggatctggagaacggaaacggatgtgccggcggcaacggaacaggaaccggtaatggcaaccgagcctacgtgaccacggacacatcgggcacgctttactacggcacccagagcaacaagatacgcatcacagagaacccactgcccgagccggtcagctcttagattgttactgcagagtccacataatctccaaaagacaccttgttattgttgttaccacacactgagaaaaaataatgcagcagcagcagccaagtcaagccaagctttcagccgtgctccaagagacacaaagccacagaaactcaaagaataaaaaatattatgaaatacaagcaactcacacaccgctaggaaatgaatgcgaatgcaataattaaccaccaaatgagaacccattgattgattgattgattgattggttgattgattgattgtgtttccctatggttttcgagatgcggagagatatttgtaatttacactttgtgcctgagcgtaacgtaacgaacatacacgtatatatatcaagccagatcggttcagatcagcaacagcagtttagttttctatgcccaattgattacattgtttttttttttggagtgcaacacatattttatgacgagcttgcttagttgttgtaaaccgaacaatatacaaaatatatacatatgtgtatacagatgacacaagcagaacaaaaactaaaaactaacgagcattttcgcttaatgttaaaacctaaaacgaatccaactgttaacttaatcccaaaaaataacaatgtagcatatcaaataaaaaacgaaaaatctctcaaaattacgtatatacttatacaaaaccctagataaatcgtagacaattgcgaattgcgagtaacttcaaaccaacattctgttcacaatgaatgaggaataaattctagacacaggacactgtcacaaaaacaggatacacacacacacacgatattgaatatagaatacatacatataatatatataaataatgacaactttttgcaataacttcgaattcaattcaataaaagttttagaagcttgagttctatgtttccattacttcggttgcagcatttcgctgatcctgcgcagggtctcctctcgatctcgatgcatcagttccgatacttgtt

SEQ ID NO: 39572 - DNA, 456 bp, DROSOPHILA
atgttatcaacaacgccgctgtccacgccagcgagttcgccctgtggaactaaataccacacctactcctccatcttctttgccaacttccgggagcagcagcagcaggcgatggaggagcgcgatcgtgagcgggaaagggagcgggatcgccagcggcagctgagccttcgcgttggcaatcgccttcgggagacggccatcaattgcaccagcagcaactccaacaccaccgccggccagggggacaataataatgcggatggtcgcagcgtcgacggggacgaccaggatctggagaacggaaacggatgtgccggcggcaacggaacaggaaccggtaatggcaaccgagcctacgtgaccacggacacatcgggcacgctttactacggcacccagagcaacaagatacgcatcacagagaacccactgcccgagccggtcagctcttag

SEQ ID NO: 39573 - protein, 151 aa, DROSOPHILA
MLSTTPLSTPASSPCGTKYHTYSSIFFANFREQQQQAMEERDRERERERDRQRQLSLRVGNRLRETAINCTSSNSNTTAGQGDNNNADGRSVDGDDQDLENGNGCAGGNGTGTGNGNRAYVTTDTSGTLYYGTQSNKIRITENPLPEPVSS

SEQ ID NO: 39574 - DNA, 3146 bp, DROSOPHILA
agttttttaatatccgtttcagaatttttactatctatgggaactacatggacttcatcgatgggcagtggtggcaacggtgggttgtcggaggaagctgattgcactacctccggcatatcaacaactttatcctcaacggtttgttttaatttgtctggattttggacatccagtttctttaacaataggttcttttcactgtcaatggattctttggccaaatgttttggtagctcgccgacgacagctggcacttggccatcgggatacagaggggtgcctatggcaaccatatcaaactccgggccggagctcttttcatcaattgcacttaggttcgcatacgttcccaggatcatcaatagaaatccacttacgaatacaaactgggcaagcgtacgttccatagattcctttttgatgatttttcgaaaactggatgcggggaacattatacaaatggctacgccaatggtggaacccaccaagccaattataagctccacggagggaataaccaaagccacgcataacgaaaagacaacgatgaagatagtgatgaatcgaaagcgttgttcaggtatgtagctactgctttccgtatgaccctatacaaaatagatatttagtgtctacaccatccaactgaagttacaaaaatacctttctgtatagcagcgaatagagactggctctgcagggaaagattaccaatgggaaactaaaagcaattgacagcacaaagccaattttaatgatatcgctaccaaaggaggtcgataagttcaccagaatgttgcctataaatacaaagccaaatatgtagaacagagaatgcctcaaaaaggtggctggcttacccgaaaaggtgtgcgtacaaaacgccacatatccgaaaaaaccaacagatatgtaaacaaaagtacaaatccaagtggcattgcggacgatgccgtttaatttgtcgagactctggttgttaatgctctcaaagacctcaaatagttgcctgtaaatagatcagatatataaataaattttgcggacatagaaagcagggtgtacacacatttggcaggagagagccatgctgaagatgggtaggcattggagtacgcccgccggttcccagtagagcaccttttccgtccagtcgttggccgtaatgtgtggctgggcctccaacacgatcttgagaattaggcagacatagaaacctatggacgcggtgcaaacggcggacaagctgtccacattgcggagcatgccgaggggcactatgcacaccacagtgactacgaccatgacctggtagataagagttagtttctcttcttggatagaatagcactttcttaccagactccgcagatgcaggtgatctgccacgtccagcgcgaaaatcttggcgattatctgcggacccagatcgcccacgaccacaaaatacgtgatgcacgttccaatcaggtagccaatgatgcacagctccaccagcagcttgccggaagtaccgaaagcatggagaccgagcatctcgaagctcctcctacgtgtcagcagcgaggttttaataagatagtggcagcaaacccgggttattccattgcttagcacaagaagaacgatggataacaggatgccgcacttctggaagcagaacggcatggccaagatgccgacgcctatgatgctgttggccaacgtcattacatgcgcggagtgggccaacatcttgccgggaattcagcctactttctcttttatcccgagtttcgagaactgcgatccgttttcacgtgggcgtttcgccgcgtatgcaataccgtcacaagctgcgtcgaactgataccaaccttctgtctgatacggcgaacagcagtacggcgcaaaatactacttgttactccaaaatgaagcgctatcgacgattgcacttgtgtaagcaaaattgtaaacaaaataatccggcgacgacgacgacggcggcggcggtgaaaaagacgttggcgcttacatttagtgggcggttgtggttcagcaaacatttgttccaattacgtgtacgtgcgttgcgctgccaggctgcttgcgcatttttacggccgcaagaaagtttttaagcaaattgtttgtgtcgtcaccattccgtcaccgatgtttgacagcgtgaccagcttgcgttatttggatttggtgaaccgcgaaagtcatgagcctgtggggacttcgaaatggtcacaccgatttttggcatttcaatgcaatccaacagtcgcactaattttgtactcgaaattcaacacgagcaaacgtgctcgcggacagttgaaaaatttattaaatctaataaatgtgcaattttgcagaccatcgagtgcagcagattctccacgacgcattggcaccattttcaagcacggatgccctgcagagatggtgaaatcttgtgattaaaattctccccgtctgaggtaggaaatagtgaaaaaaaatgtctgccgcgccgaaaattgacaaagcgacgccgccatgtcgcaacctatagtcatctccctctcgcagcgtgctcccagcaccaccagtgttcatctatgtgtgtagtgcatatttcgagcgttaaaatctgttgaaaatttaaaaccattcaaacagtggaaaatattgtgcacacattataggtttttcacatttcccttgcggaaatcggaaaagcaagcgtatgtgtgccgaatggaaaaaaccaagacgcagggttgcatttttcttgatttcgaggggtgcattctgtgtgataagcgtttttttattctgtctttaaaatgattgtagacttttgtcccgtcatgtttgataatggatattacgcagcggtaaaattattatttaatgtctgttattgagtcaatgagttctgcggtttggccagggctgcagcatcggcacatgttcgaggctggccacgttttctttttcccgccatccgctgtcatttcaaaataacactgtgaactcacaccccttctatttttttttgcagatgtctcaaacatgaatgaaggtaattcagcaggaggggggcatgaagggctcagcccggcccctcctgctgtgccagaccgcgtaactccacattcaacgga

SEQ ID NO: 39575 - DNA, 988 bp, DROSOPHILA
tgacgacacaaacaatttgcttaaaaactttcttgcggccgtaaaaatgcgcaagcagcctggcagcgcaacgcacgtacacgtaattggaacaaatgtttgctgaaccacaaccgcccactaaatgtaagcgccaacgtctttttcaccgccgccgccgtcgtcgtcgtcgccggattattttgtttacaattttgcttacacaagtgcaatcgtcgatagcgcttcattttggagtaacaagtagtattttgcgccgtactgctgttcgccgtatcagacagaaggttggtatcagttcgacgcagcttgtgacggtattgcatacgcggcgaaacgcccacgtgaaaacggatcgcagttctcgaaactcgggataaaagagaaagtaggctgaattcccggcaagatgttggcccactccgcgcatgtaatgacgttggccaacagcatcataggcgtcggcatcttggccatgccgttctgcttccagaagtgcggcatcctgttatccatcgttcttcttgtgctaagcaatggaataacccgggtttgctgccactatcttattaaaacctcgctgctgacacgtaggaggagcttcgagatgctcggtctccatgctttcggtacttccggcaagctgctggtggagctgtgcatcattggctacctgattggaacgtgcatcacgtattttgtggtcgtgggcgatctgggtccgcagataatcgccaagattttcgcgctggacgtggcagatcacctgcatctgcggagtctggtcatggtcgtagtcactgtggtgtgcatagtgcccctcggcatgctccgcaatgtggacagcttgtccgccgtttgcaccgcgtccataggtttctatgtctgcctaattctcaagatcgtgttggaggcccagccacacattacggccaacgactggacggaaaaggtgctctactgggaaccggcgggcgcaactatttga

SEQ ID NO: 39576 - protein, 192 aa, DROSOPHILA
MLAHSAHVMTLANSIIGVGILAMPFCFQKCGILLSIVLLVLSNGITRVCCHYLIKTSLLTRRRSFEMLGLHAFGTSGKLLVELCIIGYLIGTCITYFVVVGDLGPQIIAKIFALDVADHLHLRSLVMVVVTVVCIVPLGMLRNVDSLSAVCTASIGFYVCLILKIVLEAQPHITANDWTEKVLYWEPAGATI

SEQ ID NO: 39577 - DNA, 5329 bp, DROSOPHILA
tttttttttgtttctttcttcatcttttgggtattcaaatatatcgtaaacttacagttccagccatacaagtagtatataaagagttattatggtacattacattaacattaaactttaaacttgattaatttgtagaatcgaaaaatggcaaagagctgactcctcctttccgccggttaggtgcataattagctggcgatagttgtataaatattaacacagtttgaataaaagttggttacgtttgcaatttgagataagcggaatttcgagttggttaagtagggatgagttctagggatgcgcgctgttctcgttcaagtttcaactaagcaaaaatactgttgtgcaattctcatagtagttgggtagttcctcatcctcgtcctttctagagcttaaattttaagcaaacattatcaagtactttcgctaggactgcgttaagttctaagtacacttagctaaagcttagcttaggtttagtcatactcgtagttatagttataattatagttatagtttttagatcagtttagtttagcgcagcgacgaaacacacatatagtagtacaaatacaaatacaaatacaaaacaggcacacaagcaacaacaggatctccggataaaactccattactaaagctaaaataaataaaacttaggctacacaaaaatggcgacagtatgagtttcgatgctatgtgtgtgtgtgtatgtgtgtctgaataccatatatgtacgcatatatatccggactatctatatctgcctactccagaggacgttcagcttaatactgtggcctggctgtcatgggagcgaattcaactaggttttccccacgctctcccgcacttttgggggcctctaaaagtatgctatggattgcggcccccactgcgagagtgtctgtgtgggaatgggcgtgctcatgaatgtaagtgtgtgcgagtagtaactaaatgggtaactaaggttaaacggacaactaacttagtggaggggcggcggcgtgcgatccggcgcacgcggatagaggaaactgctgggcacatgcttcaggatgaactccttctgcagctgatccttgtccagaccgttgtggccctgcctgtccagctggttgtggccacccggcttgtgccgccccttttggccctgtttgctccgctgctgctgctcctgctgcagctgcagtcgcagctggtggttcttctgtcgccgacccttcattcggctgaagctgggatcaccgtagaactggttgcccttgaagctggacaacgtggcattgcgacgccagcctgcggggcaattggtagcgctcctccagtccggcaactggactccgagtcgccggcactcgtgggcgtacgccgcaaagctgtcgcagtgacagtcgcccgatggacactcacacacgtccatccggcaggcggccttgtagttctccggattcagtcgctcgttgcactcgccgaagagcgcgggaacactcagtgggtggcagtagaagttcgatttgcgcttgtcgcaggtgggcgtggcagccaggaattcacgcttgcgggaacaggacttggggccacccaccttccaggaattggcaaagtgccagacctcgtcgtccccgtggctccgtccatccttccccgtgagatcgtcccgcgaactgccgttgaagttgccacatagaccacacagtcttttcttgaatttcgccggcaccgaaacctgcaggaagccagctccattccactccagggtcaagcccatttccgatctcagcatcaccgctcctccgttggccaagcgctcaatcgtcacgttctggccaccggctacaacgaagtagggcaacgttaccctggttccattcaccttgacccgcattcgctggccgagattgactttcaagtttcgcagacttagggtcaccgttttggcccagctggcacgccgtgtgccgcgtccctcgttcgtcagccggatgtggaaggttttgcccatacagtcggacgccaggaggtacttgcagctgccctggaagctgaagaacttgccatcgaaggtacggaagtgaggatctccgaagacggtgcacgtgcccgccgtctccacgcaccgttggcaacattctcccggcggctgtttcagctcctcgttcgctcggcacttgaccgccggacagcgcatctgggcacaccggatggttccaccattgcaccggcagctgcgacacggccccatgtcccacgtctcgttgttctggtacacaatcccatccaagctgcactcgctccgcacttcggccaccgcacagcgtggacagcagccatctggctcctggaattcgggagcgcactccaagatcgggcaggtgggtcgctggcacacggaggtgccgttcaggcaggtgcagttcgtacacctgtccggcataaactgcgtcttctccggataaacgcttttgttgaagaggcatttgcctggaaaaggaaaaatgaatatatatatttagtttatatattcatacaataagatttaagtaactttaatttctaaatatctaataatatctaaaatacttaatgagaattagtcaaaaaatatttatttttggtattctgtatacctgtgcatgtatatatctagtctttataaataatcccctaatatatcacgcttttttagaaattatttttggaatttattgctttgttaattgtatttttttaagtccctcagtttttcgtttaaattcgtaaaataaaaaataaaattcgtaaataaaatgatacactttaagagaaatataaaccaagctgttgaaatattaattattacctatgacaactcacctggaacaggtagaaaactgtggttctgcgggcagcgcggacagcactcatccggacgcttgatctgcttggacatgggacacggtagcaccgggcatgtcttcttggaacaggtcaactgcgtcccgcggcactggcagaccagacagcggtcgtcaatggaggcgtccacctcgtggccctcggccaccgtctgtccgttgatcttgcaacctgaaaacgacatggcaatcccatcagatattagatataagacactagacactagacattagacattagacatcagacattagccatcagacacttatgatttagttgggtttgatttgcttggccacgggccaagaaattttccacaaggcgaaacgggtttccaagcggcatctaacgcatttgcataggcagcgtcataggagggcccccagattcgttgtgttgcttttgtttgctcagccgcgatcgcaatgcgaatatgcggggcgacattgtcgccttaatagacaatttaaagcccataaataagcggaacaataaacaataaacaataacagccacgtcgcggagaacagatcaaaacagatcaacggatcgcagcagatcaccggagattttaatcgcggcagatggggcccatgaataaatcattttggtaatagagacataaatatgctggcactatctgcgatgatctactttgagttgggcaatgcctataggccatgttttccctctggcaattatgaatttcgaaacatattttatgctgcactggcaatacccgttggtagagcaacgcagcaacgtctgtccatctggacgggctctctattgtctaacgattatgaggcattagcggaatctttggctaattttagtgagtgatgctactggggacgacgcgaactggtctggatctaatcgagttggccacaagactcaccctgacaggtgggacagcattcgcccggtcgtggtggctgtaactggttgttgtcgcactgcgagtagcacttctggatcgtctcggtgaccacggtggccacgcacttgtacgtcttgcagggatcctccggatcgttccactccgagccactctcatacgacatgccacgaaaagagcaacctggggaatgatacaaacgtacttcttcaatagcttgctttttatcaaaactataatatggataaaaaaggataaatatatattgacttacccttgcacctgcggcagcaagttccattcgacttatccagaatgtaacagtcattgactggtggacaagtatctcggcaattcacgaatccgttctgtaaatataaaatgaagcacattgcattagtgttagaatagagttttttttatccgtgccacgggtcgtatgagcaatgtgcacaatgagcgctcagccaagtgaaagatgctggccagtgcacaactgtctccaccttcgccctcataaaacacacctccacctgatttacagcccagcaattgctttcgaaattgcaattgctcaatgaagttttgaactctgaccttcagcgcaattgactttgggcgtggcgattggcttggcttgtacttcattcggggttacttaatagctacagatgaatataagggatttcccttcggttttcatttactttgtagcccttggaatgaaaatggcattgctttgagtctggtctctgttagtcaagttggaaaatgagctgggattatgcaaagtcgcctaatttatgctgcagtaatttatccttaagaccaacagctgccccgcgccctctttgcagctcgttagttgatccctcggctgattgcctgcccacaggtaagcggcaccaaatcggctcagatatacatatatatttatatgcgcgtatctatgcatctggattttctagccatttggctgtgttaacgacatgctgacagctgcagcggggcgcattgcaattgatgtcgatcataagtcaaactgttgcaacttggccggcttgtgcaattgctattgcgattgccgttgctgttggtgttgcctttaactttaacccttgagtggaggcagtggaacagctgctggctgtgacaggttaaagccagattgagattccgattcagattcagatccagccggtgctgtaataatagagctcgagtcgaagccggagccgccactaattgtaaatgtatctataaatctagatagatgtcgaccaaaaacaggcaaaatatttcactaatttgtatgcagttgctctgaacaatgtgtggagtattcgcgtatctgtgtgtgtgtgtgtgtgtgtctataatttagtgcaagcaaaccagattggatctcaatttggatggggccgcaacgtgcaaaatttgcaattgttatgaaaatgaaaatctcgagagtctcggtcgcagtcgcggtccctggctgcgagatttttatcatcgtat

SEQ ID NO: 39578 - DNA, 1998 bp, DROSOPHILA
atgagggcgaagaacggattcgtgaattgccgagatacttgtccaccagtcaatgactgttacattctggataagtcgaatggaacttgctgccgcaggtgcaagggttgctcttttcgtggcatgtcgtatgagagtggctcggagtggaacgatccggaggatccctgcaagacgtacaagtgcgtggccaccgtggtcaccgagacgatccagaagtgctactcgcagtgcgacaacaaccagttacagccaccacgaccgggcgaatgctgtcccacctgtcagggttgcaagatcaacggacagacggtggccgagggccacgaggtggacgcctccattgacgaccgctgtctggtctgccagtgccgcgggacgcagttgacctgttccaagaagacatgcccggtgctaccgtgtcccatgtccaagcagatcaagcgtccggatgagtgctgtccgcgctgcccgcagaaccacagttttctacctgttccaggcaaatgcctcttcaacaaaagcgtttatccggagaagacgcagtttatgccggacaggtgtacgaactgcacctgcctgaacggcacctccgtgtgccagcgacccacctgcccgatcttggagtgcgctcccgaattccaggagccagatggctgctgtccacgctgtgcggtggccgaagtgcggagcgagtgcagcttggatgggattgtgtaccagaacaacgagacgtgggacatggggccgtgtcgcagctgccggtgcaatggtggaaccatccggtgtgcccagatgcgctgtccggcggtcaagtgccgagcgaacgaggagctgaaacagccgccgggagaatgttgccaacggtgcgtggagacggcgggcacgtgcaccgtcttcggagatcctcacttccgtaccttcgatggcaagttcttcagcttccagggcagctgcaagtacctcctggcgtccgactgtatgggcaaaaccttccacatccggctgacgaacgagggacgcggcacacggcgtgccagctgggccaaaacggtgaccctaagtctgcgaaacttgaaagtcaatctcggccagcgaatgcgggtcaaggtgaatggaaccagggtaacgttgccctacttcgttgtagccggtggccagaacgtgacgattgagcgcttggccaacggaggagcggtgatgctgagatcggaaatgggcttgaccctggagtggaatggagctggcttcctgcaggtttcggtgccggcgaaattcaagaaaagactgtgtggtctatgtggcaacttcaacggcagttcgcgggacgatctcacggggaaggatggacggagccacggggacgacgaggtctggcactttgccaattcctggaaggtgggtggccccaagtcctgttcccgcaagcgtgaattcctggctgccacgcccacctgcgacaagcgcaaatcgaacttctactgccacccactgagtgttcccgcgctcttcggcgagtgcaacgagcgactgaatccggagaactacaaggccgcctgccggatggacgtgtgtgagtgtccatcgggcgactgtcactgcgacagctttgcggcgtacgcccacgagtgccggcgactcggagtccagttgccggactggaggagcgctaccaattgccccgcaggctggcgtcgcaatgccacgttgtccagcttcaagggcaaccagttctacggtgatcccagcttcagccgaatgaagggtcggcgacagaagaaccaccagctgcgactgcagctgcagcaggagcagcagcagcggagcaaacagggccaaaaggggcggcacaagccgggtggccacaaccagctggacaggcagggccacaacggtctggacaaggatcagctgcagaaggagttcatcctgaagcatgtgcccagcagtttcctctatccgcgtgcgccggatcgcacgccgccgcccctccactaa

SEQ ID NO: 39579 - protein, 665 aa, DROSOPHILA
MRAKNGFVNCRDTCPPVNDCYILDKSNGTCCRRCKGCSFRGMSYESGSEWNDPEDPCKTYKCVATVVTETIQKCYSQCDNNQLQPPRPGECCPTCQGCKINGQTVAEGHEVDASIDDRCLVCQCRGTQLTCSKKTCPVLPCPMSKQIKRPDECCPRCPQNHSFLPVPGKCLFNKSVYPEKTQFMPDRCTNCTCLNGTSVCQRPTCPILECAPEFQEPDGCCPRCAVAEVRSECSLDGIVYQNNETWDMGPCRSCRCNGGTIRCAQMRCPAVKCRANEELKQPPGECCQRCVETAGTCTVFGDPHFRTFDGKFFSFQGSCKYLLASDCMGKTFHIRLTNEGRGTRRASWAKTVTLSLRNLKVNLGQRMRVKVNGTRVTLPYFVVAGGQNVTIERLANGGAVMLRSEMGLTLEWNGAGFLQVSVPAKFKKRLCGLCGNFNGSSRDDLTGKDGRSHGDDEVWHFANSWKVGGPKSCSRKREFLAATPTCDKRKSNFYCHPLSVPALFGECNERLNPENYKAACRMDVCECPSGDCHCDSFAAYAHECRRLGVQLPDWRSATNCPAGWRRNATLSSFKGNQFYGDPSFSRMKGRRQKNHQLRLQLQQEQQQRSKQGQKGRHKPGGHNQLDRQGHNGLDKDQLQKEFILKHVPSSFLYPRAPDRTPPPLH

SEQ ID NO: 39580 - DNA, 3017 bp, DROSOPHILA
aacattcgaatgaataagcgcaacaaacgaggcttttcacccagcccatcctaccgaaaatcccccctttttgaatagctctgtgcatatgcattcgcttggaaatgcgtgcaactgacagttgcatgcaacaaaatcaaaatcaaagtgcgtttctaggcatctaaataatttgccgcaccacacccactccgcctcttttaattgaatgaattgcaattcaattttggcttctgactttcgaattctttattttgcacccacctacattttgcgaacatcaaacgcaattaaagccagccgacgaatggcagtcaactcttcaagtcaaagcgtcttcaagagtcgagcgtcctgttccatcgtctggcggtcgtcctgtcagctgctttggctgtccgccgtagcccgccggccaacttcttgcctcaaatagccaacggcgctggcaaagaaccgccaacaattccaaagcagcagaagacaaatacggcgaaaagcgaaagaagcaacaacaactgcattttagttgcgtcataccaaatggccgccagtaaggtttacacttgcacaaaaaatctattaccaaaactgagcattgtattactattgctttttgcaaactattttaagcataagcttcaagagataagcaagtaaatatgaaataaaagcagcatttagaattattagttcatttcctattttacaagaaatggtaggaatacaaactttctgatttgatgcgtttaaactgattgacaattgttgaaagctctcacttatctcagccatttcacctatcaatttgcaacagtgtctatctgtttatgtacaacgacttatgtactaagtgcggaaccaagttgaaggagctgcggatgggaaccgcttttgctgcacgatgactgtacgaaaaagcgtcgctgcgtgaaaaagtgtcctgcggcggacagcgacgctggccgaggcagcgaggtccttgcgcttcgctgtgttaatgttgccgcaggacttagacgctttgatgagcggcaagggcaggaggtggggtgcggaaacggaaacagccggagatggaagctgaaggagcgccccgagcgatcgccaggatgggtcgtggagaagtgccgcagggcatgcgcctgcgcaactaacggtgcacgcaactgcaactgcaactagttgcaactattcgctttaattgcatattaatgcgaaaatgtgtgaaatgcgcccccagggaatcgacggcacagcagcccttgacactcaaatcgaatatatagaaacaccaacacaatccctgccaatacaaacattaggccagtttgatacagttttttacttttatttaatctctttttatcgatgatcgataaaaatgaaacgcatacacgctattccaaaaagtcagtaagtgacattcagtgaatgtagccctattttaactcatggtattattcttatttctcttagaaaagactttgacaaaagtttggttgacctgtacaaaccgaagaagtttgtggccgaatcgttagtagttacattacccaatattccattcatatcccatttttttttttactttagactgacttcgatttattcgaatcgcacctcagttgatccaaatggattcattcgcattgattccgccaggggcatcgaggatcgccacctgaaagcttccccagaattgcccagcctccaggagcgcagttcgcagtcgcagaacaagaatctctatgacctctccctcaaacttatggatcaggagacaaccggaacgttggattccgagtgtgcagatggaagcgggagtattcaatgtgaggagtctcaaccgattatagccataccgattggtcaggctaatgaagaggctgtcaatctaaagaagcaattgaaagttagggatcggacgaaggtaaaggacgccggacactacagaaaaagaactccctctttttctactatacagtgcacaaacaacagggtacttgcgaattaactcttagtttttttttttcatatttgaccaaattttcgcagatcaaaagaaagaaaaaggaaaatgctgaaaacgtcgtcggaccccttaagttaaaaacatttattaaggtgggataagctttgaaatacaacatgaacttttcagcattgcttaacccaacccatcagttaagacgcaggcttcccgaaagctatcaatacctctgtgccgaaccagtaatcgtacctttaaaaacgcctgaagccccatccttaacaaatcggccagccatcaaagtaaagaaagccaaagttaaacctcaactagtagaatccgaatcagatgtggaatcctttagatacaccgaaaacccaaagaaaacccttagggcactggttgaaagagcagctcggagtgctgggacccacaatccggatgttcttatcaaagaggtccagaaagttccaatggaaacttttgagaatataaatttgggaaaagaactgaaggtccgcgcttcgcagcagtttcaacttgcgctgaatttgattggtaagaatatcaatagttagttgaatcctttcaaaactatcgcttttcttcagatgatcactacttttatagtttgctaatttttatggccaccttggcgtacgtggtctatatcctgtgctacgatattaatagcaatctgaatgaagaaggccgctatctggaaaaaatgaaaacctctagactgccgatgaagggttactactatttgatgcgtctgctcagagcgcccatattctaatggattagcgaatttgaagatttaatcaaaacattgtccactttcataacaacagcgaactctattattcagttctatttcaatggtgaaatatttattgtaaaatatttataaatggatattttggctcttttttcgcttcccaacaaagtgttgaataggactcgcgctctaacgcctcttgcactctgccacgcccctcatttcccacctgaatcgcgtggt

SEQ ID NO: 39581 - DNA, 528 bp, DROSOPHILA
atgttgccgcaggacttagacgctttgatgagcggcaagggcaggagaaaagactttgacaaaagtttggttgacctgtacaaaccgaagaagtttgtggccgaatcactgacttcgatttattcgaatcgcacctcagttgatccaaatggattcattcgcattgattccgccaggggcatcgaggatcgccacctgaaagcttccccagaattgcccagcctccaggagcgcagttcgcagtcgcagaacaagaatctctatgacctctccctcaaacttatggatcaggagacaaccggaacgttggattccgagtgtgcagatggaagcgggagtattcaatgtgaggagtctcaaccgattatagccataccgattggtcaggctaatgaagaggctgtcaatctaaagaagcaattgaaagttagggatcggacgaaggtaaaggacgccggacactacagaaaaagaactccctctttttctactatacagtgcacaaacaacagggtacttgcgaattaa

SEQ ID NO: 39582 - protein, 175 aa, DROSOPHILA
MLPQDLDALMSGKGRRKDFDKSLVDLYKPKKFVAESLTSIYSNRTSVDPNGFIRIDSARGIEDRHLKASPELPSLQERSSQSQNKNLYDLSLKLMDQETTGTLDSECADGSGSIQCEESQPIIAIPIGQANEEAVNLKKQLKVRDRTKVKDAGHYRKRTPSFSTIQCTNNRVLAN

SEQ ID NO: 39583 - DNA, 2156 bp, DROSOPHILA
aatggattcattcgcattgattccgccaggggcatcgaggatcgccacctgaaagcttccccagaattgcccagcctccaggagcgcagttcgcagtcgcagaacaagaatctctatgacctctccctcaaacttatggatcaggagacaaccggaacgttggattccgagtgtgcagatggaagcgggagtattcaatgtgaggagtctcaaccgattatagccataccgattggtcaggctaatgaagaggctgtcaatctaaagaagcaattgaaagttagggatcggacgaaggtaaaggacgccggacactacagaaaaagaactccctctttttctactatacagtgcacaaacaacagggtacttgcgaattaactcttagtttttttttttcatatttgaccaaattttcgcagatcaaaagaaagaaaaaggaaaatgctgaaaacgtcgtcggaccccttaagttaaaaacatttattaaggtgggataagctttgaaatacaacatgaacttttcagcattgcttaacccaacccatcagttaagacgcaggcttcccgaaagctatcaatacctctgtgccgaaccagtaatcgtacctttaaaaacgcctgaagccccatccttaacaaatcggccagccatcaaagtaaagaaagccaaagttaaacctcaactagtagaatccgaatcagatgtggaatcctttagatacaccgaaaacccaaagaaaacccttagggcactggttgaaagagcagctcggagtgctgggacccacaatccggatgttcttatcaaagaggtccagaaagttccaatggaaacttttgagaatataaatttgggaaaagaactgaaggtccgcgcttcgcagcagtttcaacttgcgctgaatttgattggtaagaatatcaatagttagttgaatcctttcaaaactatcgcttttcttcagatgatcactacttttatagtttgctaatttttatggccaccttggcgtacgtggtctatatcctgtgctacgatattaatagcaatctgaatgaagaaggccgctatctggaaaaaatgaaaacctctagactgccgatgaagggttactactatttgatgcgtctgctcagagcgcccatattctaatggattagcgaatttgaagatttaatcaaaacattgtccactttcataacaacagcgaactctattattcagttctatttcaatggtgaaatatttattgtaaaatatttataaatggatattttggctcttttttcgcttcccaacaaagtgttgaataggactcgcgctctaacgcctcttgcactctgccacgcccctcatttcccacctgaatcgcgtggtgccaggctaacaaatgaaaaacaaatattaaactgtgttgttttgccaaaatagtaccaaaagcgcgcacacacacacacacacacagagtccgcggaaattgtaaagtgttaaaaataataaattatttctgttattctaagtggtattagaaaatgctcatgcataaatttaaattgccagcgcgtgttgcaaaaacattccgtcgctggcaaattgaaattccattgtacacaaaggaatggcaaagtggaaaaacagtagatgaccggccattctttatacacctgccgctccatccccaccctccgtacccctgacattcgataaatgttatagcccaaggccgactaatccgtggcattaacccctgggggccggagtcgccaactttggccggcatggcacaatttgtgtaatttgaaaatatttttgtgagcgactaaagacgctcgtaaatcacagatacttctcggcagcgaaccgcaaggcagcgaacatcgaacctgttcgaggcaccgaaatccacgcagtctaaagtggtagttgcaacaacaatcatttacaacgtaaacacaacacaacaatgcggactatctgtatctgcgaagcggacggggcgaagtgtatcttgcggatgcggatggccggcgggcgatttcctattctcagccatcctctttcactatctgaatatggaatctgcccgctgggctgacagcaaacgaaattcaactcgctcccagacaaaataaagcaaaaagtctgacctatc

SEQ ID NO: 39584 - DNA, 156 bp, DROSOPHILA
atggccaccttggcgtacgtggtctatatcctgtgctacgatattaatagcaatctgaatgaagaaggccgctatctggaaaaaatgaaaacctctagactgccgatgaagggttactactatttgatgcgtctgctcagagcgcccatattctaa

SEQ ID NO: 39585 - protein, 51 aa, DROSOPHILA
MATLAYVVYILCYDINSNLNEEGRYLEKMKTSRLPMKGYYYLMRLLRAPIF

SEQ ID NO: 39586 - DNA, 3554 bp, DROSOPHILA
ggcgtaacgtgattttactgcaatccgatctggtttggcacaaacatctagctatcatcttgctctgccagcgctcagttcttgtcggcggtgtttgtgtaattttcgaaaacaatttgtgtgaaatatgtgcgtggaaagtaaacaaacgccgaagaatcgaaatattacgcatacgcggtgtgctggctgtgccccagaaacaacaacaggtctgttttgggccagatgttaccttcgctcgatctaaacaacggcggctggaaagaaattgaaattcactggaatcgatcaatgaatgaaccgaacgcctgaccctgagcatccaaatggcaatgggagggggaagtgccttatttatgtttgcttaacttgccccattatttggccagcgcagtgttcaaacaaacagtgttttctcttggataaacgcacggcgagcacttcaactccagatcacctgatactgaatgaagggggttcagtttcaggccttgtcaatcccaatccgttcgcatcaagtgtaagttaacatcagaacgaaaaagcttcccccgaacgcttatcagtactcagttttgaattcgtttccgcagaaagctttcacccgagcgaaactaaatggttttggtctacggaatctgtttgctcgaaagcttttgccaagcaagttgccagataacttgcccccaactttgaatattccccataagcccctgattaactggaaagccgagttcttggtaaacatttagcaaacatcccgttggatgaatcatttacgatatggctatgatttattaaagttaattacttaatcatctagtttcagttgaactggcatttgaatgcatatgcgcacacagatatctttcattgtcagtctttttgtggggatcttacgacatctaatacttggccctttgccataaacagcaaatatcacagagtcggaatagtaaggccggatccagggatccaccgtcggcttatcggttgcttagtcagcggacttctgcagttcattgacgatgatcacatcgcaggtgactgcggctggcaatgggttggaagttgggggcggcgtacccgacggtggtgcacccaattcaccggccttgttgctgaacggtatcacaaacacgctcgtcttggccgcgtgctgcatcttgatcaccgtatcgtagctgggaggcgcaaattcgctgtaggatggcgagggcgtgggtggtgccctcagaccctcggtggattgacctccggcgggacgacgcctcatgtcgcggcatctgcgatccgaacaggccatcagcatgaagaaggcggccagggccaggaaagtggccacataccacacaatcgtgatcacatccattgccgtctgggacagatcgttgggcgactcgacgacagctgaaagtgttaggtattaattagttttgatcgtgactactatagggcttatatcgcagccaaagcatagacaaatctccccagtctaattgaaatataaggtccagactctatatggaaataactagaattgctagaatttcatcccagcagcaagttatcagttggtgctgttgtgcttctagtcacgaattgtgggtctgtgctataaactttatgacgaaactgctcgactgcaatacttgcgcgtcatcgaactacgctaatggcttaaatgagccccattgataggggctaaccctagtggcgggtatatagtaattagacgggaatcgttgttgattgccggtttcaagggtccactgaaattaagatattaccggtgggcgagcgttacaagggttacaaatgtttatggcagttgaaatggcctgttcaatcgatctcgtttattttcactttgtatggtactcaagtcaattctactaccaaagtaatcagtgacgttttgtagcaaatcttatcgatataaatcaatttaatttattctttaacattaataagactctaaaaataagtggctgagtggctgacagcctaagtgaaatagaaatgattgaacgatttactcaaagtatctttttctatctagcacaaaaatcttagtctgatgcctcatgcacatttagtattgcatccttcagatactcactgttcttgtagacaataatccgcgtgttgtttgagatggtgtcgggaaacaattccacctcggtggttccgttggcgtttgtcaagttgtagggcagtgggcgggcggactcgtggagaacgttctccacgctgaagagataggactggccgtctacgcagcacgagctggcgatgattactgaaaggaaacaaaacggccacgccgaaccaaaccaaaccgcaccgaaacgaatcgaatcgaattgaatcggaatgaggcggaagggaggggaacggagcgaagcagacaagctgtattagcgatattatggtatcaggaaatcaagacagagcggtgagctcactgatagcttatcatcgccactctggggcgtgcgaacgaatggatcttcctccaggtgggagtgatcaagtcaaacatcttcatcggcgactgataaggaatctaaatataaccagtgccagcagggtgttcccccccgtaaatggatcgctaaataatctcagccaatcgggcgactaggtttacggccaaagccacttaacgataaggccctcaatgacgacccggtgtctgaggcggcttttgggtatatctccagccctgatacgactggagaagatctctagtcactgcggctagtggggtaggtgttagttcgtccacaatggtcgggcattatcttcctggttgcggtttgcaaaatattttgacgcacccatcacaaacacaaacaccataaaagccagttaagctgccgccaataaaacatggctatctcatttaaagcccattcgatgagttggcaaccaagtttgcacacttctttggcggcggccatatttcaccatcgaaggtgcgttccctcttggatcgggatggatggctggagacgcacacggcacaccatctttattttgagaccaagtatctttacaacgcctgtcaattgcgtgtaattacctgattgcgcgcccatcacttcgctatcaatttcaccacctagctgatgaaatttcggtcgtacgaaatcgttgacctaagttggaaatgtgacgacgagtctcgatgagagcgacagctggtcaattccatgagaaatttttgtagcgccagtccagaggaaagttgcgcaactgactatgagataattcatacgccccgttgtctagccaaaaaaatgtaattgcttcatagatacgaaaggaaggtgaatgaattgcagtaccaactcatcgccacaaatcgcttgatcttcttttattagtaggaaactccgttctggaaaaaattagctgaatggaatcgttgtgctaatttctgacaacatttggattcatctagagtctagattctagaccaaatggtcatgtgaaagcacagatgtggaatctttctgctagtcgaaaacaaatattttccacgc

SEQ ID NO: 39587 - DNA, 627 bp, DROSOPHILA
atgaagatgtttgacttgatcactcccacctggaggaagatccattcctcgtgctgcgtagacggccagtcctatctcttcagcgtggagaacgttctccacgagtccgcccgcccactgccctacaacttgacaaacgccaacggaaccaccgaggtggaattgtttcccgacaccatctcaaacaacacgcggattattgtctacaagaacactgtcgtcgagtcgcccaacgatctgtcccagacggcaatggatgtgatcacgattgtgtggtatgtggccactttcctggccctggccgccttcttcatgctgatggcctgttcggatcgcagatgccgcgacatgaggcgtcgtcccgccggaggtcaatccaccgagggtctgagggcaccacccacgccctcgccatcctacagcgaatttgcgcctcccagctacgatacggtgatcaagatgcagcacgcggccaagacgagcgtgtttgtgataccgttcagcaacaaggccggtgaattgggtgcaccaccgtcgggtacgccgcccccaacttccaacccattgccagccgcagtcacctgcgatgtgatcatcgtcaatgaactgcagaagtccgctgactaa

SEQ ID NO: 39588 - protein, 208 aa, DROSOPHILA
MKMFDLITPTWRKIHSSCCVDGQSYLFSVENVLHESARPLPYNLTNANGTTEVELFPDTISNNTRIIVYKNTVVESPNDLSQTAMDVITIVWYVATFLALAAFFMLMACSDRRCRDMRRRPAGGQSTEGLRAPPTPSPSYSEFAPPSYDTVIKMQHAAKTSVFVIPFSNKAGELGAPPSGTPPPTSNPLPAAVTCDVIIVNELQKSAD

SEQ ID NO: 39589 - DNA, 2882 bp, DROSOPHILA
aaagccatcatcatcggatgcctggccgtgctggtgacactgggtgcggccctcgatgaacatcctcatttctgcattaagacagatcccctccttctgtcggagatcgatcgacatgtggtcatccccagcgaggaggacctacagtgccatattaaggccaccacgttgacccaaaacgagaaggtaaaattttgggcatatgggaatacccatttataagctaaagttttctggattttcttggggggtaagcaaacatactaaaagtggaattttagaacagtcaatttatggcaattcgttatggatacaactgctcttggaataaaagtatttcagttagtgcaattatttggcgactaaggcagattgcacgattccatatttgttaaaaatggcctcaatttgaaaaactccctacctttaatggcaaatggtgcgtcgccaaactagtttgccccatcgacatccttaagtgacaaatccaatgccagccaataaattattcgagtggctgatattccaaattgaattagcttgacgataaagtgacaaagtgtccatcgcagctgaagaagataatgccggcggacctgagataagccgaagacggtggttatatacgaacaaggtgtttgtttcagtcttttacttttatctcttcattttccaggcaaacctcgtggacaccctgtgcgcagatcatggctccaccacaatcaggcgagataaccatcacttttttaggctgcgcaacggagaactgactggaaggggagttcagacggaggtgtgcgccaacggaggtgattcggtcctggcctggattccctaccacaccgtgctcaagaactatgcggccgagctgaatcccaaggagcgactgacatacattgccaaggccacgaacgtggagcgggagaagacagagctctgtcacttccgacacacggatcttgtcaatgcggtgtccgacaatctgttcacctgtgtggtcatgatttttggcgataactttgtaagttcctcgggaagatggttcggttgatgtcctacaaatatgttatctttatagtatggtcttgaggataacattaacgtactggtggaactggaacctttggcataccagctgaggaacattacttacctgccgtggcgcaatgtgactaacagctacaagatgcacctgggtgacagtgtgctccgaaatcccagtggcgaacgtaagcccatttacggtagcctgaactacgattttgtggagaagatccttgtgaacatgtccagtgtgtaccagcataggaagctatccaggctgcctctgctcttcgagcaccggtcctctgttctcgagttggacttgtatggtatgggtggcctggatgttgcggaaaaagcctatttcggacgaagcatggaccccaggagcgaggtgaaggtgcaggtgattggtcaatgggtagaccagcatcgggagttcgacgccgacatatacgagtactatggccatgggctgagacgctataaggaaactctgaccggggcccggctcaccttcatccgaatagattatacggagccggttttcatggctccggagtctagcaacctggccaaggcctcgcttttccgagagccgaaggttggccagataagggaggatccatcgggcaactataccgagtgggagaacgcacaggaagaggattacgatgaggaaggtccaggattctactgctggtttgtgattacttgtctgcttttggccctcgctattatcctgggcatatacattgtagtaagcgctcacaacaggagaaccaagaagcgccacatgtacgaagtggccaacacgaatgtgcctccacccgcctaaaaattatggacattaagttaagttttctaaatcagaaaataacaccaggatcaacaggtgttttcagttcgaaatgtcagtttaaaaaacgagttggcagctcaattgctatgtcctcgaattaaaatttgtgtgttcgttttttgggttagatttattaaaaatttcggcttgaaaatgttaatgtgagtcaaaaaactgttgtgtgtttcattgaatatgtaaagaaatcccctggtatgaacggcaaggaatggctctaaaatcgagaaattaaagagacttgtgagctgaaggacccacatcaaaaacctaagttgtaaatagagaaaaggtaagtttcaatggaatttcatgccttaaacataagaagttttaagtattaaaaagaaatctagaaatctgaggaaataaacaaaatgatttccgaccggcatgcgttagggatttctgtctttataccacgttggcagcgccattcacaacacgcctatcatctcactcacactcgcacacagagaaagacagatagaggcagaagttcagttcatcaattcattcatctcatggaagaaccttattgataacgtcgccagagatagctagtgatttcattcgatcagggtcccgaaagacccactggtgtgcacttgttttggttttgaagttcgcatctctgggaacgtgtgtgtttcgccctgaaccacaaatatgtgagttccgaatgcgatttgtgtgacgcggccatatttaaagagttttttgtgttgaatgtggggcgagctgcgaaaattacataaatacagcgcaggtgagttcatttttgttgcgggaacccggtcgaaaggtgctctaagtgcgggtgcaagtgaatcgaaaacaatatttacccaattcaagtcgggaattatgtatttgtttcgttttttgggcctaaaaatcgcatttttcgctcacaccaacaccaagatggtaaattgtgtataacaatatggctgtc

SEQ ID NO: 39590 - DNA, 825 bp, DROSOPHILA
atgatttttggcgataacttttatggtcttgaggataacattaacgtactggtggaactggaacctttggcataccagctgaggaacattacttacctgccgtggcgcaatgtgactaacagctacaagatgcacctgggtgacagtgtgctccgaaatcccagtggcgaacgtaagcccatttacggtagcctgaactacgattttgtggagaagatccttgtgaacatgtccagtgtgtaccagcataggaagctatccaggctgcctctgctcttcgagcaccggtcctctgttctcgagttggacttgtatggtatgggtggcctggatgttgcggaaaaagcctatttcggacgaagcatggaccccaggagcgaggtgaaggtgcaggtgattggtcaatgggtagaccagcatcgggagttcgacgccgacatatacgagtactatggccatgggctgagacgctataaggaaactctgaccggggcccggctcaccttcatccgaatagattatacggagccggttttcatggctccggagtctagcaacctggccaaggcctcgcttttccgagagccgaaggttggccagataagggaggatccatcgggcaactataccgagtgggagaacgcacaggaagaggattacgatgaggaaggtccaggattctactgctggtttgtgattacttgtctgcttttggccctcgctattatcctgggcatatacattgtagtaagcgctcacaacaggagaaccaagaagcgccacatgtacgaagtggccaacacgaatgtgcctccacccgcctaa

SEQ ID NO: 39591 - protein, 274 aa, DROSOPHILA
MIFGDNFYGLEDNINVLVELEPLAYQLRNITYLPWRNVTNSYKMHLGDSVLRNPSGERKPIYGSLNYDFVEKILVNMSSVYQHRKLSRLPLLFEHRSSVLELDLYGMGGLDVAEKAYFGRSMDPRSEVKVQVIGQWVDQHREFDADIYEYYGHGLRRYKETLTGARLTFIRIDYTEPVFMAPESSNLAKASLFREPKVGQIREDPSGNYTEWENAQEEDYDEEGPGFYCWFVITCLLLALAIILGIYIVVSAHNRRTKKRHMYEVANTNVPPPA

SEQ ID NO: 39592 - DNA, 4985 bp, DROSOPHILA
taatcgtatgaagccttgttcggtgtgaaggcgttataacggcaaatcgtgtgtattatcagatatgacacggcgcagttacagcgcacacaaatggagaaattgtgcgagcccaggaaaaaaccccctcgatcacaacccataacccatcaaaactgttaccacctgcagccactatctagcacgcgtctaataccggtactaaagccccaccgaccaaaaaatcaccgatgccagatgttttatctttcattaagatcgaggcgttgctttgttgtgtttcatgttctggatcgaaataagtgaacgttatgtacttgttctgacagatactttaatacttttgatggggtgttaaaagcattaatattgcatatgtgtcagataacaagataatgcatttattattaatgtcaaatattttaaatagccaatgcagttaaaaatctaaattattttttatttaaattgtttataaaatgtataaatttagaaatgtataatcagctaattgattaaattagtattgtaatggtaggtccactccaaaatgaaatcgttgccattcacaccgatttttaaacaaacaacgtttataaacaaaatcatgtcatctctaatagttcgtaaagtaaatatataaaatagcaaataggtaaatgtgaaaatttgtgatctatttaacatctaaaatttgaagtcaaatttttagggacatagaaacagagtcaagcgacattatattaattaatgtagtcgttatttaaaagaaattaaatgaagtagatatatttagattttaagtacactcttaagaaccaccctaacatatgttactaaccattcacagtttgttataaacaaaaagaacccatctctattgacgtgagcttttattggtgcttatttcataagtaagcaaataaaaagcgctcccataacgaaatcatactttagtgtacaacaccaacgccaatcggtagtaggaatataaacaattatgaataacaactcgaatgttttgactattggcactgagagcactggagatttcgaaagcacaaaaacacgcaatgagtattctgtgtctgattttgagaagcacttacagaaaattttactgaatggcggcaagcctttgacaaatgtttgtgatgaaggatccgtcgaaagatttgcggcgaaagaaatcaagaagaacggatactactacgagttcggtccggctgataagataaatggctggatgataagcggacccacttttgactccaagggtattctgggacgattaaagaatgtgattggcaaggagcactggatatccaaaaacgttgctaagtatccgaaggattcgaggaacttcataatcaaaactgtttccaacgctttggatcaagaaagatcagatatttactcatatttgtgttatctaaatgaaaacactaagaggaggtgaagaggaggtggtttgtttgccattcaccgttgttcccattgtttataaacaaaatcaacccatcactaatttagagctttgaggaaacttgtacccgaaatgatttcattagtaaataaataaaacaacacaaacgggcattattaatactaaagcaggtgagctgaaagagtttcatgctaggatattccacttacgaagtatcttttagattcaaaaatgacgtcaacaacaaacgttttaagtattggaaatgaaaccgaggaactatattacaaggtacagaaaacaagcaaccctaaggcatattttgagttcgagtttgagaaccacatgcgaaaattactgctcaatggcgaaaaacccaaggatctggatgaaaagtccatcggaagatttgcagccactgagataacgagaaatggcaagcagtactatgagttcgttcctgacggatacaaaattggagtcatcatcagtggatgctcatttctgcccaaagacatggtcttccgcgtgaaaaagaagattgccaaagaacactgggttaacgaaaatgtaattcaatataaaaagaattcaatgcgccacatacagggtatcgtatccgaatgcttgcaggaagagtgcaatgatatctaccaatatctatgttatctgagacaaaatgatcccaacaagtaaaataaacatgtaatatataacttatagatttaaagtttcatataacatattgtaattagctttaagtgaggtcgaataactatctgccatttgaagaaaataactgactcaatttcaccataatttcaaaatatttgttattttttaccagatacatataaaaaataaaggtgactaatgctaagcttgtcatatttcaacaatccaactatcaattcatttgagtttcagtaaccgcatagattttgagaaagaaagttcgaattttttgtaaaatactaatagagtgtactaatactaatagaaaaggaagttcaagaaaaaagttcgagtacttctaaaacttgtcaaacacgtgtgcctaatatttccggaaaagtggagtcaagccaaagcgtttcctgtcttgaaaataaaattctatcggtttctgatctaccagtaaaaagcccaaaatcatttcctattataatgggtagaatactattgagatctaattgtccgccggaacccgtaataaaagtgaatctaaccgactttgagcagaatctgtgcttcttgtgcatggagaaaccatcgttgggaaagcgagtgtatcacatgttcgtcacaaatgaaatggatattgaaaaggactatctgaaagtgcgaaaaacctacgagaaaagaaaggacatcgtagtcgtggaccagctaacactgtacaccctttgtgcacgatccttgtaccacagagttcagaataagttaacagatgttaagtggaataagcagcgaaatgtttttgagatgaaaaagattggactaaaggacaatttgaacctttggaacaagttgtatgcgctggaaaacgcagagagggcaaagctatttaactatactaagttcctaagcgcaacgaatgaataaattgatatttgttttcatatcccttttactttaaatggtattattcgatttaaaaatttgtgacctgcatcagcaggtccaccctaatcaataaacatatggttgccattctctggaacactttcattatcaagctcaccactaatattgtgctttgcttgtgaacttttatgttgtgaaatagctgagtatttcgaatctttacaaaacaatccatctatttaactagtggcctctgaccaacacaactcagtattagcataaacattaaaagggacacattacaaaattctaaaaattataaccatggaatctgaagctcaagaacgtactgcacctgtatctgcaaacaaaagtgattcatcagcggcacctgtgctcaatatatccggaagggtcaagtcagaatggaatacaccccgtattaggggcaaaaagaagccgccggctgtcttggaagcacccaaagtgaatccgcacacatttccagcgatattaagcaggattctactgaagaccaatgctccgcctgcagctccaccgaagtttaatccagccgacggcacacagtacctttgcttcctgtgcctcgagaagccggagagtcgaaagcgcgtctatcacatgttcatcacgactgaaaaggagctgggaagcgactacgcgcacaccaggaagttgtacgagaatcgcaaggaattcatatacaccaataatatatccgtggaaacagtctgtgcacgagcactgtaccgtcgggttcaaaagaagttcacagatgtacagtggaacaagctgggcaacgttttcgagactgacatggtcggacgcagtgatgtctggggtatatctaatcgagtttacgctttgcgtatcgaggagcacgaaagactatttaattacattaagtttctgagctcaacgaagtgctaactaactacattcgattttaagtgccagtacgaattgtgatatcttgtgtttattttttatattaaatctctgctttgcggattgtttgattacagtaactttctgtagcttatcttaaattgtgtgaacccgtaatgactcaacagctgctccaaaatgtatccgttggtggcgaagaatacggctccttgcagtccaatccagtagaaggtgttccatgtgtggaactccagcaaataggccggcagcaaccacagcgcctgggcaagcagccagaggaacaggagaccgaagcaccttctccacgacagcatcttgaagttgttcaaacagagcggcagaatggccaagtaccaaatgaagtactgagaggttaccaccgagttataggtgacgatgacaaaggccacggcaaagatgcagaatggcagcgtctggcggaactgaccgaagctcaagcttaagtagaggatgagcaggaactgcggagccagcactagagtcttcaggatcgcagaaggttccgccacactcgacgcactgcccaggtactgtagaaggaactgcagcgagaagttgtgtcgcgggtccttgcgtacgaagtggtacaggtacgcttcatatatatattcccaaccgtacattgtgtagaaggtccaagtgaaggccactaggctgatcaatgttccacttatcaggcacagttgttgcttgttgggccgcaggatttggcacaggaagtcgaggggagtttgtgtcagccgcgttgatagcgataaatagtatgccaaactgaatagcaacggatacagacggaggtgtatcactagaccgtgagccaagcccgctccgaatataagccagtaactcctggtgacattgtgctcagattttaacagcaggtatatagttagtatcacgaagaagcttgagaagcaatcgccgcttccacgtgtggatattacagccgtcagcgggttgtataaccaaaagcaagcag

SEQ ID NO: 39593 - DNA, 1344 bp, DROSOPHILA
atgaataacaactcgaatgttttgactattggcactgagagcactggagatttcgaaagcacaaaaacacgcaatgagtattctgtgtctgattttgagaagcacttacagaaaattttactgaatggcggcaagcctttgacaaatgtttgtgatgaaggatccgtcgaaagatttgcggcgaaagaaatcaagaagaacggatactactacgagttcggtccggctgataagataaatggctggatgataagcggacccacttttgactccaagggtattctgggacgattaaagaatgtgattggcaaggagcactggatatccaaaaacttcgagtttgagaaccacatgcgaaaattactgctcaatggcgaaaaacccaaggatctggatgaaaagtccatcggaagatttgcagccactgagataacgagaaatggcaagcagtactatgagttcgttcctgacggatacaaaattggagtcatcatcagtggatgctcatttctgcccaaagacatggtcttccgcgtgaaaaagaagattgccaaagaacactggaatctgtgcttcttgtgcatggagaaaccatcgttgggaaagcgagtgtatcacatgttcgtcacaaatgaaatggatattgaaaaggactatctgaaagtgcgaaaaacctacgagaaaagaaaggacatcgtagtcgtggaccagctaacactgtacaccctttctcaagaacgtactgcacctgtatctgcaaacaaaagtgattcatcagcggcacctgtgctcaatatatccggaagggtcaagtcagaatggaatacaccccgtattaggggcaaaaagaagccgccggctgtcttggaagcacccaaagtgaatccgcacacatttccagcgatattaagcaggattctactgaagaccaatgctccgcctgcagctccaccgaagtttaatccagccgacggcacacagtacctttgcttcctgtgcctcgagaagccggagagtcgaaagcgcgtctatcacatgttcatcacgactgaaaaggagctgggaagcgactacgcgcacaccaggaagttgtacgagaatcgcaaggaattcatatacaccaataatatatccgtggaaacagtctgtgcacgagcactgtaccgtcgggttcaaaagaagttcacagatgtacagtggaacaagctgggcaacgttttcgagactgacatggtcggacgcagtgatgtctggggtatatctaatcgagtttacgctttgcgtatcgaggagcacgaaagactatttaattacattaagtttctgagctcaacgaagtgctaa

SEQ ID NO: 39594 - protein, 447 aa, DROSOPHILA
MNNNSNVLTIGTESTGDFESTKTRNEYSVSDFEKHLQKILLNGGKPLTNVCDEGSVERFAAKEIKKNGYYYEFGPADKINGWMISGPTFDSKGILGRLKNVIGKEHWISKNFEFENHMRKLLLNGEKPKDLDEKSIGRFAATEITRNGKQYYEFVPDGYKIGVIISGCSFLPKDMVFRVKKKIAKEHWNLCFLCMEKPSLGKRVYHMFVTNEMDIEKDYLKVRKTYEKRKDIVVVDQLTLYTLSQERTAPVSANKSDSSAAPVLNISGRVKSEWNTPRIRGKKKPPAVLEAPKVNPHTFPAILSRILLKTNAPPAAPPKFNPADGTQYLCFLCLEKPESRKRVYHMFITTEKELGSDYAHTRKLYENRKEFIYTNNISVETVCARALYRRVQKKFTDVQWNKLGNVFETDMVGRSDVWGISNRVYALRIEEHERLFNYIKFLSSTKC

SEQ ID NO: 39595 - DNA, 2492 bp, DROSOPHILA
agaggaacagtatccagattcagacacgccatatgatcttagcctgccatcgacgtcaatgcgctcgcaggcgaacggcacagctgcctacatgcgctccatgagtctgaacaacggagccggatcgggcggaggagccgcagccaccaagcggcagtttcagtcgcagcactccacccaggaaactcccaccaccagcaccaccctgcccgccaagctggcccgctccgggtccatgccggcctacacgccacggggcagaccgcccaatcacctcaagaaacagtcggtgcagctcgatactgccatacccgccccgatctgcaactacgaactcaacaagcccattgtcaagatcgactacagccacgtgcaaatgccgacggcgaacctgtgcacaccggacgcctctgattctgggtcaggatcgggcgccggatctggagcttttaacttcgacatagctgctccggtgatcaatatcgatctgacgaatatcgtggccggtggagcacctggcagtggtgtgccccccgcctctattggattaccagcggccacgccgggggacaacaataatgtgaaccaaatggctggaaagagcagcgctcccatcattccaaaggccacagcggcatcagcgacccccactgaaaccgttttcgaattagacgaagactatgacaatatttgattaggatctatgtgaatgcgcttttaaattattgatacattaatatgtactctaggtctaagaaatcacaataacattttttgcaaaataaagaccatgctggattttaagctgacgcaatgcggagtactttaaatagagaaagaaaatttatacattctagcagataatgctgtttaatttgcatacgatattaaatcagtttatctttgaattagatgtactaaacaagttcaacaattattgaaaatgtttgcattcatagacaccataaaaaagccgcctctgggcggccgaaagtcatttatgcccatcccagaggccaagttagttgacgatgtcgtcagctacatcgccaagccagagttctattcgactgttccagcggcattgaagatgcaacgccttttctatgtgcaatacagcgaactggctgccaagttggagactgacctcacagcagtgttaacccgtttggaggctgccaaaaataatttggaattggtgaggaggttcatagacaatcctgacaaggaagttcacagcctcgtgcaaatcgcacagggagtattcagatgggtgagcataccgccagtgcaaaaggttacccttcaagtgggcgcatctctgcaaatggaattcgagctgtccgaggcggaggagttcatcaaaaaggacatcaccagcctggtgaagcagcaattgcaacatgagcacgatatcgactatctgcaggatcaggtgaacacgattgagatgaacctagccgtattgtataaacatgaagtggagaactagaagcatcccaccatccttaaaattgctagtaccttgtagttgcttataaagacattcgttctaaataagtctttattgtctaaatgccttaatttccaacgaagtacagctctcccttggagttccccactaattcattcattacaattacattattagcagcccggtaaagaggtcagagtatcgggaccgtaggatcccagactgtgccctacaaaatgtgacctttattaccgagctcggctatttacaagcctatacacatcataataattatgacttaatttcgccagggagcaccgcttagtcattgtgtaatcctcggtcacagccaattacaattgaatgcctttcaatcccatgcccatgccttcgtccagctgttactccagccctccgcatattcgcacacgcaatctgccagccacaattgatattaatttgtgcccgatgtgggtcaacccatgatgtagactccattcccttccaaggataccaaattatatggcaaaaggacaaaactgaccagcagatgagccacatatcgcgtgggaaaatcttattgcaagcgaataaaattacccaaccgctcccagtgagcaaaggtgcagttttgaattatatgaattttcatccatgggcttggcacactagattagggtcagcactattcccgaattttgattagccaagcccaaagtcgagattagattgctgcgctctctcaaccagatcaagtgaatccgccaaagagtttgggctcggctaatcgaagccccttcaattgggggaatcagatctgcatctgcacacctgcactcgtggactccacgctgtccacctgtcttgagtcatggcgcaaaaaaaaaagaggttagaaacaataaaaacaacttgcggcgcgccgccagtgccaagttttcatgtccaaggcgtatttatgtcaaccggaagtaggtttactgacccacgtatacccgtgtggctggccaaacgtgga

SEQ ID NO: 39596 - DNA, 492 bp, DROSOPHILA
atgcccatcccagaggccaagttagttgacgatgtcgtcagctacatcgccaagccagagttctattcgactgttccagcggcattgaagatgcaacgccttttctatgtgcaatacagcgaactggctgccaagttggagactgacctcacagcagtgttaacccgtttggaggctgccaaaaataatttggaattggtgaggaggttcatagacaatcctgacaaggaagttcacagcctcgtgcaaatcgcacagggagtattcagatgggtgagcataccgccagtgcaaaaggttacccttcaagtgggcgcatctctgcaaatggaattcgagctgtccgaggcggaggagttcatcaaaaaggacatcaccagcctggtgaagcagcaattgcaacatgagcacgatatcgactatctgcaggatcaggtgaacacgattgagatgaacctagccgtattgtataaacatgaagtggagaactag

SEQ ID NO: 39597 - protein, 163 aa, DROSOPHILA
MPIPEAKLVDDVVSYIAKPEFYSTVPAALKMQRLFYVQYSELAAKLETDLTAVLTRLEAAKNNLELVRRFIDNPDKEVHSLVQIAQGVFRWVSIPPVQKVTLQVGASLQMEFELSEAEEFIKKDITSLVKQQLQHEHDIDYLQDQVNTIEMNLAVLYKHEVEN

SEQ ID NO: 39598 - DNA, 7150 bp, DROSOPHILA
cttcaagtgcagtcactaatgcggcaatttgcaacatgcaacgccggtgcagccagccaagccgaagccatccgcccaaaagcaaatccccatccccattccccccattcaagcctttgaggcctcctcatcaagttatgctctcgttagcgccaagacaagcgtttgggagttgggagtccgactcggattcgcatatagcagcaggtgcatggcataccataacgattccgatttcaaatcggtttggtttcggggcggctttatcagcgcctcgcacgcagctatttatagttgaatgtggagtgaaatggcattagaaaataaagccgtgcagtaataattactctactatttttgccacaaccagtgatggaagcggacgtatccgggcagttgtacctaattacttttttttaattgctgatgaatttaaattactttactcaagctattaaaaatttaggatatttgaaaaaagttacttggtatgaagacagaaattacttttattattatttttaaaaattcgcccaggtaaacatactcaatacccttttccatcactgcgaattggcaatgaaaccggcagcccttcagtttcgctctccggtttttgggactgcctactccgtgctccgtgctcctcgttccgttatccgttctccgccggtgaaggcgtcgcgtgtacgtctctctgacattgcaagagggccggaaggtctcgctggtcgtctgtctgtggaatcaaaagatgtgcgcacatgggtgttgtgagtgatttttaaatacattctgttgcttcgaataaacagctcctggcgtcattggttttgtggcacttaaactaaagcgaaggacgaacgcggagtgtcctgcgtggaaatcggcttccaactactgcaaccacgactgaatttcgcaaaaacgctgcaacaatggataggaaatcatagtgaatgcatgagggccgaagatcggttagcacccatgtcaagccatgcagcagaccctctcgtactcatcatcatcgccatccccatccccgatgcccatgccatcagcctcagccgcacagacgccgccaccgaacccgaatctgacaccgaatctgaacatacgtccaagtacgaacccaataccacgacccagatccactggaggcgagtccgcgttccagccggccatcatcccggttgattatagctatcgcacccataccacccgctccattctctccgcccaatcgatggcaccctccacgttcgcctccaatcagagctttgtgcgccagccctcggagtcggatgcccagccgtatagtagcctctttggggatccggttccaccgcctctgcagccggatgattacttcggaacagcagcatttgagacgttgcgaaatgggtctgtggaactgcccagctccgaggaggatgcgctggtggccgccatggcgctgaacgcacttattcctgcggccagggaacgcatctttccgagtgtcccgtactcgaggactccccgaggatccctactgccttatctccagccacccgacatccagattctgcccaactcgagcggtggctccagttcagagcaactgggctcacctaactatcggctcctggcccccgatgacattctgaacaagccggacgtttatgatttggagaacgaggtcgaggagtacaccgtagtcggtcagagaatgtctttcgatgatgaggaagatgagccgacgaggactcctagccaagcgcccgccaagttgagtgtgtccagcatcacgacggaggaccacagggggttggtatttgaatacaccaatatattatccaaactaatccttcgtgattacctcctcttagattactcagtgactcctattcgggaagggattggttccgtccggcgccacagcactttccagagttcacacgcatcccacgattgcggcccagctccaaaatgattatgtcgatgaagcaggatgaaggacctctctccccactggccaccatgatccaggacatgaacagctcgagcagcggcggagaggagcgagtggcacccaaccaaagcaggcccgttagcagggacgttgtactctcaccgaagcaatatctggaggaacagttgggtctggagagaggtagccagaggcagtcgctggaggactatagaatgccacctccaccggcagacccgccccctttccgtagaactgacttgacggagcaggatgacagccgcagtgtggagcctgaacatagcttaaagcgggaaatgtccccagttatcatcagggattcaatacctatgggcggagattataggtaaggttatcctgtggaaaatatccataaagataatacatatattcaagtttttctgtcccctctagagtggagcaacctcgtccacacaaaaagactgctttcacgatactttccacgggacaggcagcttcttctgctcctcggcctccacaacaagctcccaccagaggaagacacgcctccattcagtcgacatcgacgactacctcatcgccggccggcaggcctcagatcagtcctcgacggagatcgatctttggctcagagccgcgactgcctgagctgccctccgcgctgggttacaccagtcacctcgtccaccagaccacggatgactcgccacgcccatcggttcagttcaatatgagtggacgccacagtcgcagcaagctggccattccgcagaagggcattctccagcagcgggactcgctgacctcctccatcgacaccttcacgccaagagcccaaataagaaggggttccattggcagggatcccatccgcagcttgccctatggccaaaagatcaagagcatggaaacactgcccctgataaacgatcagcatcgcagctccattccccgcctgcactacggatccaccatggatctgagtaggccggaacctgctgtttttccgcccggagcactgccgcgaccactgaagccaaatctgaatcccacgcgaaggcaacgcggtctcctgaagatcattaacaaggaggagtcgctcacccacaacccgccgcgttccaactggtgcagtttggatgacctgagccgaccctccttcgatggcactcccaaccaggcaagacgtcgctccagctcgacctcaccggagcgtcgcagttccacgcaaacggtctcggatcgaagaagttccaacctgagcagcgtcaccgccaccacctcggatttcagtttccgccgaccaacgctctccacactgccagcagctcagacactgtccagaatgcgtcggaaatctgtgcaggctctaagtccgaataggatacccaacaggataccaagctttggacagcgaaggcagtccatctatcagagggatcaggagcccaagccgttgagcaggcacggaaagatcgccaagccgagcactctgtcacccataattggaaccccaaataaggacagcagttcggcacagagtccaaaccacagatcctcgctgatggccgatgcggtggataccccatccgaggtttccacgcgacgggactcggtgtcccgcataccggttcgcaaaagtccagactcacgctccagttcgccacccaaagactttggaatccctgcctctggacgaagctcgcgggctagcattactaggtccccttccagaaccatgaatgccggcagtcgatccccttccagatccatgcatcccagcagaacgtcctcgagggagagtggaagacctggagactcgaggtcggcatccaggggcccaccttctaggcctggttcccgattggatcagatcggttcccgaatggatcggcccaattcacgcttggaaagatccagctcacgcgctgagagatctagttcccgggcggataggcccagttcccgtttcgatgtgtccaactcgcggggaaactcacgtgcaaactcgcgactgagcatcaactcttcctcgctgcggtcgtccagcatttcacccgctaccatggccaggaacaggagcatgcgtgccacaacacccagtcgccgaaagtccatctccttgagtccagccagtgctatgatgggtcgccggaaatcaatcagtcccgatgccgttggtcaaaaccgaagagtttctagtcggggtaagcccgagcctccagagattctatctcgaaggaactcccgctcgcgcattcccaccagatcgactaaagttgcctccaaatccccgccgtcttcgtccaagaagagatcgaaatcgccggagaaacccaaagcgatgggatctacgcccaagagcaacaaagttggaaaaggggtaaccgctaaaggaagccccaaagcgaagccgaagatcgctgcaagtgccaaaccaaagaccaagacggaatccttgatgaaaccaccagtgaagaatgcaaacaaaactcctgtaaatggtagaccaaccacaaatgcaaaaaagccagccagcaaggcgatttccacaaaggatgcaaaagtggagaagggaaaggagactgggaagtctgtggcctccaagagcaatggtaaagaaaccgagtcttcagtaaaatccagtaaatcccaagtcacaaaaactaaaccacctgggggaacaacatcggaggccaagaaaccagccaccacaaaaacccatggcataactttagagaaagggacaaatggaaccgatcccgttggaggaattcctcctttggcggctcaggttggcaatgcagttctgcaggcggtggaagcggttcctgcggttaccagtgaggttaccgtgccctcaacgccaggaggtaaaggtgctggcggcgccaatatgtcgaaactggtgcgaatgagctccaggatgagcctgctgagcaacaagagcaccaaggtgcgatcagattctcctcaaaaccgaaaggtggccaccgtacaggaacatgctacagaaaaagaaggtgggtttttacaattgcttacaaggataaattagaccatctttcatctttcccttacagaaacagtgggagccagctcgcaacccatgtccaatgatgctgctgctattctggaaaagtcgcagaaaactctggagaacattcaaaagaccgtaactgaggccaccgacgagatccataagaccatcagcgaaaatctcaccgatctgaaaagtctggagaacgaccttgccgctgatccctcgccaacgcccagttcgggtaccacgatggccaggccgggtgaatccgcctcccggacgggcacagccgacggcagcattgctcctcagagttcgggggagctgcccaagtcaccgtttccacccacccaacccatcgaagcctctgtctcggttttgcatcccaatgaaagctccgccgagcgaatagccagcgtgcccgaggtggagtgcgaaagctctgatcttccaacggccctagacgcttccgaatccgagctggttggtaatgttatgcccacgcccgagagtggagcggacttcaaagtggacgccaagcggcgatcgccggacggacagggaggatccacggcgggaagcggcggtctggcaaagtgagtaaacagggagtgggaatctgaggaataggaaatctctgtgcatattccttaaaaccctttgcttagatggcttttagatatgccttttccatgggttacaatgttgttgattaatttacctaagcttcagttagatcttaaactccaacctaaatacttaaaacccattagataagtttatcaagatatatgcaattatatgcaatcttataccaagagcatgtgtccccctgagaacattgaagtaccaacctttgagtagcccttacatatatgagcaaaaaagtatgatataccttgctggaacccttgagtttgcttatcgttctatctttgtcaccaaaggactcgcacaacaaagaactactaaattccccatgttcgctatgaccattatgaatattcatcagtcaaagttccgtcgaatctcaccgttttccattcagctagaacatgaaacatttcgactagaacttgactagctagctatactaacattttgcctcggccctagggtcaccacataaagcaccatccaaggcttacagcgcttggccagccaatttacatacaggaaaccccggtggcgaggggttcgggccagccaacaactatgatacataaaactttacagtgccgtgcccgccgtgtgggcaggagttccgtgccctagacgctgctgctggcacaggtccgtcaagccactcataagtgcgtcaataaatttcaaagggagaaggcgcgcgcgatggagtgggttggccaagacccttggcccgggacccacacgatgggaccgcctttgaggaaatccgttcgtcggcaggtcgcgaagtcctcccaatcgccgtcgcagtcggcgaaggtaacgatgtccttcactgcattgttttccagccatgcgagacccacaagaaaaccctctggccgaacagttacagtggggatttccctggatcgaattcaatttgccccatcggacgatggtccactgttggccaggcaacactgtacggtatagcgtgcgcggaaaacaggagaaaagtattttcgcaacacggcttaagtttcttgccgcaataacaaatcagttcgggccggacaatcgcgccaaccgcagcaactcactcgctgggaaattccagttcggaaagttggaaaagtcctcgccagtcgatgattttcccagcaattaatacgaaataacaattcagttaatttttgccaattcgaaatgctgaacggaacgccgaataacggggtcatttacacggtggatctggcccaggatcccttcatcgatggcgacaagtacttctttaggtaattagccacgagattcaattataacttatcgctgcttgtcatctggcagcgggtaaataaacgcactgaccttctggcggcatttcgggcactccgattccgacttcaagaatgtgcggaaaacttgctccattcatttcgactgtctcgcagttttgtttgaatttcgaccggagcgggtcaaataaattcccgccctcc

SEQ ID NO: 39599 - DNA, 4440 bp, DROSOPHILA
atgcagcagaccctctcgtactcatcatcatcgccatccccatccccgatgcccatgccatcagcctcagccgcacagacgccgccaccgaacccgaatctgacaccgaatctgaacatacgtccaagtacgaacccaataccacgacccagatccactggaggcgagtccgcgttccagccggccatcatcccggttgattatagctatcgcacccataccacccgctccattctctccgcccaatcgatggcaccctccacgttcgcctccaatcagagctttgtgcgccagccctcggagtcggatgcccagccgtatagtagcctctttggggatccggttccaccgcctctgcagccggatgattacttcggaacagcagcatttgagacgttgcgaaatgggtctgtggaactgcccagctccgaggaggatgcgctggtggccgccatggcgctgaacgcacttattcctgcggccagggaacgcatctttccgagtgtcccgtactcgaggactccccgaggatccctactgccttatctccagccacccgacatccagattctgcccaactcgagcggtggctccagttcagagcaactgggctcacctaactatcggctcctggcccccgatgacattctgaacaagccggacgtttatgatttggagaacgaggtcgaggagtacaccgtagtcggtcagagaatgtctttcgatgatgaggaagatgagccgacgaggactcctagccaagcgcccgccaagttgagtgtgtccagcatcacgacggaggaccacaggggattactcagtgactcctattcgggaagggattggttccgtccggcgccacagcactttccagagttcacacgcatcccacgattgcggcccagctccaaaatgattatgtcgatgaagcaggatgaaggacctctctccccactggccaccatgatccaggacatgaacagctcgagcagcggcggagaggagcgagtggcacccaaccaaagcaggcccgttagcagggacgttgtactctcaccgaagcaatatctggaggaacagttgggtctggagagaggtagccagaggcagtcgctggaggactatagaatgccacctccaccggcagacccgccccctttccgtagaactgacttgacggagcaggatgacagccgcagtgtggagcctgaacatagcttaaagcgggaaatgtccccagttatcatcagggattcaatacctatgggcggagattatagagtggagcaacctcgtccacacaaaaagactgctttcacgatactttccacgggacaggcagcttcttctgctcctcggcctccacaacaagctcccaccagaggaagacacgcctccattcagtcgacatcgacgactacctcatcgccggccggcaggcctcagatcagtcctcgacggagatcgatctttggctcagagccgcgactgcctgagctgccctccgcgctgggttacaccagtcacctcgtccaccagaccacggatgactcgccacgcccatcggttcagttcaatatgagtggacgccacagtcgcagcaagctggccattccgcagaagggcattctccagcagcgggactcgctgacctcctccatcgacaccttcacgccaagagcccaaataagaaggggttccattggcagggatcccatccgcagcttgccctatggccaaaagatcaagagcatggaaacactgcccctgataaacgatcagcatcgcagctccattccccgcctgcactacggatccaccatggatctgagtaggccggaacctgctgtttttccgcccggagcactgccgcgaccactgaagccaaatctgaatcccacgcgaaggcaacgcggtctcctgaagatcattaacaaggaggagtcgctcacccacaacccgccgcgttccaactggtgcagtttggatgacctgagccgaccctccttcgatggcactcccaaccaggcaagacgtcgctccagctcgacctcaccggagcgtcgcagttccacgcaaacggtctcggatcgaagaagttccaacctgagcagcgtcaccgccaccacctcggatttcagtttccgccgaccaacgctctccacactgccagcagctcagacactgtccagaatgcgtcggaaatctgtgcaggctctaagtccgaataggatacccaacaggataccaagctttggacagcgaaggcagtccatctatcagagggatcaggagcccaagccgttgagcaggcacggaaagatcgccaagccgagcactctgtcacccataattggaaccccaaataaggacagcagttcggcacagagtccaaaccacagatcctcgctgatggccgatgcggtggataccccatccgaggtttccacgcgacgggactcggtgtcccgcataccggttcgcaaaagtccagactcacgctccagttcgccacccaaagactttggaatccctgcctctggacgaagctcgcgggctagcattactaggtccccttccagaaccatgaatgccggcagtcgatccccttccagatccatgcatcccagcagaacgtcctcgagggagagtggaagacctggagactcgaggtcggcatccaggggcccaccttctaggcctggttcccgattggatcagatcggttcccgaatggatcggcccaattcacgcttggaaagatccagctcacgcgctgagagatctagttcccgggcggataggcccagttcccgtttcgatgtgtccaactcgcggggaaactcacgtgcaaactcgcgactgagcatcaactcttcctcgctgcggtcgtccagcatttcacccgctaccatggccaggaacaggagcatgcgtgccacaacacccagtcgccgaaagtccatctccttgagtccagccagtgctatgatgggtcgccggaaatcaatcagtcccgatgccgttggtcaaaaccgaagagtttctagtcggggtaagcccgagcctccagagattctatctcgaaggaactcccgctcgcgcattcccaccagatcgactaaagttgcctccaaatccccgccgtcttcgtccaagaagagatcgaaatcgccggagaaacccaaagcgatgggatctacgcccaagagcaacaaagttggaaaaggggtaaccgctaaaggaagccccaaagcgaagccgaagatcgctgcaagtgccaaaccaaagaccaagacggaatccttgatgaaaccaccagtgaagaatgcaaacaaaactcctgtaaatggtagaccaaccacaaatgcaaaaaagccagccagcaaggcgatttccacaaaggatgcaaaagtggagaagggaaaggagactgggaagtctgtggcctccaagagcaatggtaaagaaaccgagtcttcagtaaaatccagtaaatcccaagtcacaaaaactaaaccacctgggggaacaacatcggaggccaagaaaccagccaccacaaaaacccatggcataactttagagaaagggacaaatggaaccgatcccgttggaggaattcctcctttggcggctcaggttggcaatgcagttctgcaggcggtggaagcggttcctgcggttaccagtgaggttaccgtgccctcaacgccaggaggtaaaggtgctggcggcgccaatatgtcgaaactggtgcgaatgagctccaggatgagcctgctgagcaacaagagcaccaaggtgcgatcagattctcctcaaaaccgaaaggtggccaccgtacaggaacatgctacagaaaaagaagaaacagtgggagccagctcgcaacccatgtccaatgatgctgctgctattctggaaaagtcgcagaaaactctggagaacattcaaaagaccgtaactgaggccaccgacgagatccataagaccatcagcgaaaatctcaccgatctgaaaagtctggagaacgaccttgccgctgatccctcgccaacgcccagttcgggtaccacgatggccaggccgggtgaatccgcctcccggacgggcacagccgacggcagcattgctcctcagagttcgggggagctgcccaagtcaccgtttccacccacccaacccatcgaagcctctgtctcggttttgcatcccaatgaaagctccgccgagcgaatagccagcgtgcccgaggtggagtgcgaaagctctgatcttccaacggccctagacgcttccgaatccgagctggttggtaatgttatgcccacgcccgagagtggagcggacttcaaagtggacgccaagcggcgatcgccggacggacagggaggatccacggcgggaagcggcggtctggcaaaggtcaccacataa

SEQ ID NO: 39600 - protein, 1479 aa, DROSOPHILA
MQQTLSYSSSSPSPSPMPMPSASAAQTPPPNPNLTPNLNIRPSTNPIPRPRSTGGESAFQPAIIPVDYSYRTHTTRSILSAQSMAPSTFASNQSFVRQPSESDAQPYSSLFGDPVPPPLQPDDYFGTAAFETLRNGSVELPSSEEDALVAAMALNALIPAARERIFPSVPYSRTPRGSLLPYLQPPDIQILPNSSGGSSSEQLGSPNYRLLAPDDILNKPDVYDLENEVEEYTVVGQRMSFDDEEDEPTRTPSQAPAKLSVSSITTEDHRGLLSDSYSGRDWFRPAPQHFPEFTRIPRLRPSSKMIMSMKQDEGPLSPLATMIQDMNSSSSGGEERVAPNQSRPVSRDVVLSPKQYLEEQLGLERGSQRQSLEDYRMPPPPADPPPFRRTDLTEQDDSRSVEPEHSLKREMSPVIIRDSIPMGGDYRVEQPRPHKKTAFTILSTGQAASSAPRPPQQAPTRGRHASIQSTSTTTSSPAGRPQISPRRRSIFGSEPRLPELPSALGYTSHLVHQTTDDSPRPSVQFNMSGRHSRSKLAIPQKGILQQRDSLTSSIDTFTPRAQIRRGSIGRDPIRSLPYGQKIKSMETLPLINDQHRSSIPRLHYGSTMDLSRPEPAVFPPGALPRPLKPNLNPTRRQRGLLKIINKEESLTHNPPRSNWCSLDDLSRPSFDGTPNQARRRSSSTSPERRSSTQTVSDRRSSNLSSVTATTSDFSFRRPTLSTLPAAQTLSRMRRKSVQALSPNRIPNRIPSFGQRRQSIYQRDQEPKPLSRHGKIAKPSTLSPIIGTPNKDSSSAQSPNHRSSLMADAVDTPSEVSTRRDSVSRIPVRKSPDSRSSSPPKDFGIPASGRSSRASITRSPSRTMNAGSRSPSRSMHPSRTSSRESGRPGDSRSASRGPPSRPGSRLDQIGSRMDRPNSRLERSSSRAERSSSRADRPSSRFDVSNSRGNSRANSRLSINSSSLRSSSISPATMARNRSMRATTPSRRKSISLSPASAMMGRRKSISPDAVGQNRRVSSRGKPEPPEILSRRNSRSRIPTRSTKVASKSPPSSSKKRSKSPEKPKAMGSTPKSNKVGKGVTAKGSPKAKPKIAASAKPKTKTESLMKPPVKNANKTPVNGRPTTNAKKPASKAISTKDAKVEKGKETGKSVASKSNGKETESSVKSSKSQVTKTKPPGGTTSEAKKPATTKTHGITLEKGTNGTDPVGGIPPLAAQVGNAVLQAVEAVPAVTSEVTVPSTPGGKGAGGANMSKLVRMSSRMSLLSNKSTKVRSDSPQNRKVATVQEHATEKEETVGASSQPMSNDAAAILEKSQKTLENIQKTVTEATDEIHKTISENLTDLKSLENDLAADPSPTPSSGTTMARPGESASRTGTADGSIAPQSSGELPKSPFPPTQPIEASVSVLHPNESSAERIASVPEVECESSDLPTALDASESELVGNVMPTPESGADFKVDAKRRSPDGQGGSTAGSGGLAKVTT

SEQ ID NO: 39601 - DNA, 2594 bp, DROSOPHILA
ataaatatgtataattttgccgttcgaatagtgtgctttaattagcgaccttcaaattgttgttgataacaattttcttaattaattaatcccaatcaaaagtaagaaattatctcaatcttaattgcactctgtatcttttcgagtttcccacagattaatgaggttgattgcaccctgagtttgcatctctcgaaattctttccggccattcgagtaaacagtgagtgtgagtgcaaaggtggcactcgtatttcggtaatgaattgttgctttgtataccaatgccaactgtcaactcgaaaaaaaaaatccccgggaattgatattcggcacctatagaaaagcaaaatatatttaattaatcagtacctgtatcggctagcgtcgggtgctttttccggtaacaatgaaaatgggtcagtgtccattgcatcagcatctcgatggtggtgattaattggtggttcttagaagttgtcaatggtacgacttgaccgcagatagtcgcgtacgcattatgctgaggaaagcacttatctgtgtagtttaccaagctccgaagaaaacgcaagttacgttgtctttgggggactttttgttcttttagcaagaaatgcaaagaaaaacgcagcaaacatatatatttagacatatagttgtattttttaatcagattattcattctcggaatgaagtttaggctttgttcacactgcgcttctgcgttacgactaaacatatacatacaatacatatatttccctaatcagtgggtgtgttttgtgaatagtaatggatttttagactagcgacgtggcgtttaatacttgacattgctgaatgtgcagggtgatgttaatattggtagcagtcgaaagacacattaagactaagtgactattttgcagtcaataggaacctttgcgttcggtggcaagagtttcgttacattaatccttaatctttggccaaagatgacttagagagctcaagattctcagatgctcacgttgatggcattcttgatcacaatgttcccggctccgtgccgtatcgttagattgctgtcgatctcaatgccgccggacttgccttggccagcatccgttggcgttggcttggcgtttttcgatcgagagctgggccttttcttggcatcgccgctaagatccagggacttgaccaccttgagcagtccattgcagcccgtgtagtcgaccacctgctgcgtggagctgctgcccaggtagatccttccgtcgttacccgtgtacttgagggctccgctattgttctggatcttgagtctggtgctattgccgattacttgcagttgcccggagttgttcacaatccgtatgcggttgccattgccgatgatcctgagatcgcgcgtgttgttctcaatgcggtactccttgcagttgcccaccagatccttgctggcgtagatggttgtctccggcggcgtggaacttttcttgctcttattgggggatttaccctgctcgtgctctttctggcaagtggagcactcgtcatcgtcatacgaatcgctcgccgaatcggtttctatcacacgaacgcccattttggtgtgaattaccgccggtatcgtttctttccgctgctaatcactcgtaaaaatcaccgtccagtctgtcggttagctcattctccaactctttttcctatctctatctccgtctctgtcgctgggggaagactccgaatgatgagcaatccggatggctaaggtcaaagatatccaattgtgtgtgttgtttttgtattcaattcagcgctgggggatcgtctgcttccgccaggggaactccctctgttttctgaacttttattgtgcgttgagtttggcgatctctggtatcgctttcgccgtgcttactgctcgctcgctcgctggcactttggctattgaacgctaatgccgctcgggaaccgcttttatatccgccggagagtctagcgccggggcttttttatttcgcccgagggccggcacgaaaatcacctcgtatgcatgagagtcgcgaacttaaaggcatctcgccatctggggagacctttgattgggtcgccgaatttattcggcatgagtaatgtccacctgttggtgccctcgcaatgggctcgtccatcgacttgagctagccaaatcttcagcatatagtaataaagtttaaatatatatttagttaacagcaccagtaaattcaaacattattactgtatcttatcgttttatagtttctcctaaaatgatgtgcttatagtcttatccctaatagtaatgggtgttattcgggtcttgacccatcaaagtggaatttatttacttacgcattgtaacttttcgctgtgtagactgttatcaacttatgcagtacagacccaactttgatggggatttttgttaacttctcttatcattaataagtccactgatatagttgctgatttccatttttgggagtcgtaaacgcggagtcaaaaacccaccaaccccaacctaaaggggtaataaccgacgataaccgatgataaagttttaagcactagaaattgataaa

SEQ ID NO: 39602 - DNA, 594 bp, DROSOPHILA
atgggcgttcgtgtgatagaaaccgattcggcgagcgattcgtatgacgatgacgagtgctccacttgccagaaagagcacgagcagggtaaatcccccaataagagcaagaaaagttccacgccgccggagacaaccatctacgccagcaaggatctggtgggcaactgcaaggagtaccgcattgagaacaacacgcgcgatctcaggatcatcggcaatggcaaccgcatacggattgtgaacaactccgggcaactgcaagtaatcggcaatagcaccagactcaagatccagaacaatagcggagccctcaagtacacgggtaacgacggaaggatctacctgggcagcagctccacgcagcaggtggtcgactacacgggctgcaatggactgctcaaggtggtcaagtccctggatcttagcggcgatgccaagaaaaggcccagctctcgatcgaaaaacgccaagccaacgccaacggatgctggccaaggcaagtccggcggcattgagatcgacagcaatctaacgatacggcacggagccgggaacattgtgatcaagaatgccatcaacgtgagcatctga

SEQ ID NO: 39603 - protein, 197 aa, DROSOPHILA
MGVRVIETDSASDSYDDDECSTCQKEHEQGKSPNKSKKSSTPPETTIYASKDLVGNCKEYRIENNTRDLRIIGNGNRIRIVNNSGQLQVIGNSTRLKIQNNSGALKYTGNDGRIYLGSSSTQQVVDYTGCNGLLKVVKSLDLSGDAKKRPSSRSKNAKPTPTDAGQGKSGGIEIDSNLTIRHGAGNIVIKNAINVSI

SEQ ID NO: 39604 - DNA, 4441 bp, DROSOPHILA
gaacattgaagtaccaacctttgagtagcccttacatatatgagcaaaaaagtatgatataccttgctggaacccttgagtttgcttatcgttctatctttgtcaccaaaggactcgcacaacaaagaactactaaattccccatgttcgctatgaccattatgaatattcatcagtcaaagttccgtcgaatctcaccgttttccattcagctagaacatgaaacatttcgactagaacttgactagctagctatactaacattttgcctcggccctagggtcaccacataaagcaccatccaaggcttacagcgcttggccagccaatttacatacaggaaaccccggtggcgaggggttcgggccagccaacaactatgatacataaaactttacagtgccgtgcccgccgtgtgggcaggagttccgtgccctagacgctgctgctggcacaggtccgtcaagccactcataagtgcgtcaataaatttcaaagggagaaggcgcgcgcgatggagtgggttggccaagacccttggcccgggacccacacgatgggaccgcctttgaggaaatccgttcgtcggcaggtcgcgaagtcctcccaatcgccgtcgcagtcggcgaaggtaacgatgtccttcactgcattgttttccagccatgcgagacccacaagaaaaccctctggccgaacagttacagtggggatttccctggatcgaattcaatttgccccatcggacgatggtccactgttggccaggcaacactgtacggtatagcgtgcgcggaaaacaggagaaaagtattttcgcaacacggcttaagtttcttgccgcaataacaaatcagttcgggccggacaatcgcgccaaccgcagcaactcactcgctgggaaattccagttcggaaagttggaaaagtcctcgccagtcgatgattttcccagcaattaatacgaaataacaattcagttaatttttgccaattcgaaatgctgaacggaacgccgaataacggggtcatttacacggtggatctggcccaggatcccttcatcgatggcgacaagtacttctttaggtaattagccacgagattcaattataacttatcgctgcttgtcatctggcagcgggtaaataaacgcactgaccttctggcggcatttcgggcactccgattccgacttcaagaatgtgcggaaaacttgctccattcatttcgactgtctcgcagttttgtttgaatttcgaccggagcgggtcaaataaattcccgccctccaaattgcgtttggtcgttggctcgtgcacaacggaattactggcctgcttgttcaggcacatatatatatatatatatatattatatacacgtgaacttcttcttgagctgcgggcatggacccatatagaaattgtgtaagcaaaactctcgtgacacattttgttgggctggcatactcgaaatcgacccgaaaacgaaacttcattatgcccggatgaaagttcaaaagcccagatttagcattacacgctactaactaactgctgcaactgcattattcataactttgagatactagataaacaacacatgcgccatccgtaggcccacgctaatggtaattcacttccgaaggtgattattatatttcacgccagcgaagtgcggaagtgattcaggactatcccacaaacttgaactttccaatcatatagcacttccgcccgcctggcacttggccaatcctcgtagccataaaagcctatatccggtcgcctgatagccaaggacaatgggtgggcaaattactttacaccaagtcataatcggacttaaagaaattgaaggactctctcgaatactttggtgctttaaaagcaagaaggtttatcaataatacacatttaaagtccgcgtagaaactaacacgacagtttccttaatttaagccttaattgtatttcccccttccctctcctttcctttcaatcaggagcagcagtcaggagttccttgaggacaaggataatgtcaagaagggcggtctgtgcggatgctgctccaagctgttcatgccctgccgccgatcccgctgctctcgttgctgccggcgccgtgagcgaaacgaatccgccgaggatcagcctgtcctgtggagcggcaacagtagtgccaccacggccaccaatgtccaagtgattgacgagaccaagccgaagcgcaagaagatatcggattggctaaagtccagctgctgccggagctgtcgcaagaaaccagccatcgaggagcacgaagcacatcaggaggaagtgtccaagcggacgaaccaggcggctaacatgagcacgggaccaaggacacgaggcaagtgcggcctctgtctgagcaaggtgttctgctgtcgatcggtgaacagggtggatcccaccaccggcgacgagacggagatgaaacagtgctgcttctgcataccatgtcgtcgaggcagtcgacccaacaagaagggcagcaccgtctcctggcgggatcaggaccccgagctgggcatcaagcccaccgagtcctcggtggtggaaggcgcctcggaggcagccatgtcagcggcaaccgatgcagggaatgaccaagttaaggagtcagtctagtttggaacgactttcgagcttagttgtactaatactccactacttgtaggggctgctgcaagcgcttctggctgatgttgctctgctgtcgcaagaggaagcgccgcgagtccaacgctaggagacagagcattagggcgccgccacccagtgaggcaagtgctccattagtttgtttatatcaaaatagatttgaagatcctttttctgtcatcaggatacgcggaagaagctacacgtggacctggtggagtactcgtccaagatgaagggagctattcccgtactgccgctgtatttagcctggttctgtgccttctgcaatgtggttttcccaggactaggtgggttgataagtggttatatccctgcatccctgcttatgccttatgatttcgtaaaccaggaaccctgctctccggactattttgcctctgcgtgggcattccgcgtttctcgcagttcgacagcgctcgtgcaaggatcggatcattcatcatcaacattatcgtggccgtatcgcagttcttctgcgtgctcttctgcttcgtgggatggggctggtccatttggtggggcaccataatgcttagatgtgcaagtaaggaaaaagtgtctcattttaaattgcagccactcattacccattcatgttgcacttacagagaaattgagcaaaatcaaaaaggtggagcgtttggagctggaggaggagcaacgccaggcgcaactggcggaggctgggaaaaacggcgtcgccgaggcggacaagacatagtcctccgatcccggttacaactaagttgctttttataccattgtgtacatacttttgtacaaaacatgtagattacacaagacatgcacttccacatgaacttccaggttaagcaaaacggaacggaacttcccttaaacatgagatacatacgtgtatatgtattaaaatcattaaacttccacttaaatatgtgttttatttattggactttatttgttgcgcagaaaaacaatttttgagattctataagatttcagaatgtttgagcaacccaagacgtaaggtaagtaaagtggttaaatacccagcaaaagtgaaatgcgagttattcgaactttaaaataaactagtttgtaaattcgaatattttcttcgcgtaacgggaattttgaaatggaattcaggaataccccttgcagattcccacacaatgtgaccgcattccgtttgtttgcatcggcaaatgcgagttcagcactgcggtcacaccgaatctttctttattaaaataaaaaacacgacgtcaacttgcgaatttcatacaaattagccgtagaaaatgtcgcacctcgtgaaaatggaaaacggccagagccagaccatccaggagatgctgggctgcatcgagcggtaagaactgcacaaattcactcagttatgatgcttagtaaaaacataacctcgcttttgccgcagctacaacccagatcatctgaaaacactggagtcctatgtgcaggatcaggctaagaacaacacctacgacctggaggccaacctggccgtgctgaaactgtaccagttcaacccgcacatgctgaacttcgacatcacgtacaccattctgctgaagtcactgaccagcctgccgcacacggatttcgtgatggccaagtgcctgctgctgccccagcagatgaaggacgagaatgtgcagacaatcatcgacctcgccgacatactggagcgggcggacttcaccctcttctggcagcgg

SEQ ID NO: 39605 - DNA, 1275 bp, DROSOPHILA
atgctgaacggaacgccgaataacggggtcatttacacggtggatctggcccaggatcccttcatcgatggcgacaagtacttctttaggagcagcagtcaggagttccttgaggacaaggataatgtcaagaagggcggtctgtgcggatgctgctccaagctgttcatgccctgccgccgatcccgctgctctcgttgctgccggcgccgtgagcgaaacgaatccgccgaggatcagcctgtcctgtggagcggcaacagtagtgccaccacggccaccaatgtccaagtgattgacgagaccaagccgaagcgcaagaagatatcggattggctaaagtccagctgctgccggagctgtcgcaagaaaccagccatcgaggagcacgaagcacatcaggaggaagtgtccaagcggacgaaccaggcggctaacatgagcacgggaccaaggacacgaggcaagtgcggcctctgtctgagcaaggtgttctgctgtcgatcggtgaacagggtggatcccaccaccggcgacgagacggagatgaaacagtgctgcttctgcataccatgtcgtcgaggcagtcgacccaacaagaagggcagcaccgtctcctggcgggatcaggaccccgagctgggcatcaagcccaccgagtcctcggtggtggaaggcgcctcggaggcagccatgtcagcggcaaccgatgcagggaatgaccaagttaaggagggctgctgcaagcgcttctggctgatgttgctctgctgtcgcaagaggaagcgccgcgagtccaacgctaggagacagagcattagggcgccgccacccagtgaggcaagtgctccattactacacgtggacctggtggagtactcgtccaagatgaagggagctattcccgtactgccgctgtatttagcctggttctgtgccttctgcaatgtggttttcccaggactaggaaccctgctctccggactattttgcctctgcgtgggcattccgcgtttctcgcagttcgacagcgctcgtgcaaggatcggatcattcatcatcaacattatcgtggccgtatcgcagttcttctgcgtgctcttctgcttcgtgggatggggctggtccatttggtggggcaccataatgcttagatgtgcaaagaaattgagcaaaatcaaaaaggtggagcgtttggagctggaggaggagcaacgccaggcgcaactggcggaggctgggaaaaacggcgtcgccgaggcggacaagacatag

SEQ ID NO: 39606 - protein, 424 aa, DROSOPHILA
MLNGTPNNGVIYTVDLAQDPFIDGDKYFFRSSSQEFLEDKDNVKKGGLCGCCSKLFMPCRRSRCSRCCRRRERNESAEDQPVLWSGNSSATTATNVQVIDETKPKRKKISDWLKSSCCRSCRKKPAIEEHEAHQEEVSKRTNQAANMSTGPRTRGKCGLCLSKVFCCRSVNRVDPTTGDETEMKQCCFCIPCRRGSRPNKKGSTVSWRDQDPELGIKPTESSVVEGASEAAMSAATDAGNDQVKEGCCKRFWLMLLCCRKRKRRESNARRQSIRAPPPSEASAPLLHVDLVEYSSKMKGAIPVLPLYLAWFCAFCNVVFPGLGTLLSGLFCLCVGIPRFSQFDSARARIGSFIINIIVAVSQFFCVLFCFVGWGWSIWWGTIMLRCAKKLSKIKKVERLELEEEQRQAQLAEAGKNGVAEADKT

SEQ ID NO: 39607 - DNA, 3205 bp, DROSOPHILA
acttaatgggctcgccgtgaatgaacggccctttatataggcgcctggatgaacacccacgcacaccagtgcacgcggcattatcgagagatcgccaaagagagagagagagagtgagcgagcgttatcacatctcacctcttttgtttatatttacactgggagcacttgcactttgtttttacctgtctttcgtgggcgcagcgggggcggtggatgccgaaaaggaacaacgaaaaactccaaaaagtgggggcaaatcaataggacaacaaacgggactcctactgtggtgctcttttccttctcagtgctgatgaatgtgaacgtgtccttcccctcccgcaggacacacggaaataattgtgcgctgtgttaaatgtcgtgtgctgattttacaaagttgtgcagtgaaaaacataaaaacgttaaacaagttccagtgcgtgcgcgtcgaatctgcgcagagatgaaaagcgggctgtcaaaaccagaatggaaaactgccagatgtacagtggcgcgcaaaagtattcgcactcgcacgcgattgtgcctgccgtcattggtgactattgaaactattctgtttcaatactctctccatggaagcttgaaattattattattattattatattataaaaattggtataagccatttttaacggtaaaaattggtagtgttgtgcagcatcaaaacttcgacaaaattccaaagatactcactcacacataacattaataatactcaaaattttcaaatttcaaaatcaatattctttattcgtagtaacaacgaataaacaatcttttcatagcttttcaattctttacatttaaaatatttcttaattcaagaattttggcttatcaagagtcaaaaacttttatacagttcattaatatctaaagtttggttattgcattgattgtaatttaacaattcgttggctttcgatgtaattaaaagtaccaaagagtcgagaaattaacaaatctatgcattgtccagcgcgatgaagtaggaaatatcctccggactgtcttcggtggtcaggtacacgatctcctcgtaaacgttttcttcggcagttgtatattctatcatttcaaagccgggatctatttgaaccacctcgtcgatctccactagattgatctcttccagtccgttttgcttatctatatcctgtatatcctccacaacatctggctcttccataacatccatatcaagctcctccacaaaatttctctcctctctgtgatcaatctcctccagctcattttccgcttccaagtattctactggctcaagagcttcagtttcctccagaccatcaaggtcagcttgaatcttggccagatgccttgccgatcgcatgtgccgaacgaagcagaatctcctggccgttctgtattcgcagggcttgcactccagggtgcacctgcactccttcttgtaggcgaggtattcgtcctcggtctccccagactccccagatagctccaccatctgttcctgctcctggggcagatactgtatgtattcattagcctccagctggctttgcacgacctcgatgttcgcctggctttttgcttgcatctcgaattgagattttcgagtggtgctgtagtcacacggcgtgcacgtggtcaggatgtcttccgtgtatcgtgttttctccgcatccgcgggcgctggctcctctactctttttatgcgttttaccgccggttccgccctctcggcctcgtccatcagcttctcgcactcctcctgctccttcattatgtggcgcctcgactccttgtgccggtcgaagcaataccgtttggcggtcttgtagccgcagacgttgcacgagaacagtgacgattccacctcagactcggagtcagagcaggactccagcagcatgtgcttttgcgaccgcctgtggcgcctcaagtctcttctccggtccgtggagtaagtgcagccgtttatgttgcaagtcagtcgctttatcttcaccgccttgacttgctcctcctttctgggcgcttgttttaggtgcaagtctgtaaaaagcgaaatcaatcgtagttcagccggcatttaggtattcattggtactcacattccatttcgtcctcgtagatgaaatctagagcctctatcgtcagtgtttccgttctctggcatgtctgcgacatatttccctcgtttggtctgcgttcttttaataataactaaacaaatcaacaattatttgatggtaccaacattatttagcttgaaaatgtagaatgcacgcgagaatttacgaatttgggaatttagtatttttcaggcggcatgttggatcttatttccgtgcaccttaggaattatgtttatttcattttaaaagtacccatcagtgttttcgtatgagtgaaaagttagtaatttttaattttaattttaaattagtaacaagacgacttgttaaattcgggacaagagtcaccctgtgatgaaccacttgttacatgcagatgcagccggtgacctcctctggtcacactgtccatttttaattttttgtaatagtagagttttttttataacattttatccgtcttttatgcaatatatttaattattattagtaagaggcaatcccacacaaacatgcaatcagtactcacccgctcgttatgcattggtaagacaaactgatgtgtggactttgagccccagccatttaaatgttttctataagcaagatcctaaaccagatattgatattcagcccgcagatctttaaatgctcgtcaaattgcctcattgtcggcgctttcggagacgcaccagatgctgcagaagtcctgccgggactttgccaacaatgagctcagtggaaacgcagccaagttcgatcgggagcacctgtatccagagaaacagatccgccagatgggcgaactgggcgtgatggcagtagcgattcccgaggagctgggtaattaatattacgcccacctcagccctccttatagtatctcattgtatctctttattgttaatcaggcggcactggactggattatgtggcctacgccattgccatggaggaaatctcaaggggctgtgcctctgctggcgtcatcatgtcggtgaacaactccctgtatctgggaccgcttctctctttcggaaacgatgcccaga

SEQ ID NO: 39608 - DNA, 1146 bp, DROSOPHILA
atgtcgcagacatgccagagaacggaaacactgacgatagaggctctagatttcatctacgaggacgaaatggaatacttgcacctaaaacaagcgcccagaaaggaggagcaagtcaaggcggtgaagataaagcgactgacttgcaacataaacggctgcacttactccacggaccggagaagagacttgaggcgccacaggcggtcgcaaaagcacatgctgctggagtcctgctctgactccgagtctgaggtggaatcgtcactgttctcgtgcaacgtctgcggctacaagaccgccaaacggtattgcttcgaccggcacaaggagtcgaggcgccacataatgaaggagcaggaggagtgcgagaagctgatggacgaggccgagagggcggaaccggcggtaaaacgcataaaaagagtagaggagccagcgcccgcggatgcggagaaaacacgatacacggaagacatcctgaccacgtgcacgccgtgtgactacagcaccactcgaaaatctcaattcgagatgcaagcaaaaagccaggcgaacatcgaggtcgtgcaaagccagctggaggctaatgaatacatacagtatctgccccaggagcaggaacagatggtggagctatctggggagtctggggagaccgaggacgaatacctcgcctacaagaaggagtgcaggtgcaccctggagtgcaagccctgcgaatacagaacggccaggagattctgcttcgttcggcacatgcgatcggcaaggcatctggccaagattcaagctgaccttgatggtctggaggaaactgaagctcttgagccagtagaatacttggaagcggaaaatgagctggaggagattgatcacagagaggagagaaattttgtggaggagcttgatatggatgttatggaagagccagatgttgtggaggatatacaggatatagataagcaaaacggactggaagagatcaatctagtggagatcgacgaggtggttcaaatagatcccggctttgaaatgatagaatatacaactgccgaagaaaacgtttacgaggagatcgtgtacctgaccaccgaagacagtccggaggatatttcctacttcatcgcgctggacaatgcatag

SEQ ID NO: 39609 - protein, 381 aa, DROSOPHILA
MSQTCQRTETLTIEALDFIYEDEMEYLHLKQAPRKEEQVKAVKIKRLTCNINGCTYSTDRRRDLRRHRRSQKHMLLESCSDSESEVESSLFSCNVCGYKTAKRYCFDRHKESRRHIMKEQEECEKLMDEAERAEPAVKRIKRVEEPAPADAEKTRYTEDILTTCTPCDYSTTRKSQFEMQAKSQANIEVVQSQLEANEYIQYLPQEQEQMVELSGESGETEDEYLAYKKECRCTLECKPCEYRTARRFCFVRHMRSARHLAKIQADLDGLEETEALEPVEYLEAENELEEIDHREERNFVEELDMDVMEEPDVVEDIQDIDKQNGLEEINLVEIDEVVQIDPGFEMIEYTTAEENVYEEIVYLTTEDSPEDISYFIALDNA

SEQ ID NO: 39610 - DNA, 2705 bp, DROSOPHILA
aatattgtattcttttatacttgctatataaaatggccatgcgtgtgccccatcgattataatgcaattaatcaatattttaaatattttacattacttctgttatgggaaatgctctatataatgtattaggcaattggctttgtgtgtagttcgttggctttgtttgatcaattttgctttttcgattttggtatcaatctccaattagttattgtctgaaataatgatgtcagctaacaaatctacatacgttcacttcaactggcgaaaacaatcggtgaaaagggaacgaaactaattgcatttcattgctcttaattcaattgttttgtttaactttattctgcagtatttacagtgatgtctagtagtaaaataaaataaatgcgttattggatcgaaaacattttccaagcactatgctcttagactaagtgtggatttggctttgcagagacttggcgtaacaataaacgaaaagctacgtattacaaattaattaattaatctaatttatggcggtgtagtagtgtgggtgcgttgtgaaggtgaaaagtgaattcgagtgggctcgcacctcacaatgtttgaaaagggaacttgcgtttaagaaataaacattttatgcaaagtatttacattttctaaaattttcggtgcgcgacttaagcaaggagtatagttatagtcatagattttatagttttgcttaggtttaggtttagagataatatacgctctgagattttgctcgtttgtcctttagttgtgttacgttcgattgaaacaagccaagtccgctagatgttttttgtctgcttaattaacattatgcttaatcgctagtttaaagtccttcggttgatttttatgctgatgcttctgcgtatcggtaaccttagtgaccacccccccatattccgcccttcccagctacatatttatgagttggtttgtcctacatctagttcctaatcggtaatatttggtttcgagttcaatgatccgtgctgagcccatcctccacgttgctgtcccagttgaattccgtgacgccctgcttgaagtagatgttgcccagattggcgtagcgctgctcaaagtttgtgtcctttgccttcagatgttcgaaactgaaaagaaaataatataataataaatattattaaaataaatgaatcttaacgtctgcgcaattgcaagtctttaaaaagtggtaagtgagcaacaaattattaagttgaaagtatcatttctagtcacttcaataaaatttttttctgcctattttttccttgcctaaattatatagctcagcgatccttgctaactactaatatgatccgtggaaatgcaaatacctttgaaaaaacataatgctggcacgcattgccccaggtaggcgaatatcttaatcaccatttgtctgaatgcataatctactttcttcagggatttacgctgcaacttgtggtggcaatacttccacccgacccaactttgtattatgacctaccaaagctgctcaatttacttctgcgcaaaagaatggtttcctatatgcaccccaccataaaaaaaaggaaccttcaattgttgatacagctgcccgaggtacagctgtatatagctatgtgcacaatgagtaaatccatgtcttgggccagttcttcagttaccttgcccggggcattgtgagcattgcagaaaatgtcaaaggtcataagcggccattatgcggcccaagacaaaagggtcgcttgggatgcaggcagctaaagatttttacggggaaggaaaaggagcggaaaaacaaagaaaggtgagggaaaaccccgtcaacaggcttaagtcacagttaatgaagcgagcttgcaactaccagtggttggtggtgcatgggcatttcccttcgttttcggccccttcttaaaagacggttgagttaagccacccttgaggaggaagcgcaggcgcagctgttccgattcgctcgaggaactaaggaactgcgcaactctggaaccgttcccatcgagtaaccatcggggataaggcggtgccaagggacacgtgtgcgtaatcagcgtcgcaagaatccatcggattgcatggcagcccacaccccttccttctcattcttcaacgaggagtttcagcatgagaaaattccaccacatcgaaatcaaaaacgagttgcacggggttggtatgaaaaacgtaaacaatttcctgattctttaggtacaggcttttttaaatgcatatacaagatataacgtattttaagaacgaagttcaaggtgatgatactgtacacttctacattttagatcagaataccttttatttcttttttttttttacagataatttgaccttatatgaataaattggctaataaatggaaaaaataattgatgcattctcattattttcgttacattcaaagatgagtctatttaatttaaatagctttaaagaaggtctcactttccaagacacctttttcagattttttatttgatttctcatgccttaaaatgcattgcatcaaaatgatattttttatgagattaggtaagtcccatatttccagaacacaaacgcgaaagatagaaaacaatcagatttggaatttagtcggagagtgctcgaaagagatttcagaaacacctctggctgtgttgtgtgcaacgtgt

SEQ ID NO: 39611 - DNA, 159 bp, DROSOPHILA
atgctcacaatgccccgggcaagtttcgaacatctgaaggcaaaggacacaaactttgagcagcgctacgccaatctgggcaacatctacttcaagcagggcgtcacggaattcaactgggacagcaacgtggaggatgggctcagcacggatcattga

SEQ ID NO: 39612 - protein, 52 aa, DROSOPHILA
MLTMPRASFEHLKAKDTNFEQRYANLGNIYFKQGVTEFNWDSNVEDGLSTDH

SEQ ID NO: 39613 - DNA, 6437 bp, DROSOPHILA
ccaaaaaaattctcaataaaaatgtagaaatcccacactcaattaaattgattaacgctgccataaaacgacgacaatgaaatgaagcggacaaacaaatctttgctaataaaacgcgtaagcaaaaaccaaaatgtattcacggagtaaactttttatggcccgaaagccgatgccaaagtttggcacgatctagctggtaacgacaagtgttgtgcagttttaatagagacataaaaacagtgatataaatacacgaatttcatatgctgttcattcccctgtaatttggtaagtaaactaagcccaaaaaaaaagggggacaaaacatatacataaatgcggaaaatgcgccgtaaaaacctaaaacaaaacattttcattgtggttgaggtgcgggtataaatttcggaaaacatttcggccaaacaaaacagaaaaagtcataaatagttttcatttcattagctgcgctttgtgaattgcaccaaaatccagacaaccactgcagcaattatgaaaactgaatatgcaagcgtatcgaaataataaacatcgccttttgtttattcaatcagataaagcaaagagtccaagtgaagtgcataaacaaatacacaccacctgtaattgaactttggaccttatttgaaatgtgcgtaaacaattgcagatcggacgtcacagcaatcacgaaattctccagccgcaatttatttaaaactcaaacatactcaaacaacttgaacgcggtatttaattaatggctttttatcaagactgaataaatattcagtgatttaaaatttgcataaattgaaataaataaaaccaaattagaaaaaaatatagcatttcaacgaggcagagcattaaatattccgagcaagagtcaacgatgttgtttatgttcaactggcagatagtgtttacacatttgtggctactttagaaatggaacaaacactgcgaagataactgtcaaataaagtttcctcttttactgaccaatattgtatgccacaggctgtaaattaaagctgaaatttaaaaatgtgtcagaaacaaagcaatgtaactattcaagtacttattaacctgtcaatgattgtttcttttagcagttttaataaatagacttcaattacattttttgctattaagttaaaacctttttactttgttttaagaactcataaacaataatttttttagatttaatatagtaaaatgcacctattgtatataccgaaaaaacggagctgtttgaaaacaaacccgccaaagcaatcaattctgttttcctttcaataccaaattaaatgcgattcagtttatcgaacagtagcaatttatattttttattatctgcctgtcatattattaaatcattttttcctcgcaagtaatgtaacattactggcttaatgatctgaaagaggactgttactgctacttaagttcagcaaagaaggacaattaaaaatagcttgtaatttatcaggccaagtagcaagagttaaagtattccgggaacaaagtactcccattgcgaccgagtaatttatattcaacttggcccattaaggttacaaatctgaaagaatcaccgaaatgggccgccctcgcatcccaaataatagaataatctgtctgttttccattggacacgcaacctcatgagcccaattttcatgtttgcctttcgccacactaatacaagcactaagcatatttttcgtttatggcgcgtacaactaattaagctatttttaaagacggcgaattttccaacgtacgcatcggcagggggcgtggccacgccctgctcgtcactatgtctggccagatcgcgtgcggaaaacagggaaaaccagagggcgaggcagctgcgctcaattaatgtcattttggctagctatttcaatttggaaaatagtttaatgctcactgcagacagacccgccgatagcaaaaagcgaaaagcacgaaaatatatagaataaacatttatatacatatatctgtatcataaacacagccatttgacattgaactcttgctaaaagtcacgcccacttgacttctttttcggttcttggagcatcaacgaatttgtttcttgtttaattaaagaccgccagaacgaaattgaaacatttttcaacagccacacatatgatagaactcatcgaggcgtatgtatttatgtatgtacatatattaaatttttgtttcgcctgcaattggcaattgatgaccttcttcaaacaatttcatcgtggctttttttagacgtgactggcacgagctggattaatagttaaatatatccaaagtacgcaagtatatgaacaccgcgaggcagcaaaaattgaaggaatagcgactggtgcgggtttatgtgtccccagggtagaattttatgtgctgttttgcctcggttcggtttttatggcccacgaatgcactttacacctcggccattaaatcattcattagatgcgcggggggaagccttattagtccaacagataagacaaatttcaatcaaccacgccgaagatttatgggcgatattatgagtagtgacccaaatataccaaccagaaatccatagttgtttgtaaactttatgctacagattagactaatttcaatacggggcacgcgtgtcaaagatttatgaataataacacagaagcacaatcgcctgcaagcgaaatcttattatgttacacattttccatttttggaggaatttcattagcacctttgcgtttgcgtaaacaatttccgagttttaaaggcgccaaccgaaaggctgtaaacaaaacattttgttttgtctaattaaagctcccaaaaaattgataaacatcgagaaagagttctatattataaaagctgtctttagcgccgaagggaaaaacactccaacgcatatttttatacgaatattttaaataataaatttattaatgcgccatagcaaaacaagtttcgtgcgatccaaaaatgtatgaatggtaattccaataaaagcacacatgtacggcaaatattaatgaataaattcagcatttcgccaattggtgtgctaatttgcattggagccaagtaacagaaaattataaattataagcaatgggaattaatgaggggatttggcacttacctgatcttgacaaaagtatccaaatccgatgatgccggcgatggccaggaagaggcaaaacacaatgattgttcggattttggagcgcggttccattttcttgatttcataaacaccactgggcagcaataaggcaaaatcactatcgacttgaacagatacgttcttatgcatatccccgggcatgttccattccctggcctccctcgaaaatcgcactaaaggtccaacaagggtccacccgagtggagtccaagcgggtatccgtatcggcctagcgcaacgagaaccagacgcgaatcggaggcgaggccaactcaatcatacttcagtcgctgcccgataagaactcgaaaaatgggaacaccttcgcccattgcacttggcgcggaaatgggttttccttgtctctcggctttcagtgcctgcaaatggagtaagagtgaaaaacggttagaaacctattagttttgggagcactacaaaagcaacaccgtttccgattagttaccacttgaccatgccgataaagcggtctgtcaaattgtctagcccttatctagccacttacttagtagctgaaagctcttcaggggaaaatcaaaaatagtttttaagaacctaaatctatggcagactgataagaagttcacaattaaaacgtacatacatagttaattggactttctatttttttgttagggtcaaaaactgataagcaggcggtgaagttgatttatcgtttaatctgaccctattttaattgcaaatctattagtaagtattcaagacgggcgtgaataacaaacgtttgtgcaataacaaatttatctttatttgtgtgggaaatcttaaattaaatttccacgcgcgaatgcgatctgcaaatgtatagcgtaacgataaaatacataaatcaaccaataatgacgcaatagtggaaagtgaatggcggagccgaaagcaatgcatttagtatacccttaatcaattaaaaatacgtttaaatacgtttattatttaaagcaaaaaacctacatccgtacatgataatacgtgcaattactcaaataataacttattatagttaaaaaatagtttgtacttatttcatttaatatttaaattatctagtgattctttatttataagaacatattgtagttcagttataaaaatagttatcaataatatggtaaatataatgaatgaacagcctttgttgtatgggtgattattatcacaagtcgctttatctggcttcgatattgtttatatgtgataaacccgattggaaaatgcgtaacatattagggtttgaatgatattgactacatgcgagtaagttgcatttaggtagggtatttaaatgtacaaacacccaactaaaataactggcgatcggcagtcggagtgacgcccaagcataactggtgccttatatttatgtaggcgctttttacttcacgatcggtgcttctgtagcgatcacaattattgtaaacaaatggaaaagttgcttattggcaaattggactaacagagagacaagaaaaaaaaggcagatgtggcgaaacatgttgccaggcaacaataacaaaaaagcatgcatgctgtgcacacatggccgtttaattcacttctctgtactctaaactatacttaaaccatgctaattgcctacccaaattatcaggtttttcgaggcagtgacgtcagggcaaggagtataattataataatagaatcaaacgatttagcaacattgcagtaaaaaaaaacagaagcaaaggggagcaacaaaaacagagagagggcaaaataagagagaggacaaccagacagagcgagatgccaaacaacagctgttcttcttgccagatgcgaaatgggcaatttaatgaaatttatctagatttcactcacttttcacttgccaaacgtcgtgtttgtgcacttttcacaattgtcgcggcgtcacacgtttatttatttacatttctctgcgtttcaggcgctcgcacgctcaattagcgcgctttccgctttgtgccacacattctgtgccagccacaaaaaagcccgcaattcgcactttcatgtgttttcggctatttctgcgatcgtttttcctgcacttgcactgctcaatagctaatgtttagttaattgacactttctaagcgttttgcgtatattttttacgaattattttggcaaaacgacgcggtaccagcgtcaacgtccgcattcttcaaaatcggcgaatgaactgaacaaaacgaactgcgcaagttgggcaataggaacagctgaccgcgctgccagactgccgaacggaaactcgctgcgagagtctggcagcacttgcaaccatcgatataaactattggtaacgaatatttaaagaattaactttatagttccattgaaaatacatacataaaacaactataattatgatacctaacataaaacatcgtaatatcttatttatagttatcttttgtatgcaatattcaattttaagttaattagataaacaccaaacgtttttttatttgtgaaaatagaaaaagaattcaatagaaacaagttttcaaggcaatctgcatattcttaaatccaactttatgggcacttttgaatattcatttattttgcagccctagcaatcgctgagcgataaccataagttgactatcgatagcagcagagcgatatgcaaaacaaacgaaaaaagtaaaagagcggtgtaaagcagacaacatagtttacattttttgcaacaagtttttcaacttaaagccaactcccatcgtccaatggaggtggaccagattcccctggccgacgtggtcttcgtcatcgagggcagcgccatcaacggagcctacatcaacgaactaaagaccaactacatcctgccgactttggagcacttcaccactggctccatcgacgagcgggaatacctgattgcggagcgctttgccactctgtacggtattgtggtctaccgtacagcggccaatctgctggagccagtttgttcaacctatggtccctttctgcagccccaaaaagtgatggagacgatcgaaagattgccactagtgggaggcggaatggagtcctgtgcccacatggccgaaggatttgctgcggcccacggctgttttgatgacatcagcgaaaggcgccagttgctcgatcagaccagcgtccagaggcactgcattctcatctgcaacagtcc

SEQ ID NO: 39614 - DNA, 784 bp, DROSOPHILA
tttgaagaatgcggacgttgacgctggtaccgcgtcgttttgccaaaataattcgtaaaaaatatacgcaaaacgcttagaaagtgtcaattaactaaacattagctattgagcagtgcaagtgcaggaaaaacgatcgcagaaatagccgaaaacacatgaaagtgcgaattgcgggcttttttgtggctggcacagaatgtgtggcacaaagcggaaagcgcgctaattgagcgtgcgagcgcctgaaacgcagagaaatgtaaataaataaacgtgtgacgccgcgacaattgtgaaaagtgcacaaacacgacgtttggcaagtgaaagcactgaaagccgagagacaaggaaaacccatttccgcgccaagtgcaatgggcgaaggtgttcccatttttcgagttcttatcgggcagcgactgaagtatgattgagttggcctcgcctccgattcgcgtctggttctcgttgcgctaggccgatacggatacccgcttggactccactcgggtggacccttgttggacctttagtgcgattttcgagggaggccagggaatggaacatgcccggggatatgcataagaacgtatctgttcaagtcgatagtgattttgccttattgctgcccagtggtgtttatgaaatcaagaaaatggaaccgcgctccaaaatccgaacaatcattgtgttttgcctcttcctggccatcgccggcatcatcggatttggatacttttgtcaagatcagcctgtggcatacaatattggtcagtaa

SEQ ID NO: 39615 - protein, 66 aa, DROSOPHILA
MHKNVSVQVDSDFALLLPSGVYEIKKMEPRSKIRTIIVFCLFLAIAGIIGFGYFCQDQPVAYNIGQ

SEQ ID NO: 39616 - DNA, 2726 bp, DROSOPHILA
gctggccaagatgatgacctccggctatgctggctgcgtccacttctcctccatccccaactcaccagcctgtgaccttaaggttctcatcctactctacacgcccgatcgcaacgcttttctgggcttcattcccaataatcaggcaatgtttgtggaacgtctgcgcaaagtcatacagcaaaagcagcacggcaacatgcaacagcagcagcaacagcagcaaatgatgcagcagcaaggcaagtcgcccatggagctgcagcagcaacagcaacaacaacaacagcagcaacagatgcaacaggataactcgcagcagcaacactacaaccagttccaactcaatatgcagatgggtggtggaggtcctggcggcggacctggtcccggtcccggcggcatgcccatgcaacagaatcaaatgcagatgaacatgatgcagcaacagcgaatgccactgggcgtaggtgttggcgtgggtgttggtcccggtggcgtgcccaatccaaacctccagcagcagttgcaacaagtggcgccaaacgtcgccgcaatgcagcagcagcaggcgcaacagcagcagcagcgcatggtgcgtcccatgatgagcaacaacaacccggggctgcgccagctcttgcagcaccagaccacgccaggcaatcagttccggccgcaaatgggtggccagaatcccaatcaaatgggagcaggcggtccaatggtcggcaatcgcaactttgacgacggaaactatgagttcatgtaggctacttaagagtatcgtataaaaaaccagaattaagacagtaaaatattttataaaatccaactgcaagtcttttttggggtagtggcaaaatctatttcccaaaatcgaaatattaatttctccattttcataacatttcgtttatttaattagtaagaatcaagggaaatccgaatttgcacaagacttatattaatcacagaacataatctccgagaaagtccactagtttgctccaccgccgccgccccccgaggatgcggaacttgcacttccagcgctagcggcaaacaccttgcgaagattctgcaagatgctgaacagaaccgttcccgcgctgcccaacgtttccagaacatcgaatccggtgctgtcgatggctgtctcccgatcctcctccgtttcgatggccggggagctgatgttcccgccattgtggtgagtttcgtggacgccatggtgtccaatcagccgatgagtattgctcttcacatgggagtcgttcacgccgccaccgccaactgtgtttatcaggtgcttcaccggctccaggaccggaatatttagcttaatgcgatgccatgcatccgcagtttcggtgaagccctcatgctgctcgccagtggccttcatctcatcatccagctggtttcgctcgctgaccggatcgtcgtccgtctccagggacagctccagactcatgtttcccttaccaggcagttgcaacaaactgccgaagagctgttgcagatgcgccgagttggtggcctccgcctcattctgctcgaaatcgaactcttcacgtactcccgacttgggcttctggttcacaaagctggtcacatgcagcattccattcttggtgccagaatcactggagttggtgggcttggcggacgtcgtcgtcgtcgtcgtcgtcagcagtagcagccacaaaaactgcagatacattcggagaaatggaatctataattggcgcttaatgaccggctgcacgtacgttaatgaatattgagtatgaccggtaataaggctttctatattcaaatcccaacgcgcacgcgtcactggaccttgaatttggttgaataagatatggctgctttacaaatcaaagatgaggtttctaagttatgatatgtgcccatctatacacttagagaaaaaaccgttctcaaagatctcgatttgaaaattttgatctcaaaattctgccaagattgaattatgcttcgatagagatcgatccattcttagattacaattgactttgctctcattttgtcagtctttccattacgttccttttacacaatcataaacctgatacttcttccctctgaaaatattaaaattgagatcgttttcgtctcgaaatcaagaagaaatcttctcatgatttatgataaatgccactgagtgacgttcttaatttttctgggtgtatggtggttgcttcaaaaagtcatagggtccgatcggaagagggtctgattatattcttactaatagccagagattatagtttaaagttttaagcaaagctttgtgtggttataccttgtatacgaaggtgatccctaatgtgcaaccaaactctatactctattcatgacctacaccattttcttgaatagttagctcatgagtcacttatttgtttaaaaaaaacccacattatgaatttagacatcgccaagttccctaattatcggcaatgccaagtgtttgcttacattaaaaaacacaataagacatatggaactactaagtgtggagctggccaatcgcaacattgtcaatggaatcacggatctagctcttggctagaaatcgaaactaaaaccgaaccgaaacagaaactgaaaccgctgccagcaaaatcagaaatcgaactgaggcaccaattgattgagtgggtgaccaggtgactagtgaatcaattaatatg

SEQ ID NO: 39617 - DNA, 726 bp, DROSOPHILA
atgtatctgcagtttttgtggctgctactgctgacgacgacgacgacgacgacgtccgccaagcccaccaactccagtgattctggcaccaagaatggaatgctgcatgtgaccagctttgtgaaccagaagcccaagtcgggagtacgtgaagagttcgatttcgagcagaatgaggcggaggccaccaactcggcgcatctgcaacagctcttcggcagtttgttgcaactgcctggtaagggaaacatgagtctggagctgtccctggagacggacgacgatccggtcagcgagcgaaaccagctggatgatgagatgaaggccactggcgagcagcatgagggcttcaccgaaactgcggatgcatggcatcgcattaagctaaatattccggtcctggagccggtgaagcacctgataaacacagttggcggtggcggcgtgaacgactcccatgtgaagagcaatactcatcggctgattggacaccatggcgtccacgaaactcaccacaatggcgggaacatcagctccccggccatcgaaacggaggaggatcgggagacagccatcgacagcaccggattcgatgttctggaaacgttgggcagcgcgggaacggttctgttcagcatcttgcagaatcttcgcaaggtgtttgccgctagcgctggaagtgcaagttccgcatcctcggggggcggcggcggtggagcaaactag

SEQ ID NO: 39618 - protein, 241 aa, DROSOPHILA
MYLQFLWLLLLTTTTTTTSAKPTNSSDSGTKNGMLHVTSFVNQKPKSGVREEFDFEQNEAEATNSAHLQQLFGSLLQLPGKGNMSLELSLETDDDPVSERNQLDDEMKATGEQHEGFTETADAWHRIKLNIPVLEPVKHLINTVGGGGVNDSHVKSNTHRLIGHHGVHETHHNGGNISSPAIETEEDRETAIDSTGFDVLETLGSAGTVLFSILQNLRKVFAASAGSASSASSGGGGGGAN

SEQ ID NO: 39619 - DNA, 2380 bp, DROSOPHILA
tcattgttcatatgaatttcatatgaaattccgatttggaaattgatggaacttgatccatttttggattatgcatcatcaataatggttgctattgttataattattcttaaataaagcttttgttggttaaaaattacgacccatgagaagtgtcgtttatttgtgattttgaatgatatcatcacacttttctctcagtgcacatatgcacaatgtatccagcattcagttcggggcaaccatatcgacggagcgcactgcaagagtatcgcttatatttctttcgctgccattattccgtggtgtgaggttgcttttttttattattccagctcggtttgacaaacaaaaggttgctgcatggtggaattcgagtgaattgcattttaaattgaaatgcctggatgcggcataaaaactcgaatttatgaatgtcttaaaaagtctcctcttccttcagcagcaggagaatttaaaaagtgctatgccattacagttgtgtccatgttttcgcaacgagactgcagcaaagaaaatacaaaatgggaaaatagaaaacgcctaattggctggtcaaatgtcaagtggcaagtggcgagtgctggcacccactgtgcacagtgggcaaacaatccgaacaaaggagccatgtttcccggcactcgagaaactgcaactgtggcaaagccaacggagatggcgaaacgtttaagcagcacaaaaatgccactggtttccgatttgggtacgtgtctgccgggtattcgggttgcaagttgggttggggttgcaaggagaaaaaacgcaagccggcagttgggcgcagccactctgggttatttttgttggccaactaaatcgtcaacgtcaacattgtcgccgaccatgttgacatttggccttgcaccgcctcctccctgcacaggataacaaaaacacaggacgaagggaaggaaagcatcattccgttgttctcgaattcccttggggacaacctctaggcgttgatatagtactcccgcttcttctggcacttctcgtacgcaatgtagcacagtgcgatggtgatgaggaccagtatggtgatgcccattatgatgctgaccagtataatctcatcgttgatgctcttgtacgagtgacctgtaaaacaaaaaaagaaggcaaggataactagagaaaacacgatttagaggcctcgctgacaaattacaggcaattattcttgtcaggtgggtgaagtgagtggcaggaggagttgaatcacttgtttcccccctgacactcaccaaatcccagttcggtttttaaggacttactccgtgcatattcaaacaatggggaaaaaaaatatgcgccggaccatgacaaatgcattgctgtaaagaataaacgacgaccatatgccacaggcaatctggatgacaacccacgcacacacagagcggcaataaaaactcgcaataaacaaaaataatacgaaaattggatttgcaactcgaatttttacatccccagatgttccaattttatacaatttcgatttatatgaattgtgttattaacgcaattattggcaaaagatactgacaaaatatttcagggattaagttttaagcttgatttaaggttctttttgtgtgtcaacaaataagtgaagttatttacatatattcaagatgccagatggttctcatcacaatatattatatttaagcttcatattttaaagtaccattacaaaaaaattatttctctgtatccaacacatatgcactgcgaaatagattatttaaatcgatttaagtacccaaattcaaataatattaaaaataaatgtaaatcgttatactctctgcaagggtataaaaaatcctctctgcacagcaattgctatcgtataaatttataccgggctaaattaaatctgatttcccgtataatttgtttaaaaagtcgcattgcggttagataatttgcgatgtcattagctttggggtttgatttcatttatatgcgagcggggcatttacgaatttcaagcattaatttaaaaagcggttgccagaatttcaatttggcgtaaccagagcccatttgcacgctaccaactttgcaaataggctcgcattgttcggctccatttgggccagatgtttgttttatgggtaatttaacacataatcgatgccgagcattcacttggcggcacacatcaaacagattcaaatcttgttcactggcagtcaagccgacgccgccagagatttgttaattagtgggctcgtattacgagatctcagagcccaatggcccgtggcacaaagctatggtactacataaatctcatattccgtatattatgtattgaaaatat

SEQ ID NO: 39620 - DNA, 234 bp, DROSOPHILA
atgcatttgtcatggtccggcgcatattttttttccccattgtttgaatatgcacggagtaagtccttaaaaaccgaactgggatttggtcactcgtacaagagcatcaacgatgagattatactggtcagcatcataatgggcatcaccatactggtcctcatcaccatcgcactgtgctacattgcgtacgagaagtgccagaagaagcgggagtactatatcaacgcctag

SEQ ID NO: 39621 - protein, 77 aa, DROSOPHILA
MHLSWSGAYFFSPLFEYARSKSLKTELGFGHSYKSINDEIILVSIIMGITILVLITIALCYIAYEKCQKKREYYINA

SEQ ID NO: 39622 - DNA, 2820 bp, DROSOPHILA
atccggtacatttgagtctgaatgctctcttaggtccagtccatttggccacttgactggcccgaaaaccggagctggccatcaaatcccccgaaagtccaagccataaacataaaaaccaaaagggcacaactctctactggttctactcgttcgccccgccatcgagtactttgttgaattaaacctctaattaggcaaagcggtttttgaccgggattaaaggttgcccagggacatcttgaatgactaatgaaaatttcttagaatttttttaagatttactcctaagaaggggctcagaaacgctgaaactggcttgattaaaaattttcattaagacgggagcttagggagagcaaggtgggcgtcttaactctagagataagcctgcaggaagttatggatttgtgcaatttgtaagggcttataattctatcaaaggctaagcgaaacaacgaagtttaataagctcttacagtactttgaaaggtatttgaaaccggaagttaatatgatatttaaggatagtctccaaaaaagtagtattaaaccctttccggataagtccacctcctaagtacaagctacattaaactccatatgccaccaagttccttttgcgccgtttggcttcatgacagttagcacttggccgttaccaacttcagtttttattacatgacacgacgcttcattcgcagcagtctgctcttttagtgccgagtcaccaataaaactgcattgtgtctatagaaccaaggcaaacaaattagttctgcgccagccccacacactgcggatcaaacggtgggtgttttgggggcatcaaaatattagacgcgtcaatgggtgtgcacattttgcgcttttgcattcggaaggcaatcggggcgacaagttgaacgacatcgaatgctgaaaggagaagtggaatgtgggcagtgggtggtagttccagattgccaattcaatggaacaaaaagggcagccaactccgatgacgcgcactccctgctcctcgctgggaatgaggatgtcgatgatatgggaatgtgtgtttaatggttgacattgttgtttacaaattgactttttgttgctgccgccgccatcgtcaataaacatttgcctgataatatgccaacatatgcataacgtacataagtagcttacttccccataccccttttggttccaggcactggaaatatttttagcaaaaattgtttttctaaatagaacgaatattcctgaaaaacaaacaacaacggattatatatcaatatattatatagaatttgcataccaagcttctgatttattgatagaccatctgacccgtattttccttgttttttctccgtgcagcagagctgcagcaatatcagcagcaacagcagtcgagcaaacatcagtcgaatggagctgtcctcactggcatgcagtcgcatcacatacgcggaccacgcccaccgctccgcaccgcctcctcgacgacaacgaacagcagcagcaataactcggcaatgggcgtggccgtgggcgtaggcgggggcgttggtaacatgctcctggaccaaacgccatccggcggcagcagcagcagcggcgtaagcagcgcacccagctcctcaaagggtcaccacacccactcgcactcccatgccgcccacctggtgcactcgcacggcgacggcctcgtcctgacctccgcctcgcccgtgggcggccagcaacagcagcacccgcagcagcatcagcatccgcagcagcagcagcaagtgccgcaggcggcgatggacgagatgcgcgtctgataggtatcggtctttgagttggacttatagtcatcaacggggtaagcataatgtcatcatctattcatctgaatacattcatcttttgagcacacagtcattaagtttgcatactcacttatctcaataatctttgttaatcataaatcattaaggcttcaatattgtttaagaataattgtcgtcatctttttttattaagaatcctaaattcatatacaaaatgtgggctgtaataatcctgtttaaataattgtcaattgttcaaatgcatcttactaaaatattcagaagttgagcgcctctttcttaaataagcagaaaataataattgttataatcttcccttatatataatttaatttatcaccaacaatcttggcacgagcttctgttgatttttctaccaaatcggtttccatatcattttggtgtgagcattttttgtcagtttcctcgtcgtcatcatcctcttcctcgtcttcatcatcctcttcctcttgttcatcatcgtcgtcctcttgttcatcatcgtcgtcctcctcgtccttgtttatgcatcggaaaggactcagggggttttaggtaaactcgtatgtaatttttccgagcgaatttattttcgcatattcatacagataatatttattattcatttcgcgtattatgccaaaacgcagtccaacattcagggccttctccaattctttggtgtaatatttgggtcgacacgtggcgtccaaggtggcaaggacgaactccaggatatcctgccaatcgctcggtgggtcaagctttttttagggccagtgtgaggtaatgagatatagtcagtttctccatttaggatttaagtacaagttctatagatacttaaactttaaacggcttttgacaataaaatcatgaaaatattccaatttaataggaaaaccctttaacatgcagttcctctttaaaaaaaaaaaagctaaagagaaacactgtgaaccctttagag

SEQ ID NO: 39623 - DNA, 504 bp, DROSOPHILA
atgacgcgcactccctgctcctcgctgggaatgaggatgtcgatgatatgggaatcagagctgcagcaatatcagcagcaacagcagtcgagcaaacatcagtcgaatggagctgtcctcactggcatgcagtcgcatcacatacgcggaccacgcccaccgctccgcaccgcctcctcgacgacaacgaacagcagcagcaataactcggcaatgggcgtggccgtgggcgtaggcgggggcgttggtaacatgctcctggaccaaacgccatccggcggcagcagcagcagcggcgtaagcagcgcacccagctcctcaaagggtcaccacacccactcgcactcccatgccgcccacctggtgcactcgcacggcgacggcctcgtcctgacctccgcctcgcccgtgggcggccagcaacagcagcacccgcagcagcatcagcatccgcagcagcagcagcaagtgccgcaggcggcgatggacgagatgcgcgtctga

SEQ ID NO: 39624 - protein, 167 aa, DROSOPHILA
MTRTPCSSLGMRMSMIWESELQQYQQQQQSSKHQSNGAVLTGMQSHHIRGPRPPLRTASSTTTNSSSNNSAMGVAVGVGGGVGNMLLDQTPSGGSSSSGVSSAPSSSKGHHTHSHSHAAHLVHSHGDGLVLTSASPVGGQQQQHPQQHQHPQQQQQVPQAAMDEMRV

SEQ ID NO: 39625 - DNA, 3166 bp, DROSOPHILA
atcgtcccgcaccacccacctatttaccccttgctcaaggcacccaatctaaccacccacctaacaccaaacaccaacacccacccatcacccaactcaaccccgatggccaaagagctggcaaaacaaaagacagccgcgcatttttcgcaactgcactttactttgcacttttcgctttctttgcataaattctcgtgcacccgagtttactgtactgcaaaaatgggcacgcacagcgaaaagaaaaaaaacaaattggcagaaaagtgtcgtgcaaatagaccagaagataccgtctactattggccaagaagcaaccaagttcggaggacatactgaaatgtgtgtccaaaaagtttataaaataaagtttataattttaatacttatgtcctatttgggctaaaacaatggtaccttactcattgcctattatgttcataaaagtattttagtttcttaactagagaaaagaagttcttacgaatttcatttaattggattgaatttcatataattttaaaaaatattttaagcaaacaaaattagataagcagcaaaataccctaaaaattcttaagtacccggcgcaaaaaacacaaacagcggtagttgaggaaaaagttaaagaagagaacgtaggaaaaaagtaaaggaagctggataaatatggcgtgcagctgctgcagaagatttcccgctgaattttaaactaaacacaaaagcataatggagaaatggaaaagtggaaagcgccaacagagcgcaatgaagtgtacgtccatgagaacgggctaacatcaacgaatccgcggccaaatggagccgagttccccgatagcacagatatgctatacatatatatacctatatatatgcatctagcgatatagcgcggccaactgagtggcactgatgggtctgcacttttctggcaggcactgtgtcgttaaggttgatatcgcactgggggtggtgctaaaaatggggagatgtcatgactgcaagtgtcagtcgactagaacttcgactttgtgttcctctgaaggatgcgttggatttagagaaccactaactaagtcataccatcattcactgaagtataaaagactttcaacactactaaactacattatagtgataaatatgttagtgacatctctattttcgaatggcactcagcagttacttgcgttcttaaaaaaggacactgttattatatggccaacatgacataagtaaaatctaatataaaagaaatgttaaatttttattgaccacaatagttgtgtcaaatagtcgtacaaaaactgatttcaatgaataaaaactagctttctggctgaatcttacaacaattaattaagtcggtacttaaaatattatcgctgattaattactgtacaatttgcaaagtgctaaaacatggcttgattaatttaatcatcaacattgtgatgagagaatactttaatctactttgtttaaatatcttttaattttttgtgaagcagagtcagctctttcaatcaattagtttttacccaaatcatgaatatttatgagcatatttttcacgaacaatttacacatttttttttttaccaactttaaagcgaatttaattcccaaaccgaactcttctgttgcagctccatagaaaccctgcgagcggaaacgcccgaggagttctatgcacccaagcagccggatgatgacggccaactcaatgggacaccagtggatgcagatgcagcgacacaggtggtgggagcggggagaaccggcggaatgggtgcaccgcccatctccgccagtgaccacaagcagcgacagctgaagaagctgcgctttaagcgggaaatccacgccctggcgctggagggtggcgatgtggccaggggctactgctcctgcgacgagcagtggacgaactcctcctcgccgacgtccaccaccacatcggctaccatgtcgccgacactgccggctggcggaagtgcaggcgacgctggacgccatgccaccggaaacgggcctggaaactccagcgctggcagcagcggtattgtcaaaatggcggcggcgcctggaaagcgaagcgagcggctcaagcagcagcaccatgtgcgcttttccgacgagaagaacttctcggactgagagggaaaaccaactactagactgcacctaatctctgtttagtcataggctaaccattttttcccctctcctgcgaaacggaggggagaagatcaaacaaatcatttgaaaacccaacaaattatatgaaaatccgtagataaaagttatcaactaagagaaaattttaaatatagtttgaagatgttagttaaatatctgtgtttagttgctcgatagatttgttgtgaaccatatatgcatatatatataaaaatatatatgaatataatcaagtagccacgtaagtgtagcacaaatgcattttttccactcatcagcaaattgaaaacaaatattgatggaaattgttgataacggcattctgttggcggcattgtaaatattctagaaaaaattaacacaaatgtggtattatttacttaaagtaaaaaaacacaaaaatgatataaaactacactaaatatataaaagaaaacaaacatggctcaaaatagattagattaacaaagaacgtaatgagatgcataattaaaaacaaataactagttaattatttaaattaatactctgaggatgaggaataaacagtgacgctttttttaactgtgtacaaaagcaaccgattcactagaggataaaactaaaagtgcattaatgcttaatttaatgaacggtttttacactcaatcgaattattgcagagcaggaaatttgatgcagaaacgcaacaagttaattgcatttttatgcttataaaatatttgttttataccgtttttttctttgtatttccgactaatctaatgaaaactattgtaactcaaattactgttgtcctttttttttttttttttttttttttattttactttgcttttatttattgaatcttcttgtataagaactaacaataagtttaaaaatcttaactataacaagtattttttgaacagttgtattatttttccaactggtctatatttaaacggccctaata

SEQ ID NO: 39626 - DNA, 567 bp, DROSOPHILA
atgactgcaagtgtcagtcgactagaacttcgactttgtgttcctctgaaggatgcctccatagaaaccctgcgagcggaaacgcccgaggagttctatgcacccaagcagccggatgatgacggccaactcaatgggacaccagtggatgcagatgcagcgacacaggtggtgggagcggggagaaccggcggaatgggtgcaccgcccatctccgccagtgaccacaagcagcgacagctgaagaagctgcgctttaagcgggaaatccacgccctggcgctggagggtggcgatgtggccaggggctactgctcctgcgacgagcagtggacgaactcctcctcgccgacgtccaccaccacatcggctaccatgtcgccgacactgccggctggcggaagtgcaggcgacgctggacgccatgccaccggaaacgggcctggaaactccagcgctggcagcagcggtattgtcaaaatggcggcggcgcctggaaagcgaagcgagcggctcaagcagcagcaccatgtgcgcttttccgacgagaagaacttctcggactga

SEQ ID NO: 39627 - protein, 188 aa, DROSOPHILA
MTASVSRLELRLCVPLKDASIETLRAETPEEFYAPKQPDDDGQLNGTPVDADAATQVVGAGRTGGMGAPPISASDHKQRQLKKLRFKREIHALALEGGDVARGYCSCDEQWTNSSSPTSTTTSATMSPTLPAGGSAGDAGRHATGNGPGNSSAGSSGIVKMAAAPGKRSERLKQQHHVRFSDEKNFSD

SEQ ID NO: 39628 - DNA, 2361 bp, DROSOPHILA
attttgttacgtcccgtcgacagggctttaaaacaggaactatcgatttatcgatacacgcaggtgctaccagctgactgtcccggcatttttttgcgctatgtggcagctccaacttgatgtaatcctccccaaaaaacaaacggaacaaaaggaatagaaaaaacacgaaaagcttgtttcgctcttccagcgtctttcttggccgcgtcatgaaaataataaatggaacgcggggggtggtgacgtcggcagtgctggatgagctcatacgaaagcgaaaagaaacaagtttagctttttggaatacgggcgactacgactgcagcttcagtttcagttgaacgcgaatcgccagcgacagcggaccgcctgggagcgatagagagagcgatagagccgcgaaaagaaaaacgaaaatcgaaaaagtgtgtgacaaaacaagtgtgcgagtgtgtgtgtgtgtgcgtgttagaattatattagagttggtatcagtataagtacaattctaagcagaatcgcgctttttttgtcactaattggaaccaagaatatcgaaaaaacgagcagattccaagagcgtgttacgtggccgtctttccaattggacaactgaccagctgagctgctgaaaacagttctaatcggagacttgactattgaaacattaaaatacaatcataatttaataattccaggcaaaatcaactgtaagaaaccaaaattctagtgcgaaacaaattaagaacctacgagtgggttaaaacggtggagcggctaaaacaaaatcaataattggccctgcgtccggccctgtgtgcgtgtgtgtgcttttgtgcgccagtgtgagtgtgggtaagcgtgttcttgcgtgtttgtgagaacgacaattggagcaatgcctgctgattgatagcaaaccaaaaaaaaaaacatataaaggaatcaattaagcgaagaataaccaaacctaattaagtgcaataactgagtgatcatgcagcagcccgcaacgcccagcacgcctgtcaataatgcaccttcggccaccccctctgccgccagcgggcctgctgcctctgcgcccgcggtggccagcagcacccccatacgcataaacagtgccaagcagcaaggtgcggcggggggaggggatactctggcacatcccgccacaccgcactcgcattcgatgcccggaacgccgcatcaacaaccgcagtcaagcagcgtgcccaccggcggtcacctgctgcagttgcaggcgcccctgccttcggcgggtggcggaacgggagccggtgctgtgaccccctctggtctgtccatgggcgcatccaaccaatcgctgggcgtgagtgtgggcgccgccagcagcgtcagcggaatcagcatcacgccgccgaatagcgccggactgcgtcagtcgacaggtgagtggaacccccttttacccgccccactctctgttgtcgtgttcttttccccccgcttcttctcctctctattactctctttcaatgtcactcatacacacttttcgaattgatcaatcgcaatcgaagctaatgcaaacgaaacgattcgcacatgaaaacacacactcacacaattgcggtcaaaaaaatagcacaaaagaagtttatttcgctgactaatcaaacgtaatttccccaagaaaatttcagacctagttcttgataatcttaatctgaagtgctcaattctttgcaaaattattcgatttgcaattgagatagtgagctacaatacacattgctcttatttttgaagcagaaaaaaaatatatgaatttcttccagaatcttacaatcttttatttttaaagtttccctggatcacaagatatttgaaaagtgaaaaatatatgttaaaattgtagccgcggcgagttaatacagtcgagttcagactttaggaccttcttatcttatctaaacttttatcaactcaatcatcaatcagttatgatacaaaccatccataaagtcattaacccaagtacaaatagataaccccataaaatgaaacttaataatcaaaaaggaaaatgtcacataactatgagctattgttttgaccgcacttgtacaagccatggattccgattgtagcttagaattttgtttccgtatgctgtgtgttttgcttgttttgatttcgctgctgctcacatttcaaaattccagctcattcatcagccgattgccggctaatccgtaatccgtacccctacccgtacccctacccgtaccccgcacccgaatccctcatccattcgtagctccaagccatccatcccgggggccacgttatcgcttaacactcggcttttgt

SEQ ID NO: 39629 - DNA, 361 bp, DROSOPHILA
atgcagcagcccgcaacgcccagcacgcctgtcaataatgcaccttcggccaccccctctgccgccagcgggcctgctgcctctgcgcccgcggtggccagcagcacccccatacgcataaacagtgccaagcagcaaggtgcggcggggggaggggatactctggcacatcccgccacaccgcactcgcattcgatgcccggaacgccgcatcaacaaccgcagtcaagcagcgtgcccaccggcggtcacctgctgcagttgcaggcgcccctgccttcggcgggtggcggaacgggagccggtgctgtgaccccctctggtctgtccatgggcgcatccaaccaatcgctgggcgtga

SEQ ID NO: 39630 - protein, 120 aa, DROSOPHILA
MQQPATPSTPVNNAPSATPSAASGPAASAPAVASSTPIRINSAKQQGAAGGGDTLAHPATPHSHSMPGTPHQQPQSSSVPTGGHLLQLQAPLPSAGGGTGAGAVTPSGLSMGASNQSLGV

SEQ ID NO: 39631 - DNA, 2368 bp, DROSOPHILA
atttaattattcaaatcggagctctctggcgtaattcttcatctagctcattattttccagggtcctgtttcctcaaagcctcgtgctccgatctgaaattcgagataggccacgcaattagtggctatataaacagaaggcagcaacaacagcacaatgtggtcaagtaaatagagtgacaagcccgcgactacaaaccggccaaatgccttcaatttgagtttatttatttatttatacccatgcacgcatttcctcgtgtacgaagggtctaaccaggtcgtcttacctttcccccagaaaactcctcatcgtggagatatcatggaaatgggaatggaaatggaagtgggactgaaaacgaaatagggcctgacacgaagcggcacacacgcattttgctaagtggtgtcaaatatttacatgatattatatttcgattttctatttacctctaacaagttcacttttgactggatattcgtgttctaaaagctcttttatcttttgcatattttttttggaaataacttgcttagaaatcaggatttaaaaaatttacatatgcaaaatatccaaaacctggcttctgttcatatatttatagcttaaatattaaatatacctattaagttcagcctttatgttagtttaagaactttaaataccatacaagtgacaaaactgtatttcgaatatacttttcaaatagctcacatacgcgttactgttgctaccagatattcaattgacctatatatcgctggatgtgtatttattcagaatctccactatcaagtgctccactttcagagatatcgctgagctcatttgttttccccttgttagcggagcattatttgtctggttatttatagttaattgaggtgtgcgaggtggcgtggcgcctgttgaagccaattacagcgagctaacttggttaggacacttggccagcttagcttagctgatgacgctgaccagcatagcactcagtgctcactttctcatcctgtgatgcctctcatccgatgcttcgctatcgccatcggcatcgccatccttgaacacacgcttcagatacaagtatatttgcccccggttcgaaagatgaggcacaaagcgcaaagagaatggacgatgccaaagattgcagggaaaactgagggtggggggaacggagtgggtggggaaagccacttagccagcagctgacgcacagaaaactcttcctctgtgggcgatggcatccctataaggatatattcttgggattgcccattctcatcgccatgccagcgcacgttccaaatgggggaacgcttcctcggccagtaggcaaatgaattttcctttttccccagcattttccccctttttttttgtaggtgctagtgctgttgtgcttcggtttgagtaaatcaatttgagactcgtgttatgctaagaaacgactactaaagtcttgttcacagttcattcctcccctatccaataaagctgatgaggatgaagtcctggcctgcctttgacacttgtggccataatagttggctctgaaagccggtcccctaatcatttttccttgcatccgtccgccttctgctacttctgctttacttaagcaaagaaaactgaattctaaagattttctcccctatgctgggtttccttttcttgcctttatggtttttgatatacatttgtcgggtaaagctctctatgcacttttggtttgaaaaaagggcttgcagcgaaggataggcaactgtgccagagttgactcaaaaattgtatatatattttggcctttaataagtttattaaacatttctttccaattccacgacgaagaaaaataaaaaaaaatgtattacgtctaatccgaagccaataagcagtcccatttcccactcaatagccaagttggtttcctaacagttttaccaactaacttttatcactttactaagcttgtccgaagtccccctttccccgccgagttatcgggccaaagttttgttctagcctcattagcgttgttagttggcccaaagttgatagtaaagtaaagttgaacggagcgtgtgcgttaccttgtttttcacgactctgattcaaaatgtcttttattgattttccatttttttggaactttactatatttgctattaaaaacaaccggagaaccaattgaatttattttaatgaagttcgcaatttgctgtatccattacaaaggctttcgaaattattcgtttgcgaacaaatgtgttttttattttcctcttgttgttttgagttgtttgttttgcgtcgcgaaattgtgatttaagcattccaaacttatctgtatttaagtagcac

SEQ ID NO: 39632 - DNA, 138 bp, DROSOPHILA
atgctggggaaaaaggaaaattcatttgcctactggccgaggaagcgttcccccatttggaaccgtgtgttcaaggatggcgatgccgatggcgatagcgaagcatcggatgagaggcatcacaggatgagaaagtga

SEQ ID NO: 39633 - protein, 45 aa, DROSOPHILA
MLGKKENSFAYWPRKRSPIWNRVFKDGDADGDSEASDERHHRMRK

SEQ ID NO: 39634 - DNA, 5749 bp, DROSOPHILA
tggagtatttaagtgctttggaattagttcttcgggaattgagtaagccaattaggctgcaatggattaatgtagcattcttaaaggacttaaacgatctggaggatcaagttatgggtgctttgaatagcagcgtcacagaggtaagtttttgattctaacgctacttgttgacatcatgactttcatatttagggattcattacgatcttatcgcaaacgcaccactttattcacgcccgatactacgccactcgcaatgcaaatgtgcgactaaaggataagcggtatttgttcctgtgcgaggacgaaagccctgcggaattgctctgcatggatatactgcagtgtgagtacggtttatagatgctcataaagagactatgaataagccgtttcaattgagtgttcctgtcatgttctacgcggttcaaactatccccccgtcagcatcaatttattagctaaagcggtggctttccgccacctccctgggggcgtggcaaaacaagtcaaactggaaaagtttcctttgggcccacaacacgcggcgagcctggcgtaaacatggtggcgaaacagccgcaggacattcgtggccagttgatcaaactttagcacttgccaataatttcaacactccacagtgccgtgttcgattgtaaacttgggccatttggacatggaccgctgatttgttcattgttttctgtctggctgttgacacttttgactctaaactaatcgagaaggaggacaatcagttataaatgtgttcttcagacacaaatacttataacaatttatagaatttcgctatcagataccttttaaagtgatcttataaataataccttaatactaggtaaaccttattcgatatctctcaatttctaaaagaagtccgtgttcgtttttatatcccctgcccgattgttttctctgcttgtccgacatcgggaaatcgttgtaatgtgctttagtctaccctcaccatctgatggtccgacctggaacggaaacggccccaacaggaccaacaggaccccatccagaccccaggcgcggaggaggcgcatcggtaagcacgaaaaacaaggacgatggcgaaggaggagcaggaaacaaaaccacttctccctaccgcgacatcaatttcgagctgtggacacaaaagtttgtcggtgccgttggtaatttggatgccctgctcctggacgcattcttgccgaacgaaacttttgccaaccgggtcgaactttatcccaacaagctgctcaatctgcagcgccgcagcctgctcgttggctccattacttatgtcccatatacgattactaattatgtggtaagtaattgccggttaagtttatatttatcgtttgttgttgcctatgcagcactgagagaaatcgcattcgtttcatatcgccaaagtagtaaaccaaggattaaaaaaatagtgagcaatttttgggagactttttaaaaactttctatatctatatctacatctatctattctataactatagtcaatttttagttaaattaaattaaattttaaaaattattattattatttaaagcttaattttgagtttttgcaatttgtacagatatgtatttcgttgctttaacaagtaatgttgtgtatttatttcccagaagaggaatacaaggtggttaggtttttttccgtgccttccttatggccagccagctttaccaaaatgccagagatttgcacgccaacattaagcaaagccaattggtcgtccttgctcccatttacctcatctcgcctcgccactcttcagctccccaaatgttgagaactcctcatcttcatcaggctcattcacatcgttgtctttggattagtcggactcactgtgcgaactcatcgtgaataaatgtccagtggtggccccattgactaaatttgtatgtttgcctgtatgtgcggggattgtgggtgcttgtgtgtgtttggcggtggtggtgtgggtgagggtgcttagttattttcctttgttgtccttgcgggcaacgacttcggcaactaaaatgtaagcacatgttgtgctgcggtgcctagtccgtggtaatcactgctgggagttgccagcactcgtctccatgaattgttcaaacacaaaaagcactgtatctgtaaaactgcgaaaaaaactatttattcataattaaaaaatgtaaaaagttttattgatatttttacacctaaaattcaatttaaatttgtattacttttattgttaattagattattgagtgacaattattattctagataatacttaacagtaactcaattacaacattaccatctaatcttgttcaggtattttttcattctgagtactaatccctgttatcccattgtaaccacagaaaggacaaaaaagaatgaagcttttgttgtcatttggcaaaagttttgttcgcactcaattgtttgccttaaggacatttgcacatttgtaaacacacgcacgcccagccaaacactaacaccaacaccaattccagcactcacacttatacacactcacggataggcaaacagccacaagcatgtgagtgtggttttgtttggggcttggctttggatcctgcacagccccaacattgatttaaattacgtgtttccatttaattgccgcccgacgagccaagtgtcgatgtccatttgaatgctactttgtgttcccaagtggagagtgggtttgtgctggtctgaaactggcaatgggcgtggctcaaaccagaccattaacgaaattagcagaggcacttgaattgtcggtcatagttaaccaataaacgttaacccattgcagcccgctggccagggcgatgtggatcccatacatccgcagtggcccaatcggtcgctcaccttcgacggcgccgaggcaaatgtgatgaagaccttctgccaggtgcacaattgtcacctgagggtcgaggcctgtaagtcattataataaaaaaataaaacatatgtacatatacatatatctatatttattatggaatttcttgcagatggagccgacaactggggaggaatttacgacaatgaatccagcgatggcatgctgggggatatctacgagcagcgcgtggagatggccattggatgtatctacaattggtatgatggaatcacggaaacctcgcacaccatagcccgttcttcggtgaccatcctgggtcctgctccagcgtgggtttcactttgcctaaattatacatttaaagttacatttagtttatgttttagccctctacccagctggcgcactaatattatgccctttaataatcgagcttggctggtgctaatctcaactttagtgatttgcggcacctttttgtacttcatgaagtatgtcagttatcgcctacggtattctggaactcaggttaagtttcatcatagcaggaagctcgagaaatccatgctggatatatttgctctatttattcagcagccatctgctcctctgaggtagaacttgaaaatttatattaaattaggcattacaattattttctacttgctacttttcagctttgatcgttttgcccctcgatttttcctagccacaattttatgtgccacaattactttggagaatatttacagtggtcaactcaagtcgatgctgacctttcccttctactccgcccccgtggatacgatcgagaaatgggcccagtcggggtggaagtggtcagctccatccattatctgggtgcacacggtgcagagttccgatctggaaacggagcagatcctggcccggaactttgaggtgcacgactacagttacttgtcgaatgtcagtttcatgcccaattatggtttcgggatcgagcgattgtcttcgggatctctttctgtcggcgattatgtatccacggaggccttggaaaatcgcattgtaaaatattaaatttttctaatatgatatacccgttactcgtagagatattagattggttaaaaagcttgaagcattaagagggaagcgagactagcttcgttgatcaggccatgtccatgtctctgtccgtatggcctgtctgtatggccggtaggatctcgggaactacgaatgtgaagataagccaattcaaatacccttaattttggttttattactcttctcccccgcattctggcaagcttagtaacgggtatctgatattcgaggaaatgagcgactatagcgttctctcatgtttgtattgtaggttttgcacgatgacctgtattttgattatacgcgtgctgtttcgataagaggctggatcttaatgcccgaattgaacaaacatataagaacatgtcaggaaactggactatattttcactgggaactagaggtaattatattttgctcaactactttttgtaaggcgtatataaatttattaattgatcaaaagagtttacacatatacctccttgatcgaaaccctcagatatgttgaatatttcctatttccctccagttcattgacaagtatatggacaagaagaagcaggaagtgctgatggacctggcaaatgggcataaggtcaagggagctccccaggcattggatgtgcgcaacattgccggcgccctcttcgtcctggcctttggcgtcgcatttgcgggttgtgcactggtggcagagttgctgatccacagaatggatttaagcaaataatttggccattaaaatgatgcccgtttgcgcagccagtggaaagggaatcacttcatccttgggtttgcaacgcacgtgttccagcaaacatcaaaatcgcatgctgcacgacacgcgaaagccacaaaaaccccgcatgactgggacctaaagtgtcgagtacactgggcgaaatgggggaaaaaaacatagaattatcttctttcaatagtagtagtagtacactatataagtgtaacattaacttattccactttaaatttgtaattagattgcaaactaagaaaaccatttaaagtacttggctactaatctaagtatttttattagtcgctatactgcgtttaactatgttttagattttttctagtacaagtacttaatatataattctagtgttcctttgagaacgagttataccagtcaattctatttatatttttaagcatttagaaaaattatagaacttacacagaactagtgctaatacaatatccacctagattgccaaaatgtctttttgctcacttaaattcaaatgttagaaagagttttttcagtgatcgttggttgttcccatgatagaaatatgacggcagcttgcagcccgaaatcgaccattggcattgttggtctgggatggataagcgacacggccgagtggccaactgaaaagtgaaaagtggacgcatctccccgtgaaagggagcttcgagcagtggacaccgggatcgggagtgggtggaaggggaaagggggatgtgtggctcgttttgcggcactatctgctgcacttgccacggaaatgcgggcggattgggggattgtggacatgcaagcggaaaatgacttctgccctgtatgctgcggtaattggaaaagcgtttagtgctagacgaacgcaatttcgtcgccggcaaacatttttaatgatgcccttaattatcgctgtgggaaattattcattatcactaatttgccgtagctcacactcgccact

SEQ ID NO: 39635 - DNA, 1191 bp, DROSOPHILA
atggtccgacctggaacggaaacggccccaacaggaccaacaggaccccatccagaccccaggcgcggaggaggcgcatcggtaagcacgaaaaacaaggacgatggcgaaggaggagcaggaaacaaaaccacttctccctaccgcgacatcaatttcgagctgtggacacaaaagtttgtcggtgccgttggtaatttggatgccctgctcctggacgcattcttgccgaacgaaacttttgccaaccgggtcgaactttatcccaacaagctgctcaatctgcagcgccgcagcctgctccccgctggccagggcgatgtggatcccatacatccgcagtggcccaatcggtcgctcaccttcgacggcgccgaggcaaatgtgatgaagaccttctgccaggtgcacaattgtcacctgagggtcgaggcctatggagccgacaactggggaggaatttacgacaatgaatccagcgatggcatgctgggggatatctacgagcagcgcgtggagatggccattggatgtatctacaattggtatgatggaatcacggaaacctcgcacaccatagcccgttcttcggtgaccatcctgggtcctgctccagcctttgatcgttttgcccctcgatttttcctagccacaattttatgtgccacaattactttggagaatatttacagtggtcaactcaagtcgatgctgacctttcccttctactccgcccccgtggatacgatcgagaaatgggcccagtcggggtggaagtggtcagctccatccattatctgggtgcacacggtgcagagttccgatctggaaacggagcagatcctggcccggaactttgaggtgcacgactacagttacttgtcgaatgtcagtttcatgcccaattatggtttcgggatcgagcgattgtcttcgggatctctttctgtcggcgattatgtatccacggaggccttggaaaatcgcattttcattgacaagtatatggacaagaagaagcaggaagtgctgatggacctggcaaatgggcataaggtcaagggagctccccaggcattggatgtgcgcaacattgccggcgccctcttcgtcctggcctttggcgtcgcatttgcgggttgtgcactggtggcagagttgctgatccacagaatggatttaagcaaataa

SEQ ID NO: 39636 - protein, 396 aa, DROSOPHILA
MVRPGTETAPTGPTGPHPDPRRGGGASVSTKNKDDGEGGAGNKTTSPYRDINFELWTQKFVGAVGNLDALLLDAFLPNETFANRVELYPNKLLNLQRRSLLPAGQGDVDPIHPQWPNRSLTFDGAEANVMKTFCQVHNCHLRVEAYGADNWGGIYDNESSDGMLGDIYEQRVEMAIGCIYNWYDGITETSHTIARSSVTILGPAPAFDRFAPRFFLATILCATITLENIYSGQLKSMLTFPFYSAPVDTIEKWAQSGWKWSAPSIIWVHTVQSSDLETEQILARNFEVHDYSYLSNVSFMPNYGFGIERLSSGSLSVGDYVSTEALENRIFIDKYMDKKKQEVLMDLANGHKVKGAPQALDVRNIAGALFVLAFGVAFAGCALVAELLIHRMDLSK

SEQ ID NO: 39637 - DNA, 2596 bp, DROSOPHILA
ggcttaatctttctgccgctccaacagcaaaggcagctacattggctgcaggtcaggaattgattgctttgtcggtttgccaacccgaggaactgggccacaagcagcaactgaaacagagtttcaacaggacgcgccatacactcgaaaaaaatgagagtcgagctaattaatacagttcttcagatactcaaagagcgaatttaaaaaagaaacaactgatttgaatctgtattcaaaatcttcttttaattgcaaagtaaataaagaaaatatgtattttaaaaatgaataagattttataatattttaaagaggttttcttgataatttttcctccttatcttgggaaatgagaacataacctaaacttttttcgagtgatggatgcaggacaaggcaaaatccgtagcagcattcatggtgtggctgtggactttggtttgacccggtatgttgtgtggcatattgtccgctttggcgttcggccagccacgcccccgccgccccatttgagccactgattgagtgctgattggaaaacagaaaacgaaccgacggccggacagatgggcggatggatgggtggacggacaactggacaagatgaacggactggggggatgctgcagggaatttggaacaggtaactgttgttgatgctcgttaaaatcgaacagaacgaggcgattcgaatgggattaaccaccagttgaccgcagcggagcaattaggtctcaaaggggagtatccgacgcctaagtagtcgcttaccgttattacgtccttgaagatgtgcgtcgcaggcttccttggcgtttgccgcggctgcatgctggtcgtcgtagttgttgttgtggttggtggaggcgggggtggtggtgcccgcgtggtcgtcgtcgtcgttgttgtcgtcgtcgtggtggtcgttgttgttgtggtggtaaggaaaccgagctcagccaaacgcttcatatggaagtccttttgagcctcaactgtcaagatttgaagattgcggtagttaataagagacgggtgaaacaaattatacaagaatacagaaaaaatgtgactgctgtgtaaatatgaaaatcaaataaaacttataatcacattcgtaggaagacttacccacacaggggttcatccacagcagacgccgccatccaacgcactggtacaggtgctggggatccgttccttggcaggcacaggtcgtcctcaacatggtccccagaatgccaatcatggctgttcgacacccactcggtctgccggcacattttttggtcacgctatccaccgcacaggcctgctcgtaatactccaactttaatctgatataggaaatacaaatagtagagaactttatctaaatgtgtaaagatagatacatttatcatcaagaataataattatatattttctctatcaattttttgtacgaattagtattattagtatttatttccgatttcaccacgatgcgcttaaacacagacttgtaaaccccaagtaagctttcaaaaaatgttgggatggcaatttctatcacgaaggcagtgcctctgccgttcccttcccacctgtcatgcgtcagttagctgcagatgcagttctcttagcctggttccgcccgagatgccggtgataagtggtacgttacctgcagtgcagcttctccttcacctgagattgatgtcggccaatttgtgccggttttactctctgcattctacggcatattatcgtcttgggtcgaccattccgctggagcatcagtgcaacttaatttatgaggccccaatttccggaattcgagtggtgatatttggtcaagagccatgcgacgtatgtgtaatatttcaattgcagattattgactcaatgcgacgacttgaacattccaatctgataatatgctgcctaattgtggttgcagttaggacatatatatgccaatattgctgtggtacgcctatttttgagccaattgcatatgtgggaaatactgggcgttttatttaaatgctttcttaagaatatattaaaataaggagtatttggaataaatacaatgaatattccttacactcaattgacttgttgacctcttaaaaatccaaaaaacctttagtttgcaggttacatgtcggcggcagaaaaacgctgtaggattgtcaagccgtttttctagggattcaagttttagaaacttttccatttcccagttggcagcagaacttttgcagcactaaaaagtgcatatttctatattttcaccctcttatctcaatctacgactgacgcaagccgagattttcttgcactcccttggttgcgtaatgcctgcaacgttttgtgcaaccaagagcttcgatggcagccaaacaaatgagcgttacccgccggaaacacgttcgcaaacggcacgtgttggcgcacaacgcgtcgtatacgtaataagtcaacataagcactctacacgttgcctctaacttctcggagaacccaactctgcctcctttttctcccatccctcggctgaagcatacaaaatgagcgtcattagcccaatttagttgtttaccaa

SEQ ID NO: 39638 - DNA, 729 bp, DROSOPHILA
atgacaggtgggaagggaacggcagaggcactgccttcattaaagttggagtattacgagcaggcctgtgcggtggatagcgtgaccaaaaaatgtgccggcagaccgagtgggtgtcgaacagccatgattggcattctggggaccatgttgaggacgacctgtgcctgccaaggaacggatccccagcacctgtaccagtgcgttggatggcggcgtctgctgtggatgaacccctgtgtggttgaggctcaaaaggacttccatatgaagcgtttggctgagctcggtttccttaccaccacaacaacaacgaccaccacgacgacgacaacaacgacgacgacgaccacgcgggcaccaccacccccgcctccaccaaccacaacaacaactacgacgaccagcatgcagccgcggcaaacgccaaggaagcctgcgacgcacatcttcaaggacgtaataacgcatccccccagtccgttcatcttgtccagttgtccgtccacccatccatccgcccatctgtccggccgtcggttcgttttctgttttccaatcagcactcaatcagtggctcaaatggggcggcgggggcgtggctggccgaacgccaaagcggacaatatgccacacaacataccgggtcaaaccaaagtccacagccacaccatgaatgctgctacggattttgccttgtcctgcatccatcactcgaaaaaagtttag

SEQ ID NO: 39639 - protein, 242 aa, DROSOPHILA
MTGGKGTAEALPSLKLEYYEQACAVDSVTKKCAGRPSGCRTAMIGILGTMLRTTCACQGTDPQHLYQCVGWRRLLWMNPCVVEAQKDFHMKRLAELGFLTTTTTTTTTTTTTTTTTTTRAPPPPPPPTTTTTTTTSMQPRQTPRKPATHIFKDVITHPPSPFILSSCPSTHPSAHLSGRRFVFCFPISTQSVAQMGRRGRGWPNAKADNMPHNIPGQTKVHSHTMNAATDFALSCIHHSKKV

SEQ ID NO: 39640 - DNA, 6240 bp, DROSOPHILA
gaccacgtactttgcggtcgttcagccgtaacatgacaacaaacaaacaaacgagccccaccgaccacccacttctaaacatgtgtgcatccccgagatggaagctgtagggtgcatcggcaccagcatcgtatttataacttaactttgtgtttgacacattcacgcggtctggctgcaactttcagcatccgacgtctaatgaagagctgctccgcggagattgaggaggtgcccgcggcaaactggtaattttatgccccgcttggcggcaactacggaatttcggagttaccatgctccggcaaccatcagccaactaacccgccgtgttcgtacggtgtcaattttaacgagttcggccgagtgccaacaaagttgcggctttcgcagactttgccgtggctaaacacctctaattcgatatcaaggcgcgcccaagtataagtcgctcaaactcaatttgatttaattgaatttgggttaaacctaaaacatgtttctggaagtttctctttccacaatatataaactgccagaaacatgcttttaggttggacattggtagtgacttgtcgcaatttaaaacaggtggctgttgttcttattgcaaaaaaaaaaagaaaatcaaatgcttatgctaacattcgactcgtaccattatatggggaacattaagtattttttgttttttactttaattaaaacattaaacgaccgacgcacatcaatttaaaacacagtatgatttctcttttatgttttcgtgatgctcatttaaaattgttttgatacataaaagcactatatataacacccttaataggcttcgtttttcaatcccaataatgttaattatagaatttgaattttatattatggctgtcaaggtaatgcaattaaagctttgcggacaccctgaaaacgaccaccatcacgttcgggaaatatacattgcagcgcccatatttccggttccgcttaacgcccgacttttgaattatgacctccaacctctacccaatacccacctgcactcgcggtcctccttgcagctgtcggcgaccacgtgacaggcgggcggtggatggtagtaaatgccattggagctggccggattactgttatcgggcggtcgctgcgcgcacactggatgcagtttttcctgtgcaatcatgcacatgtcgtgccgattgccattgccgttctgctggctgcttgtttttctgaaaccaatcgaacaatgggtttgttggttctccgccatcctgaaccatcagcaccaccagtaccactcggtggcccagccacttacttgcatagacaaaaggcgatgtccagattgaggtcctcgtgggggcccttgtagaaggcctgcagcgaggacatgcacgcgttgcgattgcaccggtgcagctcacagtgcgtcagcattggctgcaacgacgatgagcaggacggatcttcccggcaggtgtccaatgccgtgtgacaggtactctgcggcgagaggagcgaggtgagaaaaaacagatcgtagtcgctcaactttaagattattattattatgcaagatcttaaaagtataacgtttttatccaccgaataaagcttaaatatatgacagctttggaattaagttttgaattctgttatcagtgtctaatagctaatttttcgtgtaaatttttaaaaaaatattcggaaagtgtctagatgtctaaataaataaatttcgcccagtgcaccctaataaacgctacaaattgtgtgagctgcactttgcattttccatgtctcgtttcgggggcttttctttgcactcacctgaaagtgttgcttgattatttccgttgagaggtcaacttcgacatcctgaccacctgcaaccggccaaacgtgcccaagtgtgtcagtcgcatttgcatttgcatttgcgtagcagttgcagtgccatttgcatgaagtaaatgttgcccaagggagaggatcgagcatttggggatttgacgataggcaaatggtgaccgcagcggagatgcgtagagaaaatgttagaaacagttcattagttttcgatttgtgcaacccttttccagcatatttgactcgcatacggatgcgaatttggcgccatcgacacgcagtggcacacccaaaactgttctgtgccgcctgtcgccaaccaacttggtaatccaattgggtttggtttaggctcaatcgtccttgtttattttatttttttttttaaataaattgtaaaatcgctgagagtggatggcatttagaactaattaaaatgctggactcattggcagcctttgtttgtgcacatttgccgctgcatgctcttaattaatttcatttatttatatcgccttttagctttttatacgctcattcactctcaattggcttatttagctaatgcgattcaggtgtaattcacatgtgattcgtgaatctgcattcacgtaatgcttaactgaaggccagtatagaggtttggattattgaaaacccatacccatctgattagaacccaattactaagccatttccatattcgggctttaatcgaaatatcaatcactgtcgctgattggctcgggcggcagcagttatcgattgcattttaattaaccaactttttgttcgctcttcagtttcaattggtaatcacaaaacgttcaaatgcccccgcaccccagcccccttgcatgggcataaaaaatgggcgaaattattaaatcaaaataacagaaatgcacataaataacgtaaattaaatgtaaatattccacaaatttgtttattgcctattactggagtccgggaggaggcaagtagattgagagagtgagagtcaattgggggttattcgggggtaatactttcaacagtttgggggcgtggtcgcagggtctgcagggctgagcaaaacacaactaagttctatgtaacgcatatgagagatataggttaaatattgtatttttattggttcgactttaaaaactaccaagcctactgataaaaatattctgatttagaggggggaatcgaaggatatactaacattaggccgtactcctttgtgactgtgtatttaaatggggatatgatttatttatcggaatttctgtagtcccagcttggtattcatgattctatgctaatgttcttacgactgtgagaatgtgtatctttagcatactttattggttttcagtactcggaatgtctaagagtgtttgtgtgtgtatgtggtctttgaaaggaaaacataaacgattcgctgcagactcagcgcaaataaaatgattttatgcctcaaataagaaaaggtatgaatgtaaacgcaaataattagatctcaaacggaaaatggaataagccaaacaaaaagccgcgcggcagcggaaaagcgaacgaaactgtcttaaggaaatcaatttgtatgttttcctttgaggggagtttccccactgcttttagcgaatccaatctcagttggttttcatgaattatgtggatcaaaagtcctgaagaaggaagtatttgatgtttcggtggctttgttgtatgaaacaatgagctcgatgtcttgtgaacttgaatgtgaaatgtatgacacaagggtatgcacttgaaggggtcttggatcttaaaaaacttgatcgaaaactctttaaatgttatgtttgattgtagtaactgtattggtttggattcaaaaactgggtgcgttggaaaaaaatttgaaaaagtgtgctggaattgaatgtaacaaaattggattgaatttcatttttgttttttggttttagttttaatatatattttaggaagaattaaatgaattttgtttaggttttggttttgtttatagttttcattttgctcacttaacatacgaaaaaaattagtatcgaacatattcacaacttgtatacaattctctaaattcatttgtttttctagaattctctgttagataaacaaaatgacaaacaaaattcatagaaacgaatttatttttaacgcatcggaagcaatgattttgttttactttcgtttttgttatatttcttgtacgaaaatttcaaaaactttcaaaacaaatggcaagctacggaaaaagaatggaacacaaaagcaattgaaagattcgagatatgtaattatttatatatgtatagaaatcgtaaattgtataaattgtttgtagttgtaactatacttaaggttctttggtttttagttgagcaattgccaaaaattatgcacaaagccgagtggcgtacggatcgcgccaagttgtatatatatatatatatattgtatgtatattcaccttaaacacaaaagcaaaaattggagtgaactcgatggtttaaattcgataaaatttacctgcaactcgggggtgtttttggttacagggggacgacacagaacggaaatcataaataatttcacagaaatctatctaaaatggtgaacgaacgaacaaaatgatacaacgaactttttgcctgttaattagttctactagtttgcacacacacacacacacatatttgtctttggtcagctgtgtgtacggctgcgtattaatatatttgaatatattttttaacttctagttttttgctcggttggtttgcagttagttggtcgtggattttgttatttatggattacgttcatgctaatacgtgtacacatactttggtagtaaacaccggcatttccgtttccgccgtagcccaagcccgtatcaatgatatcgaatggttcattatcagcagccgccgctgccatgtgccgctgatggaagccgcttatattgaacggatagctgggcacgccgtgcatggagcccagatagttaaagctgccggatagacccatgcccatgcccagaccgtaaccggaaacggaagtggtgaccgtgccggaaccggagccggagcccatggcaataagtggcgtatcaattagggcaagattatcattgaagattctctgatgcagtttctcgtccatgcccaatattcttactgcaatttgaggttagcaagaagaaagagggtagaatacttgtagttgtagttgatgtggttgttgttgttgttgttattaatcttgttcagtgccatctatatagttgtttgatctgttgttgtagttggagagttactgttgtgactgtagttgcagatacgcagcatttgagttatccaatcaggttcgcataaatttctgtatatcttgtagcatttggctttcttacaatcaattttattgctataggtatactatttttttttttttttgtacgtatataaagaaacgcttaaaaagaaaatgatattgttcgaatgccgaagttacttggcgcaaaaggaaaaccctttccatttggaaagaaaactaatacagatagtgtaaacaaaacaagagagaaaaacgtcaacaaacatacagagggcagtgtgcagaatatacggtgcaacgattatcgttcaaaattagtgcagtttaggcgtgcgaaacgttttgcactctgaaagtaagggacacagaatcgctttccgaattgtttctagccccccaatcgatttccattacaggttttgcgtctcgccacgctccgattggcaattgctatcaatgggaagcataaacacaagccaaacagaaacgcctgtccctttgtctgaaagtctgtctgtctattcgtctgtcggtctgtatttcagatgtcaagcgctgatagagcggctaaatgccacacgagtccgccccaaaacggtttgcaaccgcagcagtagctccgctatcactgcagacactcagaaaaaaatgtagcgaattcgttttgatttcataaaaaagaaacgaaatatcactatttttgcagctaaaattataaaagaagcttgtcatattttctcaaactacttgtatttacttaatatactacacctaatatgacatctacattattcgttattaaaataattttattttccccttacagaaacataatcaagtggtattggaaggtacattttgtaataaaactcgctggcctgtaatatctatgattgtattaatatatggaatatagatttattatctaaatccaatataaattatatcagattctattcaaataatattttgaaaatttcctaaaaatctaaatagcacctacaacgtgcctgt

SEQ ID NO: 39641 - DNA, 879 bp, DROSOPHILA
atgctgcgtatctgcaactacagtcacaacataagaatattgggcatggacgagaaactgcatcagagaatcttcaatgataatcttgccctaattgatacgccacttattgccatgggctccggctccggttccggcacggtcaccacttccgtttccggttacggtctgggcatgggcatgggtctatccggcagctttaactatctgggctccatgcacggcgtgcccagctatccgttcaatataagcggcttccatcagcggcacatggcagcggcggctgctgataatgaaccattcgatatcattgatacgggcttgggctacggcggaaacggaaatgccggtgtttactaccaaagtggtcaggatgtcgaagttgacctctcaacggaaataatcaagcaacactttcagttgagcgactacgatctgttttttctcacctcgctcctctcgccgcagagtacctgtcacacggcattggacacctgccgggaagatccgtcctgctcatcgtcgttgcagccaatgctgacgcactgtgagctgcaccggtgcaatcgcaacgcgtgcatgtcctcgctgcaggccttctacaagggcccccacgaggacctcaatctggacatcgccttttgtctatgcaaaaaaacaagcagccagcagaacggcaatggcaatcggcacgacatgtgcatgattgcacaggaaaaactgcatccagtgtgcgcgcagcgaccgcccgataacagtaatccggccagctccaatggcatttactaccatccaccgcccgcctgtcacgtggtcgccgacagctgcaaggaggaccgcgagtgcaggtgggtattgggtagaggttggaggtcataa

SEQ ID NO: 39642 - protein, 292 aa, DROSOPHILA
MLRICNYSHNIRILGMDEKLHQRIFNDNLALIDTPLIAMGSGSGSGTVTTSVSGYGLGMGMGLSGSFNYLGSMHGVPSYPFNISGFHQRHMAAAAADNEPFDIIDTGLGYGGNGNAGVYYQSGQDVEVDLSTEIIKQHFQLSDYDLFFLTSLLSPQSTCHTALDTCREDPSCSSSLQPMLTHCELHRCNRNACMSSLQAFYKGPHEDLNLDIAFCLCKKTSSQQNGNGNRHDMCMIAQEKLHPVCAQRPPDNSNPASSNGIYYHPPPACHVVADSCKEDRECRWVLGRGWRS

SEQ ID NO: 39643 - DNA, 4154 bp, DROSOPHILA
tccccaaaaataatataatttgttaggattttagaaatcagaaatcagaaatttggtaagtgccttaatccctacatactaatcagtcatattcttcccatagtcctgactttaatatatgcctatccatattatccattatttagcagcaatcgttttcatatttatttcaaattgccgggggcatgcggattaaattacaggtcagcctggctaagtgcaattagtgaactcacctcgttcgtccatggagggtcctgtgtaggtgcggtgggttatatcgctgccggcaactaaatcgccgagtggtgctgttttgtgcattttggtgccagtgctgaataaattgcagagttgtaaagataattaagtgcaaattacaaaacatagtgctcaggtgtgcggaaggattggagttggggtaaactaaacaacaaaatgcataagtagatttagcaaattacataaatcttgtttgttacggaaagaaactgactcaaggtgggcattaatcggcttagggcattacgaatacaatggatttctagatgtttggctactcggatgtctatacgcccccatgcctgcccaactggcaggcattatacattaattttctgtctccagctaagaccggtcaactcactacgatggatattcacgaagatgcaatgcattaaaatcagattatataaatgctcgacaagtgcccagggagccgattagcacgagtgctcgaagtttgcttgtttacttgctgccggcagctggacttattcattagttggctttttaaccggaaattgtggtatacccaagtgagtcaattattttaaaagctttttgcataaacttttcagctcctcggtggttaagagtagagttaatgaaaggctacatatggagcggtggattctaggggtctctggcaatcacacagatgtgtgtgtatgtgtgggctctaaactttctgaaaaagttgccagtcgaagatggcaacttaagtcagtacagatgggggcaaggcgggaaaaggaacttttccaacttggccaccagcggcatacttaggtgggctgggaatcgtgggtgcgggacccggaagtccagatcccgtcgtcgagctctgatcgccgtggctgtagaaggtgtgcgagtgcgggtgcgagtgggagtgcggcccggcatccaccaccaccaccacgtcgtggtccagctcgtcattgtggtggtgcagcgtgactggcggcggcttcttgttggccaccacctccaccacaacgtcgtcgtcgtcgtccagagtgtgcggactgtgcgaggccaggaccagaggattgttgatgccccacgacggcggatggaggtagtgcgggtaattcgaataaatctcggctcgtatgcggtcgtcatagtcgtcgtcctcctcgtcctcgtcctcatccccatggccaccgggatcctcgtccacggtctcattggcctcgtcctccggatcgctcaatccgttgggctcgtcgtggtactcgatattgttggtcatgagctctgtgccattcatgccgtggtgcctctgcctgggcttgggtttggatttcggtttgggttttggccgcggctttgctttcggtctcggctgcttcaattttggcagaccattggggaaaaatattagtctatctgcaaggggtttgggggaaaaagtgggacgtgggtgttggatggtgcgtgcgtgcgaaagaatagaaaagaacatttagtgctggtgtggtgcaaattgttgctattaaaccaagtgtgccacagtgtgtgtgtgtgggtatttaattagtgcaattagtgtgtacttgtataataaaatttagcgaaacgagagaatgggatcattctgctctggggtgctgttaatccattagtgcaggtggccgagtgaagtggaaaatgaaattatgctttaaagagttgttttcttttttcggtggtctggcgtgggtttcaaatcaaagctttcaactgagcgatgttaatatgctagccctagtcctgcacattgaatgattgttgttagtatagcttgatctagcgatagtcttatatctacggttagagagatagtaatttctagatatagtgttcttgggtgcaatcaatctaaagcacggactcagttcgctgggtggcagttaactttagcgagtgacgagtatgtttaatgggctgatagcttacagctacaacaaacttttttaagtgacagatagagaaagagagaggtagagagagagagagagagagagaggtagaaagagatagcacggcagctttggtttacattgatatacattcgtatacgtgatatttaggattactgatagcattgctaatgttcgtacagtatgatatatattggatataggcatattgattactgtttactgatcgcagaacatgggtttcatttttgggttttctctagttggtttttgatgcagaagcgtgcgatattttagtttctggtatttgtttaggttacttaaatggttaggctagtttcgggtttgagcgtttcacaaaattacaataaccaaatgaatccaacgaacgaaaaatcaactcaaaattcagttaagaacgaaccaaatcagtttcgttataggcaggtaaaggtgatcatcgttttgaataccatagggttgacagagaaatagagacacataagaacagaggacaatgaaaataaaatctatatggtttatccacgattttcaaagcatttgctttttgtttttactttcagctgtatgtgttgttgcttgttgtagttgttattggttgttatagttgtttctgaagtcacggtcaacagttcagcatcgccagtcgaaacttacccacgcaaggattgtgattaacaatattaaagatacgatcacagcgctttttcatatggttgttcgggcagatgcatccgaacatgggcgacagacgcaggttggtccaggagtcgtggcaggcgtccctgaaacgagaacaaaaaggtagatagtccttattaaacactcattccaccccaatcgagtctaagtcatcacgggctttcgggtcccgactaattgaattcatttcgagtttctaaccgccgcaaccgaagccgcatcgccggcgacttccgttcggggcatgcaaagtttaaaattgccaattacatcaaaaatgcatgtgcacattaaacaattggatttctattcttctttaaatgcttagcaattaaaaaatactcataaaatgaatttctatctcttttttttgataataatgccaagctttcgatagagcttgtactaagctctattacaaataacaaattttgttcttcacttttatatttattatgtcatattttaaacatttaaaatgtactttaagaccctatattttttagagtgtacccacacggcgctgcaattaatattttatcgcataggtggatctcagcccgaaccaaaaacccgcagccagaatgcttggcatgcgtgcggaaagttttaggctgggttggcgagggatgaaggaggcgccagttgaagtggaagtggagaactttaagaccaagtttgaaagtctgtaccgaagtcaactcccaactctcccgccgcccacctccccactccccagtgccgccgcaaaaagtcatttcgagttattaaaacattcagaacgtttgtattcaagtgtatcgaggcaacgagccatcgagccatcgagccatcgaggcaaggagccagccgagtcctggcaaggaggaaatcgcgtcagtaaggatatgtgatggctaaaggaagcagctagatgccggcaagcaggaagtttcatttcgccttctgttcgctcaacttgactcctgtttacgctgctgtctgctttttgctttcagtgctgtgtgcgttgtgttttttgccaataagcgcaagtattgaatgttgcaaggtggctggtggttcttccactttttaagcccgaacgggagaacacgtggctacactcaatcttctctactttttgccaactgccaatgcaaattgcatttgccgttaaccattaagcggcacaatcacgttgcggcacgaggcaaatcaattttcttattaagtcaaaca

SEQ ID NO: 39644 - DNA, 825 bp, DROSOPHILA
atgcggcttcggttgcggcgggacgcctgccacgactcctggaccaacctgcgtctgtcgcccatgttcggatgcatctgcccgaacaaccatatgaaaaagcgctgtgatcgtatctttaatattgttaatcacaatccttgcgtggatagactaatatttttccccaatggtctgccaaaattgaagcagccgagaccgaaagcaaagccgcggccaaaacccaaaccgaaatccaaacccaagcccaggcagaggcaccacggcatgaatggcacagagctcatgaccaacaatatcgagtaccacgacgagcccaacggattgagcgatccggaggacgaggccaatgagaccgtggacgaggatcccggtggccatggggatgaggacgaggacgaggaggacgacgactatgacgaccgcatacgagccgagatttattcgaattacccgcactacctccatccgccgtcgtggggcatcaacaatcctctggtcctggcctcgcacagtccgcacactctggacgacgacgacgacgttgtggtggaggtggtggccaacaagaagccgccgccagtcacgctgcaccaccacaatgacgagctggaccacgacgtggtggtggtggtggatgccgggccgcactcccactcgcacccgcactcgcacaccttctacagccacggcgatcagagctcgacgacgggatctggacttccgggtcccgcacccacgattcccagcccacctaagtatgccgctggtggccaagttggaaaagttccttttcccgccttgcccccatctgtactgacttaa

SEQ ID NO: 39645 - protein, 274 aa, DROSOPHILA
MRLRLRRDACHDSWTNLRLSPMFGCICPNNHMKKRCDRIFNIVNHNPCVDRLIFFPNGLPKLKQPRPKAKPRPKPKPKSKPKPRQRHHGMNGTELMTNNIEYHDEPNGLSDPEDEANETVDEDPGGHGDEDEDEEDDDYDDRIRAEIYSNYPHYLHPPSWGINNPLVLASHSPHTLDDDDDVVVEVVANKKPPPVTLHHHNDELDHDVVVVVDAGPHSHSHPHSHTFYSHGDQSSTTGSGLPGPAPTIPSPPKYAAGGQVGKVPFPALPPSVLT

SEQ ID NO: 39646 - DNA, 2336 bp, DROSOPHILA
aaaaagtttcgtacactcagactgagaaacttttttgaggtactcagagaagtgcaattaaatggcaagtaatcgtttcccccctgcagaaaaacgatttaatggaattttgatattctgtacctattttgattttgatttggcttttgcagttttagttttgttcgaattgcatctgtgcaagaacactgcagcacaccacacagaaaatatgttgtaacctgggtaaaaagctctattgaattctgtatttacttagtatgtgacagccaattgttgttgctgctgtttgcggcacgtagcatcgctcagcaaacatttaatacgattcaacttggcagcaagaaactgagacacacacgtaccataaccctctatatccgcactacatcctctcagtctgtctatatatctggttgtcttgccgcacaataaaatgcgaaacaaaaccgcaattcaaagtgaatataaattgttttacggctgacgtttgctttgaatttcaaattgttcccacaccgcagtggcatggcatggcaaagaaaaaaccatgttaaccccctggcagccccgtgggtgctttgggaccactcagctgcatcgatggctggcgaaaggtcattgtgttaattggagcgttagtgatgatgatgtcctccactatctctccattgccgaaccctctcagggagtcctgctgctcattgagccattaaatatcgcttggcaattagactgggccatttttagtggcactatgaataggcaatggaccgcaagccgccaagcgatgcagtcgaagaaatgtggctaggtttctaaagataaaaagtgctatggggagtcatcaaggaggcttaggatactaaccaatcttgttgcaaaatagtgttgatatcataaattagacgtatatatcataaatattatgaaaattgtaatttaaagttaaatatttgttatcgtacctagttgatttataaatgcttctttttagcacttaaataaatttaactgacataagaagatatagttttgaagcatgttttatgaaattagttgttccagtgcaggcaaactgccaccacttacccgatcgtccgatggccagatccgtctccaaggccgttgtggccgaggagagtgacttgtcggtgggcagcgcggcgggcggcatgggcagcgggcccaccgtggaggtggtggttaggtcgcagcactcgcgctcggggaactcgctgccctgcgccaggtgcagggctccaccgaagaggaccacccacaggctgaggcagcaggagaggattttcaggttttttatgcgaaagcgggtcatgttgtggttatagcctcctcgtccgccacttcaaatgttggtaaatgatgtttttttttttctatttgtttttgcaccactgtcgctggtggctggcttaatttacgttttgagcactgtgcggcattattttcagttttcgtcgttcacacatgcctcaagctggggaatgtgtttatttcacttgcagaactgcaatactttcgcttgccttaaaataatattcagagactttagccaagtgttttaaaacaaactcccttcgccaaatgccaaagtgttgactttaaaacatggggctgcgttaggaaaactgggaaagcttggaaactgggcaatggaaaactctcgaattgagtggcacagaaattgcaaaagggaatataaagaggacagggacatcacgtcgacagtcaaactatgaacagcatttacaattactttcgacaaaaatgtatatagacaacaatagacataatgcagcaataacgacagcaacaacaatagtagagcaaagacagagccggcacgaggggggaagaaagagagggctagacggcggttccgccctctgcaaacactgaataacataaaaactttttcatttacaatttgctcagtgggtctatgtctatggccatgttgcaaaacgaagaagacaagcgggtaacaagaaaatgttgaaaagtttttggtaaatgcgaaaagttgtggctaccaccgctttcctcttcctgttgttgttgttgttattgccatcgctgttattccttctgcggtttttgcttccaccgctccgctatctaagtccgccgtgtcggtggcgtatgcgcaatatgcagtgtgcacatcatcaccaagaccaaggcaaactgtaaattcccaagcgggaaaattaattcactttgccactctagcagcgcctttatcgggcaaatcgcgcagctcaaatgtttgccgaatcaataaaaatataatttgctgcgatttggctcaaagg

SEQ ID NO: 39647 - DNA, 258 bp, DROSOPHILA
atgacccgctttcgcataaaaaacctgaaaatcctctcctgctgcctcagcctgtgggtggtcctcttcggtggagccctgcacctggcgcagggcagcgagttccccgagcgcgagtgctgcgacctaaccaccacctccacggtgggcccgctgcccatgccgcccgccgcgctgcccaccgacaagtcactctcctcggccacaacggccttggagacggatctggccatcggacgatcggttaaatttatttaa

SEQ ID NO: 39648 - protein, 85 aa, DROSOPHILA
MTRFRIKNLKILSCCLSLWVVLFGGALHLAQGSEFPERECCDLTTTSTVGPLPMPPAALPTDKSLSSATTALETDLAIGRSVKFI

SEQ ID NO: 39649 - DNA, 2138 bp, DROSOPHILA
gcatgagtagctctaaagtctactttagaagcaggcacaataaatttataatacgatttataatgttaaggattcaatattgttgccaaaaaatgtgaatcactgttaactgcatgacgacctggattaagaaggtaacaatttgcaataacgaagcttttctgtttcaatttttgaaaggatttaaagtgcaacatttcgcaataattaatagtaatattaaattaagataagcacaacattataatgggttttattcagcgtcaggcaggggtttgtaacaactattagagactatttaacctaatccaaatggatccggccatcacttggcctggcagcacttggctcccgtcttggcggcgcattggcattggctgtttccggcgcagttacctccgcactttccggctgagcactggcagtctagtagaggtggagagttcattctattagtattactttataaaatataagttttcccacttggggtgactggtactcactgtttccacatcccttgcaaggcatcttgttgatttgttttttgtttatttactgcggtaattccgagtcttagaagcttgttgaacttgctgatgccttctggttgggaaatcctcctctttatacccgatccagtccaatcgaaactgtgggccgttctgcccgataagataagaaagccgtgtgcaagtcgatcggcgtgcgcaaaagcatttttctgcccggcgatgataaagcgatttgcacacgccctgataacaggaattgatttttttggtgcgcaaagcagtgaaagctctataagaatgctggaccgccagtcgacagtcatcaaacagtgctagctaacggctaagtgaatcaagtttattttaatataatcaacaacaaaatattttaacacaaaatgggttgcaaggcttgtggaacaagtgagtgtactagtaatcatactagttaaacaagtgcggttgctaacttccctacttaatcctcagactgccagtgctccgccaccaagtgcggtgacaactgcgcctgcagccagcagtgccagtgctcctgctagaacggacccaaggacaagtgctgctccaccaaaaactagatacaggacccatctcgagctcatctgtgtgatgaaagaccctttggcatgacaacgaaataaaatacacaatcaattgaaactaatgtttaaaatcaaatctttattggccattttgacaagaatagttctttagttatttcccacattagctttagaaattgcacacccaattagcgttcgaaattacatttaaaacacttacacaatgtacacatttagttcaagtacaccgtgagaacaggacaatcaaataatagtatccaaatatcaacattgtttttggcgagcttctctcgtgtgtatttgtgtgttttgtgctgtttgtttatagtttttggggaatgtgtgtgtgtgcaatagctttcacaattaaacattaaaacattacgtacacagtattacatttgatttcgcaaattgtgagtacacaaaaggaaatccgctcccgttcgcatttaagtgtttcaagtttattgaattgtatatttatttggggtgtacttaagtcttataaaattcttaaggttcacgtacaaagctaagtgtagtattgtgttattgttgttgtttacatacataaatgattatgtttacgatctctcaaacaaacgtaatatggtcctcgtgtctctaatagctgactaaaaaggcaatcgcatgtggcgcatttgaaatgcattgcaaactctgccctgatgactcaaacaaacaagtttcaaaaaaatatacattgattagttcaaatttttgcgcattttcagcattggaagccaataaaggatggggttacataaagcaattcaatcttacttagattataactaaaattaaagcaatcaatccctgcgttgctgctctcgttgattgtttttccactttcgtttaacataggcttagcacgcgaattaaattgtatatcaaagttttaaaattaggccataaaattaaaatcaaaatcaaaaatttagattcaacaaatagttactcactaactaaaccgattattttgtcagtatcatct

SEQ ID NO: 39650 - DNA, 138 bp, DROSOPHILA
atgagctcgagatgggtcctgtatctagtttttggtggagcagcacttgtccttgggtccgttctagcaggagcactggcactgctggctgcaggcgcagttgtcaccgcacttggtggcggagcactggcagtctga

SEQ ID NO: 39651 - protein, 45 aa, DROSOPHILA
MSSRWVLYLVFGGAALVLGSVLAGALALLAAGAVVTALGGGALAV

SEQ ID NO: 39652 - DNA, 2159 bp, DROSOPHILA
agtccataatacccacgtccccggacgatgtggaagaagtcgcggcgacggccaacaatgtggtcgtcagcagtcagggcgccactctgagcaccatttcggtgacgcccgcggaatgtgtgacccttgtcaagagcgaggagcaccaggcggccgaagcagcggcagccgcagcccaagcacaccagcaaatggtagcccatgcagcagcccagacctccattgcggcggcggcggctcagggacatgccgtgaaggtcttagagatcacctccctagactccaactcccagcgcgagatacaacaagtgagtagctccaaagcagtgaagagttccttagggtcttcaatcacctcctctccccacgcaggcggtcaatcatctggagcaccaccagcagcagctccacctgcagcagacgaatggccaacatcagggcgttcccaccatccagataggccgcgatcactatcagccattgtttggcaatgccggcaccactgcctataccaccacagcggctacgagcacatcgcaccggcaagacgacgagtacgatgccattggcgtgaatgtggcgagcaaactgcgctccatcaacccgacgcagcggatcgtggccgagaaactgatcagcgacgttctattcaacgcacagctgggcaacctcaccgttcactcggccctcacgcagtaatctctcttgtccccctagactaagtatgtgtagtctctggctttatatctccattttgtctgtgtcccaacctgcagcccggccaacatgtgtcgcccgggcagcagccgattgtaccatacagtttgcatgtagttttaattattctatacaataaatagattgtatgtcttaagctcatcaccagagggtttgtcattccgtcgaacttcctgcgcccgttagcttgttccacacaaacctggcaaactggacaaaaagaggagctgctgtcttgaggtgatcgccttaagaattaggactaacataccgtgaccggcggcatctcgatctgttccgcctccgtgaccagttttcggttgctctgcatgtagctccagcccagatggatccccaccagactggggatcatcacgacggccaccaggttgcgcgacacgaacgagggctgcttgctcatctttacaaaattcgtaaaacggaattattattatttaacagctatcacaaatcaacaatgacgatgtgaccgcattgcgatgtttgtttaatcttatcaacgaaaaataccaacctataacgctgccccaaaacgggcggctagttttgaataaagtttctatctcccccaacttggtccaaagtccaacgttttcggggataataatgggaaactaaacgtctcgcaattctttgtctgggacttcgattgcttgggcagataagcatctgtcattagtttgttgcggtggctggttttaataacaaatgcggtggaggtggttagagtagatcaatggcattgtaaaggggaacttcacttctcgtagggtatattagttgctgcgaaattctttaaagactttttgtgattatagaaggcctgaagtaactggtaaggtccttcgcttttataactaacataagattataatagttaaaaaacaaaaatgtgtaattatactactttacgtacaagttaaaattgtctaagctttgaattcaaataacagaaagatgaaaaataattttaggtgcttaaagttcttagtggacaaactaattcggaaaaattagaaaatatgtatgaaataattataagctgaaatctgaaattttaacttaatctgttttaaaaaccgtaaaataagctataaatttatcgtcacaataaaaccaattttatttcaaattatgaattaaattagaaattaagtatgaccgtaacctcccgtctcaatccctgttctggtcacactttgcaggcaaggcgaagaggcagttaactaactgttaattgatagcccactgcgtcgccaactaaccttttcccatattcccaactcaacccattaagtgcgaaatccacacccgcgtcgccggaggggcgtgggcgggatcggatggggcgctggctttggggccaagctggaggctaagacgcggatgcggtctatgca

SEQ ID NO: 39653 - DNA, 159 bp, DROSOPHILA
atgagcaagcagccctcgttcgtgtcgcgcaacctggtggccgtcgtgatgatccccagtctggtggggatccatctgggctggagctacatgcagagcaaccgaaaactggtcacggaggcggaacagatcgagatgccgccggtcacggtatgttag

SEQ ID NO: 39654 - protein, 52 aa, DROSOPHILA
MSKQPSFVSRNLVAVVMIPSLVGIHLGWSYMQSNRKLVTEAEQIEMPPVTVC

SEQ ID NO: 39655 - DNA, 6224 bp, DROSOPHILA
aatgtggcaaagttctaccatcatttcgaatttgacatgtacgatatttattgactattgaccgctaaccccatccatcggtagaatctaattaggacgctcatgtgcagctccctaagctcctaagctcaccccaaaaaaacagcatacattcgtataccacttaagaagacacttgaaataagttagctgctttctagccctctaagtttcgcagatgaatcaaacccttaaattacgagtaagcgaattcaatgtttgaatgttgtacgtttgacgtagtaccatacagtaggtgtaaggagtgactagctctatttattaccaatcgatcggcgggacacgacttctgcaagcataagatgtacataaatatttccgacacagaatcagcttttcatatatatttatataaatatatatgtatgtatatctttagccgaccgtgtatgtagttttttataatgccggatcgaaactaaaataaaaccaaatcatctaaggtcgatattttcataaatgttttcaacgcaagacacaaagatcagacacgaacagaattaaaactggacaactacaagaatatattgcaaccaggcggtaaaacgtctgctactcctaatgacgccacaatagggaatatataggggcgcaaaaatattaatgaaattatatagccatgcataaatgtttgtacgacgtgctcgattagcggacgttgatgtgtgctagctatcctattgcaaaacacgagaaaagccaagtagatcatgcggggcatctgctaatgtttgtatgataaatgtgaaactatggaaattattttatctgttttagccgtaagttttacgataactaaagattaaccactgtatatgaatgtactacttactatcgagtggattatgaaataataaaaaaaaacttcctgtaagggctcgcatatcatttatatggcaaagaatccatcctctcgcagatattgctcctcgttttgaggctacaagaggaacctctcgtcgatgagggtcttgcgggagatgttccttcgcacccaatggcggaacacttggcgtagtaactgaaatggattattttttaattattttgttaatcagttttgaatcattatcctactatgtttagggcacaagcgccagcagctgcaattaacaaattagaggtcatcaagaagatcgacagcaccaagaggagttccaggacaaagatgtgcaaatggttacccaagaggagaacgcgagagaagctgaacgagtcgtctatgtaaaaggtacctctgtctgaaaatttaaatggatttaatacataaaagagaaacttcgaattgggtactcactttccgtgatgtagttgtctatttcgcagttcagcaattgttccacaaacgacttttccttaataatgtaatccatgtccttgatagcctgtcacaaatataaaaagagaacattccatcttagaataaaactgagcttacaaacagcaaaaagagttgagatttattagttactaggtattctagactgtagctcttaataatgctagaatctgtaagcttagtctttcgattttttagatcctcagatctcagatcttatacgggcaaactgacggattcggcttgatcgactaggccatattaactggttacatacttcaatggatcaattaaggtagactttaagcttacatggtcgataaaggcgcagaagaagcgattgacgctggcgtacgcaatggaggtacgttccatctgtccatcgatgctcggaacgatgtccttttggtagagcatggtctgcgaaagggtgccggtcagactgcgctgaaagggaagcaggagtcgctccaggtagatgctatagtaaaaacactatgataatcaatatcctcattggagtaaagtcaaaatcttactgaaggtttctgggaggcaggatgacgtacgcctgcttgtccgagtccattagcaatcctcgtcgcccacacatggtctgggttctctgcagctgcaaaatcatcgaggacatatccgtatcggcaaagccgtgcggagatcgtccgtggatgtagtaaccaaatcctggctccgtcagtgagaacagagagatgttggccagactgcacaggtcgatgaacttctggaggggattggctataaacagttggtggcctattatctgaagtagatatgtgagcagataagctgccgctataaggcagcaacgtagaaaaatgtcacccttggtaaacctctccagaaactgatagccagcgatgaccacaaatacctgacccaaggtggagtacttctgggtgacacttaggcgaatccaggcattggccgtgaagagaactcgccaggcggagacgctgctctcggccacaaaggtgcgcacgctagagcagagagatgagctgtccagattcaggcgttgtccttcgcagctgctccgcggtctttcccagtcgatgagaaacagttccagctggctggagcgccacaggtggatgcccagaaagaggaactgcagcacaaaggcggtattgagtaggattttcagtaggcgagaattggaggcttgcagcagtaggagcagcagagtagtcgccagcagagcatatgccacatttccggccagctgcaggagaaattccataagactgctcatctgacagaggtccgccttccgccttcttctcaaattctggagacggaagacagcagctgcaaaggccagcaaaaggagcagcggcagcgccacctccaagatcaaccaatcccaaccacgttttacttggtcgtagctaatcctcagggtgaatgggtacagttgggagagcgatatatttcccgatcccatctctatgtgtcggtatcgcaggcgaatgagcggcagacccactctatccggctgatccttgtccagcgtataacgaatttcgatgtcctccacatatcgtaaggagtaatattgctgcagcttgtgggcatcctcgtagcgcggcatggtctggtgaagatgactatcccgcggcgaggcggagatcagctggaaacgtttcaccaactgccactcctcctgctggggtcgctggacagatgaagaaattacggaactgagattaagttctatctaattgagtacatcacactcctcacctggttttccggcgtcagggtctcgatgagtacaggtaactggtgaagcaaatactgccagttactactgaagtttagaaacacggtgagaaactcggcgttgtgccgttggttggccaggtcaatgagacgctctagggtcagctgacaagatacctccgactccctcttgggtagagccactcggaggctaggcgccttctgttggcacatgttcagcatctccggatgaaaggcaccccaccgtttgagtccgccatctagaccaaatgtggtgctaaaaaggcgcagctccttgcgatccggcagctgaagcgtcttcgaaagcagctccttggtagcccgacccttcttgtagaacaggaacggctgcagggatcgcacctgttcgccggagtgggcatacttcatgaccacatcagagacctgggtaagcaggaaggcgctgcagggcgagtgcttttccagggagaaatgggaaagcacgcacagattggccagttgctggcaggcggtatcgttgcgcagtgtcaggcaaaagaaggccacaaacttgagctcaccaaagcggctgggtgcacttgaatccggcgtggttgtcgcctgccagaaggcgttgtagtgcacatacggtcggagcagggtgctagccaagcagaagtcctgataccggaaattgtgcgtcatatcgcaggaatggcaatctcccgctctgctcatcggatttgtatgggtcagtatgatgccggaaatgagtggatgcactggcaactgactggcgaaggctgccgtggagttcagataccgatagctgcactgattggtaggtcgaggctggggtagccacaccgaagtgcaattgtcgctcctgtccggagtgcaaatctcatcgcaggtgggccacgtcttgccgcgctcatagatggacagatgaccagccgggcacttgcaggtgaattctgggtgggcaataaacaagaagcaggtgaattctgggtgggcaataaacaagaagcttttatttcagtaacatagtaaaactttcttctaaccatacgaatgcatatcctatattcatagatctatcatatgatcaaggattgaaaatgtatataaactaatctattcattttgtcacaattatcaatcattttaagatattatatatataaaaacagtatacaactttcaattcaattcaaagcgaaactaaaaagtttatcttgttttttttttgtataaatacccctaaaacgagttttagttttcttacacaacaatgtccttattatctgcactatttatacatattttaaataactgattacaaatactttacttattaaatcaaacaacaggaaatcgttgaggaaatctattaagaataccaatagtttaatttatattagttcgaaatattaaaaatatattaatatattaatattaaaaattgtttgattatagtatttcctcttcgagatcgtcaaaataaaatttgtgtgaagtttgcaaattgtgctaagtgacaaatactgatgtgaataaatcttaagtattcgaggtctgtgacctataaaaaatatattaatcgcaaaaagccttgtcgctttcaatgacaaaaccttaaaccaataaaatgtttaaataaccgaatattaaatttggtatatacaatattacagctcttttgcagctgaaaatgaatactttctcttgagtagcatgcaggtccttgccccttcacatggcaccccttttggttctgtttgatcaatactaccactcactgtcgggttgcagttttccttgaaccccatctccgccggcgacctcattgcagggcacacagtcgaataggttgaggttgtagaactcgttcttgaggcactgcgtcggattctggaagcgaaaagtgtgcggcgttggcagctgcgagggatttgtggccgcggtggtcagcgagcagatgggcactggaatttgtaaggcgatccagaaaagagcacaacaccagttgatagcccgggagaagcacctcatcctcatcctcatcctgttctgattttaggagtcgctgctcgctcttcaatattcgaaagggtactgaattccctggagcgattgcagctgcaatttggaagtcgcccaggaaggcaagtaaacaagtggactcgtggagggagtggtgttgctatagctacccaaccccccgattttcgccgggcacgcatgcaaaatggccattatccggagggttggctcaggtgcttactccctctcggccgaatgtcctttgaccaggaggccaccttaagtgtaatgagtcctcgagactttttacctgctgggtttcctttcatattccagcacttgcgtgctcaaaattgtgattgccatcattattagttactttcttaggattttgcatacaatttgtaggtatgtaaattagcaaggactattttagaaattaaatcctacgtaaaggaattatttgttgggttacttaattaattattctctctaaagagaccatttgtatagtcaattcttttgcacttctacgtttttaaatgggtttgaatggtttttgcaaaaattaaattagtaagataataataaataaaaaataaaaataaataattcagattgtataataagctaaatcgcttttacaattattttcctatattatttattttttcaattcacttctaaaatataacttttttaatgtggtagctataggatataatataatataagctcatactaatcattatatttgtatttaaaaaacaaatagatttcaagcacacttttttattagcttaaaaaagaatatttggcagttagatgcattagaatttgagctctgcgaaagctaagactattggctgtactaatcaaatcttaaacagttgcaaaaaaatatctatatgccttaagtaaatttttaagcgcattaacaatgtttatgtttatgtttatacgccaacaaatgttaaattatttgcttatgtatatgaaagtcgggcat

SEQ ID NO: 39656 - DNA, 2748 bp, DROSOPHILA
atgaggtgcttctcccgggctatcaactggtgttgtgctcttttctggatcgccttacaaattccagtgcccatctgctcgctgaccaccgcggccacaaatccctcgcagctgccaacgccgcacacttttcgcttccagaatccgacgcagtgcctcaagaacgagttctacaacctcaacctattcgactgtgtgccctgcaatgaggtcgccggcggagatggggttcaaggaaaactgcaacccgacaaattcacctgcttcttgtttattgcccacccagaattcacctgcaagtgcccggctggtcatctgtccatctatgagcgcggcaagacgtggcccacctgcgatgagatttgcactccggacaggagcgacaattgcacttcggtgtggctaccccagcctcgacctaccaatcagtgcagctatcggtatctgaactccacggcagccttcgccagtcagttgccagtgcatccactcatttccggcatcatactgacccatacaaatccgatgagcagagcgggagattgccattcctgcgatatgacgcacaatttccggtatcaggacttctgcttggctagcaccctgctccgaccgtatgtgcactacaacgccttctggcaggcgacaaccacgccggattcaagtgcacccagccgctttggtgagctcaagtttgtggccttcttttgcctgacactgcgcaacgataccgcctgccagcaactggccaatctgtgcgtgctttcccatttctccctggaaaagcactcgccctgcagcgccttcctgcttacccaggtctctgatgtggtcatgaagtatgcccactccggcgaacaggtgcgatccctgcagccgttcctgttctacaagaagggtcgggctaccaaggagctgctttcgaagacgcttcagctgccggatcgcaaggagctgcgcctttttagcaccacatttggtctagatggcggactcaaacggtggggtgcctttcatccggagatgctgaacatgtgccaacagaaggcgcctagcctccgagtggctctacccaagagggagtcggaggtatcttgtcagctgaccctagagcgtctcattgacctggccaaccaacggcacaacgccgagtttctcaccgtgtttctaaacttcagtagtaactggcagtatttgcttcaccagttacctgtactcatcgagaccctgacgccggaaaaccagcgaccccagcaggaggagtggcagttggtgaaacgtttccagctgatctccgcctcgccgcgggatagtcatcttcaccagaccatgccgcgctacgaggatgcccacaagctgcagcaatattactccttacgatatgtggaggacatcgaaattcgttatacgctggacaaggatcagccggatagagtgggtctgccgctcattcgcctgcgataccgacacatagagatgggatcgggaaatatatcgctctcccaactgtacccattcaccctgaggattagctacgaccaagtaaaacgtggttgggattggttgatcttggaggtggcgctgccgctgctccttttgctggcctttgcagctgctgtcttccgtctccagaatttgagaagaaggcggaaggcggacctctgtcagatgagcagtcttatggaatttctcctgcagctggccggaaatgtggcatatgctctgctggcgactactctgctgctcctactgctgcaagcctccaattctcgcctactgaaaatcctactcaataccgcctttgtgctgcagttcctctttctgggcatccacctgtggcgctccagccagctggaactgtttctcatcgactgggaaagaccgcggagcagctgcgaaggacaacgcctgaatctggacagctcatctctctgctctagcgtgcgcacctttgtggccgagagcagcgtctccgcctggcgagttctcttcacggccaatgcctggattcgcctaagtgtcacccagaagtactccaccttgggtcaggtatttgtggtcatcgctggctatcagtttctggagaggtttaccaagggtgacatttttctacgttgctgccttatagcggcagcttatctgctcacatatctacttcagataataggccaccaactgtttatagccaatcccctccagaagttcatcgacctgtgcagtctggccaacatctctctgttctcactgacggagccaggatttggttactacatccacggacgatctccgcacggctttgccgatacggatatgtcctcgatgattttgcagctgcagagaacccagaccatgtgtgggcgacgaggattgctaatggactcggacaagcaggcgtacgtcatcctgcctcccagaaaccttcacatctacctggagcgactcctgcttccctttcagcgcagtctgaccggcaccctttcgcagaccatgctctaccaaaaggacatcgttccgagcatcgatggacagatggaacgtacctccattgcgtacgccagcgtcaatcgcttcttctgcgcctttatcgaccatgctatcaaggacatggattacattattaaggaaaagtcgtttgtggaacaattgctgaactgcgaaatagacaactacatcacggaaatgttccgccattgggtgcgaaggaacatctcccgcaagaccctcatcgacgagaggttcctcttgtag

SEQ ID NO: 39657 - protein, 915 aa, DROSOPHILA
MRCFSRAINWCCALFWIALQIPVPICSLTTAATNPSQLPTPHTFRFQNPTQCLKNEFYNLNLFDCVPCNEVAGGDGVQGKLQPDKFTCFLFIAHPEFTCKCPAGHLSIYERGKTWPTCDEICTPDRSDNCTSVWLPQPRPTNQCSYRYLNSTAAFASQLPVHPLISGIILTHTNPMSRAGDCHSCDMTHNFRYQDFCLASTLLRPYVHYNAFWQATTTPDSSAPSRFGELKFVAFFCLTLRNDTACQQLANLCVLSHFSLEKHSPCSAFLLTQVSDVVMKYAHSGEQVRSLQPFLFYKKGRATKELLSKTLQLPDRKELRLFSTTFGLDGGLKRWGAFHPEMLNMCQQKAPSLRVALPKRESEVSCQLTLERLIDLANQRHNAEFLTVFLNFSSNWQYLLHQLPVLIETLTPENQRPQQEEWQLVKRFQLISASPRDSHLHQTMPRYEDAHKLQQYYSLRYVEDIEIRYTLDKDQPDRVGLPLIRLRYRHIEMGSGNISLSQLYPFTLRISYDQVKRGWDWLILEVALPLLLLLAFAAAVFRLQNLRRRRKADLCQMSSLMEFLLQLAGNVAYALLATTLLLLLLQASNSRLLKILLNTAFVLQFLFLGIHLWRSSQLELFLIDWERPRSSCEGQRLNLDSSSLCSSVRTFVAESSVSAWRVLFTANAWIRLSVTQKYSTLGQVFVVIAGYQFLERFTKGDIFLRCCLIAAAYLLTYLLQIIGHQLFIANPLQKFIDLCSLANISLFSLTEPGFGYYIHGRSPHGFADTDMSSMILQLQRTQTMCGRRGLLMDSDKQAYVILPPRNLHIYLERLLLPFQRSLTGTLSQTMLYQKDIVPSIDGQMERTSIAYASVNRFFCAFIDHAIKDMDYIIKEKSFVEQLLNCEIDNYITEMFRHWVRRNISRKTLIDERFLL

SEQ ID NO: 39658 - DNA, 9895 bp, DROSOPHILA
tgaaaaactcgtttgctggcgggttctgatttcgaaattttatgctaagctgtctgggatgagtcgtcggcttgcgaaatgctttctcctgacgaatttatgcttatggggtcttctccttatcaagattttacgatctatataaacatatgggtgtattaatggatgcaccgtctaggcagctcctattttttatggcataactatgctgattgtggtggcagccctaaatagacacattagatagatttgacaaatttgtcaaattttattactgatgaaattggagcatggagatatgatatgttttcgtcaaagggaaatcatgtgaaagaaatatcacactttctaaagatgttgcttgaaataaaaaattgtgttaagctccttaaaataataaattaaagttttaccttttgcacagattgctcaatcaagagacaccaaaacaaaaagtttttagtagtaatcccttaaatcaattctgaattggttgcataaaacaaacaacatttactaatactaatttaaatataataatataatattctttagactacgtaaatagaacaaaataaaatctatgcacacaagaagttgcttaactggaaaagtaatataaaatggccatgataaatttctctttgtcgtttttttctatgaagcaaagcgatattattggcttaatataacttatttttgctccggcaatcacgaaatgtgaaaatccttatcagcccaaatcgcaagcaatttattgagtccttttgaagccgcgaaatgcaacgacaaaagcaaaacgaaaacaaaaagcaaaaagaaaagagcaaagaaaattcctaacaagtgtttttctttgccaaaccgaagagagcgagggaaagcgtagctcagagagagaggctgggagagacaggaaaagctttcgacttggccacttgcaaggcagctcagttcagtaatcggttcagtcgactttgagattgctggccagaaacgacggagaacgacgctttccaggacggccgcgtcgtgtgctctagaaaaggagagttggaaaaacgccagcggcagctagcgccagaaacgctgctgtcacagtttccacctaagtcgaaggaaaacaagtcaaaaggctcgttcaagtggcagttgctttttttgggccaagccagcggttcgtttcgctcgtgagtgagacccaatgcctgtgtaaatgtgagcaagtgtatccccgtgtgtgcctgcgtgtgcgtgtgtgtatctgtgtgtgcttccttcgttttgtgtatccgtacagcgtttcgctggcgagctgctccaaatttatacccagcatatttttgcacatttaattgaattaagtaaagggctgagctcgaccgcggagaacagtgtcgccagtccagttgtgttcttttcggcccgctcgctatctttatataagagaaaagagctcgagaaggccaacgaattgcgtaaagtttgtgtaccatgtggtcgtgccgtgggaaaatgacattaagtgcttaagtaaattatataaaaacattaaacgcctcgctggccattaaaaactcggagacattcaaagcgacagctgtgcagcatggaaaaacacttttcaggccttccgctatcttttggccaagataaacggatattcgccaggcaatttcccttgccctgttttcgtggcaatatgaaaaattcaaccgtcccaggttgtcacaaccgtttctgagccgtgggcgaagtgggtggttgggctagattttcgactactgtcaaggtgtgcgccaacctcaaggtctagtcactaacccaaagccccaaagaccacattcacatacgaacatcgcaacagatcaagccagcgaaataaagtcatcttggcgggcgattctttttcgaacatttaggtgcctaaataaatataaatatgggaatgcaataaaaacatatcactcaaatccatgaaagatgccgaatatttaaatatattaaattaacaaacgtgttgcccttaagtaggctattaaaatttattaatttacatggtaaaaggcgaatgaaccgcctgaatctacgtagcacccttcgtgaccctatagaacttgggtttagcaatttgtttccgtgtgtcccaggtggcaagtggcaggtggcgggtggcgggcgttgtggttgcctttgccgtcgagcaggtgtctgtctgactggctgtgtttttggcgtcactttcgttttccttctcgcattgccctcgctcaagtgctgtgcttgaccataaccactaaaagtgtcacattgcgtatacgccgcgtggtgtcctcgaccgaggtgtgtgtttgtacgcttactgttggctgtttttcgccgtttttgttgtaagctcgtttacttttggccagcacaccacccacgcaaagctgtgggccctctcagtgggacagtctctctctctctcgcgactgagctgctttctctattctccggcgcactttctctcccgttcagctgtttgttttgttttgaatcgcatttctcctcaaactgaggcaggaatgcgatgtttatccccgtctattgtcggtcatttggtcacgttttctgcccatcttcatcttgaggccctcatgtctggcaatttaaattttattgtgatttttattcttggcaaaagtaaacagcgagcgcatctttccccagctcgtctttatagagcaatttggcgcccaaaagaatgttccaacacggcgataaaagcgatgtgtctgtattagctggacgacacctcggggaagagaagggtgatcataaatgacaaaactttccagcaatttaatattcaatcctccttgttgttttgttctctacactcgttgcaaaattttcgatataaacaatgtccctttagctcataaacaaaacttttacctaaaatacgccattaagtgcacaaagaaaatcaaaatggtaaactatttgcattcctttacactaaaactactccctgtcaactagttttaaaaactggtatttaaacataaaacggtgccaattcaaataacacctaattttcaaaaagcaagaagtcagccgaagatttaacttcttttacttaatttcccacagataagagaatttaatgactttgctgatataaagtcatgtttttgcgaatatttgtttttttttaatttatccactttatccctctgtaagcgttccgttgtcctcctagacatattcgaactctgtcagttaaggcaacgtcttggcattcgtccaatagcaaggcagcccacatccttgctccccaccacccagcgccttcggctattcagccccctagacttccgtttccgttctgctgggtatttgcaacattttcggctgtctcctgtcgactgccagacttttatacttttatagggcgggggggttctcggtgaaagcgatgaaatttccatattcctcgcattagccaactagcggcggctgcgctgcgctgagtgactgctcattaaaatgctataagtgtaggaacaatttgcatgttgcacgagcttcgagctgcgagctgcgcgccacgagtctcgggcttggagctgaataattaacaccccagcaagacctgttggcagctggcgtttctcttaactttattcgaggttcaggagcgtacaatcagtgagttggagttctgtcggatgaagtccatgtagttgcgtatggccagaaagctggacatgatgcggttgttctcccagcgccagtcgatcatgatgcccaccaggtagtagttctgagtgacgtgccccttcttctgcaaccccactagaggtgcgcccaagtaataagctaccggttgcttgtggtagccacaaaccgtgttgctgctggtcaccagcgtcttgaccttcgattgacagaagccgcgactcagcgtgtttacccaggtctttagtctgaagtcctcaaagacgcgaagaccagctactacaaacgtctgagcaaccagggtctcgttgagcaggcttggaggtggcatgcaaattggcattacatttgggtagatctttgcgtctcgctgaagagtcagcaccgccagggagttctttaaggttcgcgagtcgtagtccggatggatggctatctcggccagcttgatttcctgcgacggacgcacgcaatagccatccgtttcgcagactcgcactccgaccggagcactcttgttgtggacacccaggtggacggagaaggcctccgctactccgttgtactggacaaaacagtgggcgggcgccaagacagtgcgcttcgataccagcacgcccagacatccattgtcccgaatcttgccctcaaaccctgaagtattaaacgaagttgtatttcggattaactgagcagctcagagattcttacccttgccatacactatccgggccacccactggtgctccgtgggaatggcgaaggtgctttgcatattgagcatctgatcttcgtcgaatgcaccgcactggtcatcattcactttcgccgaccgaacttccgggccaaaaagaccgacgagcaataataaaactgcgattctaccaagcattctgaagcgcagctcaaagtcaactgactgggagctggaaaaacagacaatgcatgttgctcaggggatttacccagaagcttatgatcgatagagcttagcaggaacactagaacgaaaatacaattgtttttacaattttttaaaatatatatgaaatcaatagtgaagtgtatttcgaaacctttatataaaatattttaagattttaaatattactattagtgttactaatactatttgatcagcacatttcccttctccaagaatgagttgatttctttccgtgtaatgtttgttaaaattttcaactaactcttccaactacctgttattctacgtatctaattaatggtgtaagattacattacggctaccgatcgaaaacccgtttccgatgcgaatccctgggcagttcccgtcacgatgcatcagttatttcactgaacccacaacattttacttcctcatgttgaatagtttattgagtattcacataacaagttgtactttctacttcaaattttccattatccaggagcgggcgcgtcggacattctgatagacttgagtggtagcctgtccggcatctacgttccggaccagaatgcccaccaggtagaagttgtgcggcttctcatctcgcacatcgatgtccatcagtggtgctcccggatagaacttggtcctcttcacgggatagccgcacagctggttcaccggtactaggacgctggaggatgtcaattgtttgcacttttgagtagatactgtcatggccaaccccttgcccttctccgaggccatatggttgaatccggtgtagtgcaggttgcgattggtcagcgtttccggttccgaagtgccctccaagcagatcggctgaacccagttggtccactcgactggtttttccagccgaaggatggccaagtcgttgtcccccgtgtccttgtccgtttgcggatggaccttgatctccaccaccttgtacagctcaggccccggcacacagaagtccttgtcgttgcacgacagctcctcctccggggagtcagtctcgtcccaaacgcccaacattgccacggctttggtgtctccggatcgttggctaaagcgctttacgcacgtcgcagtactgaggatgtgcagctcgttaataataactacggagcaccttgtattctcgtaccgatttcctagaaaatcatcgaaggtggacacaaagggcattagcaaaagcataggtcatgttattaattattaacttggggctttagaagggggcttttcatagttaacacttctaaagttaactgaccctgatcctccagcagaatgcccacccagggattctcggagggttccgcctgctcgttggtggtgtacaatagcttttcatccagacgaccgcatcgaaattctgccatcgtcaatgctgaaaacgtatatagcgtttttaataaatactcgtagtaaacatacaactgtttcaattttactaaccgcctagccaagccagagtcaaaagctgaacaagttttccgctgtgaagcatttttatgacgatgtgctcaagtgctcagagttaactaatcgaacagaattgaattgaatagtatgagatcgcgtagagcgcagtttccttttgctgtgaataattaattaacaatctcccgctctctcgttgtttattattaagattctcagtgtgactatcaagcatttttggtaaaccttaatctttttgaatcttccttagtctgactactttctttgaagtcatattaaagatattaagatatgaagatatgccacttcttagccaacaaaatttgctcacagacctaactcaccttcaacttacaactagtattggagttccccaatcataaattaaattaaaatattttattaactcaaatagacggcatatcggctgtatatagtcccatattaggcatattaaaataattgtgcaaaatgccagagttgcggatttcaaatcattttggttttgctcgactgcttggaaatcgatggaatattattcttaaccgcttaaaattacaggcaattattaggaccttcattatatagccattagactcttggaatctcccctcgcgccctcttaccctgggagcctgctaggagcctcaactaggttgaataattaatgtttcaattagaatacgattatcgaaggcaagcgcacaagctgctcgatgggatgcgaaggtgaaggacaccgaaggacattgtaactcatccggcctggtggtagtagtggtggtggggggctggacttaacactctactaagaacgcttacaaattgccggcgagatccggttggcagtttattgtccactcaacttgacctgcttgagctggggcgttcataattcgcattgttatgagcccgtccctcgcctttgtggccatccaatcaatgtgctcctggtcgggtctggactttaatgaacggccggctggcaggctgtttggttggttggttggttggctggttgtgcggcggtgctcgtaaaacttggctgccctagccttgagtttggccaacgctatatcctgggatgagggcagtggtaaaaagtggggcccatgcaaattgctcggaccctgaacaagctgcgtgggctttgggtgcgcctttcacttgtaaagagtcgagaaatggccccccatttgcgtgttcctcaatctttaatcgctggaagcacgtgaacagcctgattcgagactgcttagcctttgcagcagtgctggaacatggctggtcgaatcgaactgaatcatttattaggccgcgggccgaggactattgcttcctttaaaaagtacatcaagtccagtttcaaccttaagtttactctgcgttcaaaagtgaaggcatacatttaggtatggaaggtgatattaaggccaaaaatatacataaagaataagcttgctagattctggtatttatgatttattgattttgcaggaccggatcactatgagcgacagaggagctcggtaatgatgatagcatgacgcgcgacggcgaaattccagctattttcaatccgaaaagagtgcgcactccttccgtggtggtcaccggcgactcctcgacgaatggaccgtacagcaacaatagcaccggcggggcgggagccagcagcagcacggcagtggcccccggttcgtctgcccaaaacggcggcagtggcagcggagcagcgggcagctgcgggttcagcaacgtgctcacctcgagcaatccgcaaataacccaccaagactcgatatcgtcgagccaacaggaccccaatgaggtggtcatcatcccggcggacacaccaacgagcgcaccgggcagccacaatgcggcgcaccacttcggaggcggcgactccagcgacacccagacggagcagcagcaagccaacgggcacggcgaggagtccgagcttcgcttccgaaagttgcaggcctgcaaggagtcatgctgctccgaactggcccggaaggtgggaaaacttatgaatcattcactcaattttaatgctatgcgatcgatgtctttacagatgtacttcggagtgtgcgtgaccatcctgatgaccgcgtcgtgggtgggggccacccactgcattaagtacatgtacaagtaccgtgctccgtacgacgacttgctgaacgacgaccaggacacgtcctcgagccgcgcggacctgagcacggagctggaggatatactggccatcagcgactcgtcgctgcaccacgtcgaggacgccaccgagatgttcaacataccaccgcgccagccggtctacttcagcgcccccttcttcgccgcctggttcttcaccaacttctcgctgctcttcttccccatctacctgctgggtctggtctccacccgcaagtgcgagaagctgagcgacatccttggcgacgtgctgcgaggattccgggagcgcggcttcacagtgggtgagttggatttagtcgtgcgacacctatgaaaactttcttttgactggctcttggtccgcaggtcgcttcctcaatcgctgcctctgcttctgcattttgtggctggtcaccacctacctgtacaccctgtccctgcacgtcctctacgccacggatgccctggccctgttcgccaccaacgtggcatgcgtgtacctgctatcctgggtgatcctgcacgagcagttcgtgggcgttagagtgagtgctttatatctgcatatttgaaatttaaaagttataattttaaagtcgtgtaattttaattaattactgcattatacaaagataaaatccttcacaaacatcaaaacatggttaaaactgtatattaattaatttaaaaacaaaacaaaaacaacaaaatttaaacaaagctccaaaacaatataacatgaatatctaataacaatttgatgaacataaaaaatcaacgatctgtaggtgtagcaattcatctcttcattttatgtgccttcgcttggagctccttttcgttctgaacgatcttgactatttccgaaattactacactgtccagcattttcattggcttgccattctccaatacggccacctccaggcgcatctggctcatctgggttacttcgagaagggcacgcatggctagtttgatggcatcacatttggttgtcacttcatgatcgctataggccttctcaaaaaactccctcacagtatttgcccaacgcccagtggcggtcgccttgtactcgtggaatatcccggatggttcggtatgaaagagacgtgcagagccatcggcgtcaatgcctcctattagacacgatataccgaaaggacgacgtccattgcactgcgtgtacttctgcttgagctgggcaaggtatctggtgatgtactcgagggtcacctggttttcgaagttgagtcgatggctctggcactcgacctgccctcgatttataaggatccgtgcatcggccgtgagaccggcaaatgccaacgccacgtggcgatcgagcatgctgatcttgcgcaccgtccgatcctcctgcatctcggacaccgagctcttctccacacccagcaccacacaattggctccacgaacgccgaccgctgtggagccctttcgaacagcttcctgggcgtactccacctgcaacaggtggccatccggcgagaatatggttagagctcgaccgtagcgtgaggacatcctttgggttagttagcaggcaaa

SEQ ID NO: 39659 - DNA, 1321 bp, DROSOPHILA
cggagaacgacgctttccaggacggccgcgtcgtgtgctctagaaaaggagagttggaaaaacgccagcggcagctagcgccagaaacgctgctgtcacagtttccacctaagtcgaaggaaaacaagtcaaaaggctcgttcaagtggcagttgctttttttgggccaagccagcggaccggatcactatgagcgacagaggagctcggtaatgatgatagcatgacgcgcgacggcgaaattccagctattttcaatccgaaaagagtgcgcactccttccgtggtggtcaccggcgactcctcgacgaatggaccgtacagcaacaatagcaccggcggggcgggagccagcagcagcacggcagtggcccccggttcgtctgcccaaaacggcggcagtggcagcggagcagcgggcagctgcgggttcagcaacgtgctcacctcgagcaatccgcaaataacccaccaagactcgatatcgtcgagccaacaggaccccaatgaggtggtcatcatcccggcggacacaccaacgagcgcaccgggcagccacaatgcggcgcaccacttcggaggcggcgactccagcgacacccagacggagcagcagcaagccaacgggcacggcgaggagtccgagcttcgcttccgaaagttgcaggcctgcaaggagtcatgctgctccgaactggcccggaagatgtacttcggagtgtgcgtgaccatcctgatgaccgcgtcgtgggtgggggccacccactgcattaagtacatgtacaagtaccgtgctccgtacgacgacttgctgaacgacgaccaggacacgtcctcgagccgcgcggacctgagcacggagctggaggatatactggccatcagcgactcgtcgctgcaccacgtcgaggacgccaccgagatgttcaacataccaccgcgccagccggtctacttcagcgcccccttcttcgccgcctggttcttcaccaacttctcgctgctcttcttccccatctacctgctgggtctggtctccacccgcaagtgcgagaagctgagcgacatccttggcgacgtgctgcgaggattccgggagcgcggcttcacagtgggtcgcttcctcaatcgctgcctctgcttctgcattttgtggctggtcaccacctacctgtacaccctgtccctgcacgtcctctacgccacggatgccctggccctgttcgccaccaacgtggcatgcgtgtacctgctatcctgggtgatcctgcacgagcagttcgtgggcgttagagtgagtgctttatatctgcatatttga

SEQ ID NO: 39660 - protein, 365 aa, DROSOPHILA
MTRDGEIPAIFNPKRVRTPSVVVTGDSSTNGPYSNNSTGGAGASSSTAVAPGSSAQNGGSGSGAAGSCGFSNVLTSSNPQITHQDSISSSQQDPNEVVIIPADTPTSAPGSHNAAHHFGGGDSSDTQTEQQQANGHGEESELRFRKLQACKESCCSELARKMYFGVCVTILMTASWVGATHCIKYMYKYRAPYDDLLNDDQDTSSSRADLSTELEDILAISDSSLHHVEDATEMFNIPPRQPVYFSAPFFAAWFFTNFSLLFFPIYLLGLVSTRKCEKLSDILGDVLRGFRERGFTVGRFLNRCLCFCILWLVTTYLYTLSLHVLYATDALALFATNVACVYLLSWVILHEQFVGVRVSALYLHI

SEQ ID NO: 39661 - DNA, 4683 bp, DROSOPHILA
ttggagctccttttcgttctgaacgatcttgactatttccgaaattactacactgtccagcattttcattggcttgccattctccaatacggccacctccaggcgcatctggctcatctgggttacttcgagaagggcacgcatggctagtttgatggcatcacatttggttgtcacttcatgatcgctataggccttctcaaaaaactccctcacagtatttgcccaacgcccagtggcggtcgccttgtactcgtggaatatcccggatggttcggtatgaaagagacgtgcagagccatcggcgtcaatgcctcctattagacacgatataccgaaaggacgacgtccattgcactgcgtgtacttctgcttgagctgggcaaggtatctggtgatgtactcgagggtcacctggttttcgaagttgagtcgatggctctggcactcgacctgccctcgatttataaggatccgtgcatcggccgtgagaccggcaaatgccaacgccacgtggcgatcgagcatgctgatcttgcgcaccgtccgatcctcctgcatctcggacaccgagctcttctccacacccagcaccacacaattggctccacgaacgccgaccgctgtggagccctttcgaacagcttcctgggcgtactccacctgcaacaggtggccatccggcgagaatatggttagagctcgaccgtagcgtgaggacatcctttgggttagttagcaggcaaaacaaaacaacaatttgcttgtgacaagttatttacttgaaacaatatgaatttttcttacatttgaagtttgaagtcaaaatcctttattttctacaccatagtgtaatgattatgataataatatgttattacaattctttgtaaatcaataatttcttttgagttatttacaaaactccccatatcactcccctattttgcagatcgtggccattatactttgcgacacaggaatagcgttgctagcctatatggatggaattacggaaagccgaaccctgagcggcgtggtcttggccacattggctggagctggctatgccgtgtttagggtgagtaatccgccgttcgcccacatgggatgtcctgctttcccgcttcgtgtgcggccatgtcgtgctcatgttggcctgtcgcttcacaggttatgttccgcaaggtgatgggcgatccgccggtgagccaaatcgccttcatattcaccgccctcggcttcctcaacgccctgctgctgtggcccgtagtgctgggactctacctgactggcacggaaagcctcacctcggagagcataccctggaacctgctgttcgcggcgagcctcctgctcctcggtaggactccttttccaccccccgcttcttctgcatttgttgtgccgtaaacttttatcgccgtaattaattttgattgcagttttccacgttctgatgcagttcagtgccgccgttacgtacaacatgtttgtgacattgggtctgattacggctgtgcccgtttctggcggtatgtacacggacgagctcctcagcatgttttccaagagttgggtggatacagggtggtcgaggtctggggttagcctctattcgcttgaaggattccgtgactatgagttgttttaaattgtaatattcaaacggggcactcacatgggtcacgtaacaacatttgatctttgtagtgggcacattgagacataaacttttacaaaacaatgggcgaactttcttggccaagtagttactggtttaacataaaacaaatatacctctttcaatacctctgagaacaaagttgaaataggacctcaagatttaaatatctgattgaaaaacacatacatatttgagtatccaatttaattgagctatttttctcatttcacttgatcccttagccctcgatgtcatactatacagtgcgaactttgctggcatgaaactggccggagttatcctgattggcatcggatttttcctcgtcatgtttcccgccaactggccagactatataacgcgattgttgcggtaagtgggaatatatttcgtatttattcatattgctaggaataattgttatgcaattaatatgctaattttctttgtcagagtgtaaaagactcgtgcgtgtttgttttgaatacttaacggcttcagtttattccggttctttattattttttattattgttttgttgttgctactccgtggcattaatgactaaagcaaacgttaaaataaaccatcgaaataataatttaactttctactcatgtttgatttcgataaaacgctgttaatttcctgtatactcacataaactaaatatatttaattttatataaacaaacatcttgcagaaagagcgttcgtgccatactccgctaccaatgttgttgtgaattagccgaaattcgctatgctcattcggtaggccaaaaacacaagctaagccaaacacccaaagcccaaaacccaaaatcgaaatcgaagaccaaaccaatgccctgattcaatgcattagatattaattagaatcgtaggcaagatttgtgtttactgatatctaaccttccaactgaactttttgacctgataatgctaatcataagtaacagaaacttggcagattttttactgaatacaacaacaaaaacttctatgctatctataggtttataatactaaacacccatatattccacaagcaaaaactacaacacatttggcttccaactttgcgctcacccttgttgaaagaaatacatatacatatatagacatatgtatccaactgtaactatatttactttatgtacaccaaaatatcctcatatataccgatatataaccgctcacacatttacgacatatatctatctatatatcgttacatcgtttaataaagcctaaagttctacagacactaactacttcggctgttgtgcaaaattggttgacaatcccatctcgttgttgttcttaacgttttttggcgctgccgttaccataaatgtacttattcttattgttgttgatctttttgatgatttcgtttcgtttcggcatttcagcaaccccaagacccctataatatgtatacatatgtaccacccatgatgccatggcatacccgaccgatctcagtgccaatcttttgttttgcccacttgtgtatgatatatccttgtatctggatgttggttgctggtgccgaggttctattactgtagtagttcccacacctgaacgacacaaacccgcccacacatcctgaaactcacacacacaccttaacgtacatttatgtagtttgagtttcgctgatgttgcgaaagtttccgtttcaagatccacgctgaactccaagaacatggatgctggtgactatgatattgctgatgatgatatgtttggctgtttgttgtgtgatctctactgaattgcagcttcttgtaattgggttcaatctgtacctggcaattacccgtctggtgtaaataagttcgattattggttcaattttattttgttaattaaactgtatgcacttagaaaggagagcgcaagttacaatatatgttaaattccagcatgaccgaatttgaaatggctgggtatctgtatctgagcaccaagcgccccaagtaatgtcggttatccataatcatttgcccaccaatctgtcaggatgctaccggccatagagaaaccaaataaaaaccaagccctgacccttaaagcgattaaaacctaaataatgatatacattaaaatgcattcaagttgttactgattggcatgtttgaaccgaacttcgttttctcttcgttttcgtttcgaattgacggtttttcgttttcctaactgatgtgctcttgagttgctcctttatttctgtgcgatctgtctgtctttaaactctttaaattcttcaagctctactctatgctaatactctacctacttcttatatatataaaaaacgtgtcgacatttctcaattgtctttttgcagaagcatcataatgctgggtcacaatgcgaggtgagtttcgagattaggctgagatgagaattgagtatgttattttaaccacctaagctaaaaaacaacacggtgcccgaaatctaaaaagaagggtttttcgttattgtaccatataggaataccttactctaaatacccagcccataccgagacaagcaatcaacaaacttactaatatatttattcaaatccaactgtaagcgaagtatgttttttgattcgatttcgttataatccttagtcaactcttgcctagtcttttgataattcgggtttgatttggtttcgtttggtttgataaggactgcaagtgattctccttcctaaccttatgtacatctcgcatctaagttttgattttaacattcctttcgtaagctaatctgagtaacagtatgatagactttggttaataagtaaacttagaccgagtagtaccggcctgccagatttcggttaactattcttttggcccagtgctaaggtaagtcgatccgagagtctgcattgcccatcgccagccaaagtcacctcacataaagtgcatcgatgggatgccaaatgacagactcacccaatcacccaagtaccaccaaccca

SEQ ID NO: 39662 - DNA, 588 bp, DROSOPHILA
atggatggaattacggaaagccgaaccctgagcggcgtggtcttggccacattggctggagctggctatgccgtgtttagggttatgttccgcaaggtgatgggcgatccgccggtgagccaaatcgccttcatattcaccgccctcggcttcctcaacgccctgctgctgtggcccgtagtgctgggactctacctgactggcacggaaagcctcacctcggagagcataccctggaacctgctgttcgcggcgagcctcctgctcctcgttttccacgttctgatgcagttcagtgccgccgttacgtacaacatgtttgtgacattgggtctgattacggctgtgcccgtttctggcggtatgtacacggacgagctcctcagcatgttttccaagaccctcgatgtcatactatacagtgcgaactttgctggcatgaaactggccggagttatcctgattggcatcggatttttcctcgtcatgtttcccgccaactggccagactatataacgcgattgttgcgcatgaccgaatttgaaatggctgggtatctgtatctgagcaccaagcgccccaagtaa

SEQ ID NO: 39663 - protein, 195 aa, DROSOPHILA
MDGITESRTLSGVVLATLAGAGYAVFRVMFRKVMGDPPVSQIAFIFTALGFLNALLLWPVVLGLYLTGTESLTSESIPWNLLFAASLLLLVFHVLMQFSAAVTYNMFVTLGLITAVPVSGGMYTDELLSMFSKTLDVILYSANFAGMKLAGVILIGIGFFLVMFPANWPDYITRLLRMTEFEMAGYLYLSTKRPK

SEQ ID NO: 39664 - DNA, 2411 bp, DROSOPHILA
aaccagcgtgtggcttccgactgttttcgcttaggcccctgtgccactgccacgcccacgcaactccccagaaaacccaaaaagtttttacaactgttatgcgactgttaagaacacttttgtaccaaactacgttaagtaacattcaagtttccgactgagaaactcaaaacgaacgaacggtgagagcatcctgcgattatttttgatcaactcctgaatcactagctgcacccccaatccctcatgtacagctcactagatcaatcactatcccaaaatccgaaaacgttgaaaagtctttaaatcttttttaagttccgtttgctttgtaacgttacagcttgcctatgttgttgagaagtatctttgctattcaagctacttatgaactttggagagcaccgcttaatgtaactatttcggcacccgtaacttaatctcccgcttaagccccaaacaccaacaccaacacacactgcacatacaccaacaaccccacacaacacacacaatgtatttgtatataaatgaaaaaaaaaaacacaaaacatcagtaaaaaatccgtaaaagtcttagcgcttaggctattgtatccgggcattgcagacacgagattctacccgaaacccaaatgccgacgagtccgctcgacctgcagtgcccattcaaaaaagatatagtcatacaagcgcttactctatgtaaatgtgagtgtacgtagcgccttagagctaaacacctaagaaatgcctagaaattaactaaactaatgccaagcagatgagatccctaatcatatagctagcccggccgatactaacagttgacactttgtcttccacaaaaaaaaaaaaaacaacatgtcttcccacacacaaactatagatggggtcgcggccctcggagcggtacttcaacaggtcagcatcccaccattatcgactatcggacgggatacataaggtcccatcttcgttcaccctctggccgtgtgagatgactgatctgtcgccgaccacctctgggtttctacatggccatggcggcgccaacgcacagcatcaccagcaacttttgcaccaccaacagcagcagcatcagcagacccaccagcagcacctccagcagcagtaccaccaccggcagcactcgctccaccagcagcacctgcagcgccagcactcgcacacctcgctgaccaagatccaccgccagagcagcagccacagcgtccacggtggtggcgggcgggcggatcaccaccgaaccactaccggagccaccggacggctcttctcctacttcggaaacgagcaggatcacgagcgcaagaagtcggagacttcgttctttaatctcggatttcggaggaagtccactgtggtctactacgctccagcggattgagggggcagcacttgctcaggcatatcacaaccatataagcaagaggatacaatcagatttattagcgagacagatgggttatagtttgtttgtcattatatcataattattgtcgttgttgttgatgtaaaagttcaatcggatcgcatgcagttacaattttgctcaaatataacacatttaaaggctacagttacagaaacagagttaccgatacagaagcagctgcagatgcagataaagatacacacctcagcacggagttagtctccccacctccaatgtacccatggaacccatgaccatgcaccctgcctcgccttgaaactcaagatacagaaacccgagaaggagcccgcgaatcgagctcaaaagtgccccgaaagttaactatatacggttataatttaatactcataattattacgaaattgtataaggaatcgaagccaattgttttagcaattatatacattaattataacggcaattaatagtcaaatattttaaagtggattcacaaaggcacaccttgagaagggaaatttaacgaaaaaatgaacagaaaatccaagatattaaatgcaaatagttgatagacgtcaccgagaatattcaaaattcacccggctaaggaacccattaaactgtaagctcatctagcgactagatccgaatggtttttcatttaaacataacaattacatatatagggactaaagtttttttaaaggcttttatttgaacgcgaactgaatgtgaaccggagtcaaaacgaatcgaagtattagtatttttaaatgtttatgtgttgttcgtaatttgtaattcaaaatgttgtacgattagagtcgaaatgaatcaacgaggatactgttgtattaacgcaaccgcctcttctttgagccaatctgggagtaccaattgtggattgttcagattagagccgttgcatgttatgtgaactaagttgtgtagccacatccaataattgatttgt

SEQ ID NO: 39665 - DNA, 411 bp, DROSOPHILA
atgactgatctgtcgccgaccacctctgggtttctacatggccatggcggcgccaacgcacagcatcaccagcaacttttgcaccaccaacagcagcagcatcagcagacccaccagcagcacctccagcagcagtaccaccaccggcagcactcgctccaccagcagcacctgcagcgccagcactcgcacacctcgctgaccaagatccaccgccagagcagcagccacagcgtccacggtggtggcgggcgggcggatcaccaccgaaccactaccggagccaccggacggctcttctcctacttcggaaacgagcaggatcacgagcgcaagaagtcggagacttcgttctttaatctcggatttcggaggaagtccactgtggtctactacgctccagcggattga

SEQ ID NO: 39666 - protein, 136 aa, DROSOPHILA
MTDLSPTTSGFLHGHGGANAQHHQQLLHHQQQQHQQTHQQHLQQQYHHRQHSLHQQHLQRQHSHTSLTKIHRQSSSHSVHGGGGRADHHRTTTGATGRLFSYFGNEQDHERKKSETSFFNLGFRRKSTVVYYAPAD

SEQ ID NO: 39667 - DNA, 3139 bp, DROSOPHILA
acctgcctgctggtggtgcccctgctgcggctgttgctgttgctgcatcgtcggttgctggtggattggttgatgttgctgctgctgctgctgcacaggaacttgctgatattggaccggtgcctgctgttgcacgggaacttgaacctgttcgtattgctggaagtcggaggcctactggttaattgcttgccattcggaaatgcgcatttgcactcacgtattgctggggcggcacaccgggtgctgagtggacctgttgctggtactgcggctggtggtgctgcggtggtggcggtgggtggtgctgcggcacctgctgcggcacttgttgctgcaatatgtgtgggttaattccctcattggcgaatgggggtgcttcaaatcactcacatagtgctgcggattcactccgggagcgacgcgctgtccgctggccaatccaatcaggattaggggcagcagcagctgaactgctggcaattccgtgacgcgcatctgcatggaagtgctggattctggcggggatcggatcggatcggtttgggatctatatcgcttctggtggctctgtaatcaccacgtcgcaaagacgaaacacacacgtacacaaatcgcttcttcttcgccggtggacattcgcagcgagcgacagctgattctcaggtaagtgcggacattcgccacgaaacgtgtgagcggcatgacaacactgcgcgcctgggttaggggtatgcgcgtagataatattatcatgcttcaaaccgaaaaaaaaaatcataaaaacaaacttgatgcttccatttaacaactcaaaatttaatcaatctaatatgtgtacgatttcaccgttaggggtttagtattagtaccccgctaatatttagctcaaggaacaccccaaatgcagttgggcataattagggtgttttaaagattgaagctacggtctaccgtggacaccctgtaaaacttctcttcgttttcaaccagcaaattgactggttcagcgctgctcaaaatacaaagatttgaatatctcgaccagggaaattgctaaataatggtaagaatgctgttgccgaacaatccgcaactactgcgagtcaatagtagtgcttgcattgcccttgccaacacgaaataccgtgcacgtgcgatggccgttcaacctaaccccacttaatcgatgtttccgccaaatccacaggctgctgcacccaaggatattgagaagccccatgtcggcgattctgcctctgtgcaccgcatccgcatcaccctgacatccaggaacgtgcgttcgctggagaatgtgtgccgcgacctgatcaacggtgcaaagaaccagaacttgcgcgtcaaggtgagaattttgcgtccaactcagggatttagaggttgcatttacctggaggctttgcgttcccccagacgcttagcctagtcattaataaatgctagataaagtgccagaatcggacattattcccgcactgatcgactgcagagctggaatatcacatggttcaggctacaatacccattttcatgaggaattcctttctaattcttaaatattcatttatttcagggccccgtgcgcatgccgaccaagacccttcgcatcaccacccgtaagactccttgtggtgagggttccaagacctgggatcgcttccaggtgggttatcccctataatatatatagtaacaaacgggcgaatctgatatcgtggttgggcattcaaccagtcgctccacagtatcaatgatttgcccagataaaacgtattctcatagtacaatttgttggtatttcctcacactttgcctctctgaatgcgacaaaactaattaataatgactcagctattagcttgccaatggagttgcatattaaatcaatattacattattccagatgagaatccacaagcgcatcatcgacttgcactcgccctctgagatcgtcaagaagattacctccatcaacatcgagcccggcgtagaggttgaggtcaccatcgccaactaagatcggcagatgccacatttttacacctcgaaaagtttggcgtgctaataaaaacaaagaactttttccatacacatttggccaactttattgtgcgaaaattggagtactttactggaatgtttttttatggtaaaggcagtctaatagtagtcgggaactggggcgcatgcaatcttgacaaagtctgcataccgcacagtgctattgttgttcacattggcctcccggaagatgttgtccacttcgcgcatggacaggccctctccccagttttgaagtagattacgcagctgtctggccgagatggtgcccttattctgcggatcggccgctttaaaggcggcaatgacctcgtccggcaaactctccaccttggagtgctgatgcatgatgtccaggaagtcggcgaagctcattttcccattcttttgcttcagataggaaaccagttcttggatcgtcggcgaaagacccaaagaacgcataataacctgatgacgtgaagtttacaccattagtatgttttttttttctggggtgggagctcaactcacggttagttcgtccaaattgttgatttggcccgaacgggcgaacagataaaaacactcacggaactctgggggttacagataagaaatgttttcggtatgaaatcatcaattcacattgatacgcatatttaccatcaatgtcctgttctttaaagtaacgagcctgaaataaagttcagaagtagaaagttgcataaatacaaatggttaatgggggcagtcgagtggaaagtgcagttatgaacagaagaaagcattttcagtttaagtgaatggcttatgtaactcaccattttagagtttttaaatacgttcaattagttgaattaagcttactaaaccataaataaataccgtaaacaataagatagagttaataaataaacgaagcgtagaactcaaacaggtagcagcccagtgtgaccaacaagttatgggaccgttgacggcaaattcaaacaccacatttatctgtggtaagaccgtataactgtgggattcccggtaattcaaattatccagatttagggaatactttttagaa

SEQ ID NO: 39668 - DNA, 527 bp, DROSOPHILA
actggttcagcgctgctcaaaatacaaagatttgaatatctcgaccagggaaattgctaaataatggctgctgcacccaaggatattgagaagccccatgtcggcgattctgcctctgtgcaccgcatccgcatcaccctgacatccaggaacgtgcgttcgctggagaatgtgtgccgcgacctgatcaacggtgcaaagaaccagaacttgcgcgtcaagggccccgtgcgcatgccgaccaagacccttcgcatcaccacccgtaagactccttgtggtgagggttccaagacctgggatcgcttccagatgagaatccacaagcgcatcatcgacttgcactcgccctctgagatcgtcaagaagattacctccatcaacatcgagcccggcgtagaggttgaggtcaccatcgccaactaagatcggcagatgccacatttttacacctcgaaaagtttggcgtgctaataaaaacaaagaactttttccatacacatttggccaactttattgtgcgaaaa

SEQ ID NO: 39669 - protein, 120 aa, DROSOPHILA
MAAAPKDIEKPHVGDSASVHRIRITLTSRNVRSLENVCRDLINGAKNQNLRVKGPVRMPTKTLRITTRKTPCGEGSKTWDRFQMRIHKRIIDLHSPSEIVKKITSINIEPGVEVEVTIAN

SEQ ID NO: 39670 - DNA, 10210 bp, DROSOPHILA
tttggatgtccttgggcaaggatatcgcgcgttatcaatggcgattcttctgatttttccctactttccggttatgccctctgctcacctgacacctgcagacgatgtccacatcggaggccagcatgtccaccactttgcctttgccctcgtcgccccactgggctcccaggacgacgtccacctttgacttgtacatcttggtgcggccttggtgcagctgctcgtagtgcgtgccgttggtggcgctggcagacatttccccgtagtggaacggaacagatcggatcggatcggagcacggacacggatctcgggcactcggaaatcgttcgcgaacacgttgtgattactctctgctggctgcgctcgaccagcatttggctataaaacaaacagagggtggcccggtgcgggcgagcggtcctactgcgcgcgccatttgcgccagcggctcgcgatggtaacactgaacgcgttgcgtgggtggaggtggtacggtcatattaggtcccttactgtttatttgcagttatatttttatttttaattaattaagttgtttttcatttatataagcattttcaatctctcataagtctttttacatttaaagtacttaaataatatattattattctcttttcattgatgttcgtagttgataggtgtattgtttagttacaacgaatttttgtaaaaagactaactagttaatatttaaatatattttatctttaaggttcatatttgatatacatagttatttgctaataaattcctatgtaaaaaacaagagaaattgcgtaattcaaattaaatccaactcttataatatctaagtcgtataatttgtttacaaacaactttattttgtttacaacaaaataaaaacttatccatttgaaaagccgttacttaacgaatcgtggttacggtcacactacagcgatcagctgttggcgaccgcactattttgtttattccattttgtttgaccatgtcggaagccgatgaaaagtgtcacttgtaagtagttaacaagtaatattaattatagcggttcaatatatattaatctcctgcagctgtcgcgaggtgtccttcaagtacacctgtcccaagtgcaatgctttgtattgcagcgtgggatgctacaagtccaaggagcaccttaaatgttccgaggctttctacaagtcctgcattcaggacgagctgacccaaaacacggtaacgcaggaaagccaggaggacatgcggaaaatatacgacatactgaagaggatgagagaaacggacagtggtttcaatccccaggaatttgatacagatggcctggaaaatagtttggactcggatggaggcgaggaaggagagtcagaagaagatgaggcggaagaaaacgtcaccgagggggacatactggatgaagacctggaggaagacattgcaactcgactgaaaggcgttgatatcaacgatgcggatgaagtttggagccggttaactacagaggagcaagatgagttccagaaattgatcaccaatggagatatcatgaagcttatgccagactacaagccctggtggatcaagccgaagaactctaagattgtgattatacctacacccgaagaagctgccaagaaagagagccgtgttcccgaaattttcgggagcattgccaaattctccgatatatgcaagaaaactccgtctccgtgcctgcactacaatttgtggaacatactaagcgcctacgcctgtgtggctcgtttctttggcggcgaacagaggaccaatgccagcgaggcagtggcccaccttgtcaatctcagcgccaccttaaagtacggcaccaacttcgaggatgctgaggacgctattgtctccgtagagatggaagccatcaccacgggtaatggtcctgccggcgcggctgcagttggaagtgctgcaggaggtgccaatttcctcgtcgacaacagggagcagctgcagcaggatgcccgccagttgatggctacgaaggagcacaagttggccgcccttagtgatgttctctatctgctgcagcagacgaaggcaatcagtcgccgtaagaatacccaggaagccgagttccagaagctgttcgctttggccagcggaagtgtgcaattggatcgcaccaaactggcgcaactggttcgcaaaatcgagtttatgctgtcgtatgtggcgcgggaagaagtcctttaagcaatcctctaaaataaacatttcaaaataattctgtttttatattgtccacaaaatttggagcggtattgactatagattgattgttattttattgttttattttacttggaatttaaatacaactatgtataattagtgtacacattttgattggaaacttcagtattttaaggacttaaagaacaaattggtttaagtaaaacttgactttgtgctagtactgtaactagtacttaaaaatatgtacagatgtcttaaaaataaatgtatatcctaaatacatttcggtatttttgtattcgtatggagcggtattttcagctagccgcgaggtgtatttgaatggtcgcgaaacggtcacacctcacatagtttttttagttggcgattccagacacacactcgagttgtagtgcttttttacgctattttgttattggtaggttgtcgccctgcttcggtatgaacaagtgccagagacccaaagccaaggattatttaacaaccatttaaatgcagtgcagctgcagcagcagcaacaacaaaagcgatcgcaatttagaacagaacatttcatgtaaacgcgtttgggtgtagcggaatttcgcttcccgtgtgtttgtgtgacctagccgagcgtgtgtgcgtgtcggtgtgcgtctggcaacaacaaaatccaatcggccagcaagtgctcttcgtacgcttcgcctgctaaaaattagtgcacagcgaaagcattttaatagcagcgccccaagaaaaccttatgtaaggtgtgctggaaaacgatgcaaatatttacagtagaaacggtcgagacaagttcaatctcaaagataaacgagtttcttggttgtttggcggagggggatttcttatcgcctaagtgtgcgacgtgttggtttagatgtgcatatacgtatgtgtgtgtgtgtgtgtggcgcgagtgcttgtgagagcgccgtaaaggtgcttatctatctccacaaatatgcgaagtatgcgtcaacctgtttgtaaactttctgctggccatttccacacgcaaaacacgaaaatcgcactgagccgcgatcctatatttatatttatagccgatgatggggaaaatccgtaagcgcatcgtgagtcgatgacgcccaaatcaagtcaacccaagatacaagattccacattcagcagacccaacatcaccaatctacacatgtgtgtaggtgattaaacttcagcagaggttattatacatatataaataagaaagcatgtatataaccggtcaatgctgctgataacataaccgttattcaccatacgggtgtgtgcgagtggaactcaaactgactgcattgtttacaaacagctgatgcagggaaactccactccactgataagataccaagatttcccatcgccgagtatgaaaaaatttagctcgctacacagagagaattgaaatgttaaatgttgtcacacgtaagggtctccaatacgatgtacactgctgctcttaggttagacgcacaatcgttttttttttaacaaaatcgatcatttatttgcatgctttttttaattgtccaaaatgcttttcttatcaaagttttctgttggtcattgaattagatgcagcttaaatttcttcgtattgcgtggacaagtataaactgttgtattgaaaaaatataacaaataaacgaataaagtgttttcgagctacatttgaagaaaaaatgggtaaagctgctgcttattggaacgtcaaaaagtagacttcctacactcgcaaggattgcctaatcggaacattgccaaacagataaatcgcagctgcagaactgttgatagatatttgaaggttccagaggcatatgggaataacttcaaaggaaagaaaaaagcactatcaaagcaagcagaacgccaaattgttagaattgcttcgaattctaattttcgaatttgtccggagtaaaaacaagcgtatcaactgttcagcgtacaatcagaaatgcagaacacctgaagcgtgtatgtatattaaatttcaaattcaatttttgggatctcatttatctgggttacaaaatatgggtgcatgagaattcccttgataagatgaaactattacggtggaaaatgtatgctacacagaaagaaaatctgtcaacattatctatttatctcaaaaaacagaaataatatttgaaagcgatactaaaaataatcgaattcaaaataaattacaaatatttatttatcttaatatggttaaaaatatgtttattttttagtttcgaagaaaattttttcaattaaaataagacattaccttaatattccaatttgaaaatagtaaacccattggcagaacaccatgcaaagttgcacaatgagtcaggggtgataagtccagtctttatcaatggggacactcggcgaaaccgtcaagaaatatggtcgttgataaggctccagtaattaaagttctgcctgttgcatcaatgtgaaggaatttcttaattgaacaaattaggcaaacaataaatttactcagagcccgtctcgtttgggtttactatagtatgtcgtttaacaaacgatttgttggtcttagccaaacactacaaaaatacaagtttgcgtataaacaaagagctttttgttgttgctgctgtgtggaagttgtttatgtctgcagtgtctatttacgtaacaaaactcatattttacgattattgcgcttaagcccgtcgtatgtgattgattaatattgattggaatccacaggaaatgtcccaccacagcgatgatcagctcctccaggctggaagcgattccttctgggagcccggcaactacaaacgcaccaccaagcggatcgaggatggttacaagtgagtggataatccccagggagtcttggtgcacagagagatactttattttgccattatgtcagtcgaattcctcgacataatacaattggcttaatattcaaaaacatattcgtagctgcaacccaatcgtttttcaacgtttctgtcataccaattggtattggtaactgtatcttttctgtgtgtttagtaggtcatgcagtgtcatcacattgttttgaatgcaaacttacagcaattcgtatttatttaagggaaaaaaataagaaaatataaagaccttggtataagcattggtcttagtattaactcaatttgttctacttatgtggacatttcataaacttttttaatgagctttgatttctagtgatacaatcaatctttttaagcaaataggtaatgggttctctctgtgtatttgcactgggcgacgctgggtcattgccagccgaatatatcgacacccgaagcccaaacccaagacaaaaattcaaaccggtttgcattattatgattcttgtctcatttcgcccgcagactctgcaatgacctacagcaactgattcaggagcgtgccgacatcgagaagggatatgcgaaaagcctgcgcacctggtcaaagaaatggggtgaactcattgagaaaggtaagtgagcggcaggtggggatctggtgagatatggggatgtgggtggctgtggcctgtgggatgagacatcatcagtcgtggaagccttctgttggccaacacattcattcacgagctaaaagcccagtggagcatcaagtgacccgctcacgttgaattcccaccacttatttggcccactggctgttcttattttctacattctgtacatcattctgagcattgttgttgccgttgtgcgataagtggcttaagctattaatggttttttttacgtttttcgttacctcgtttttgtcggttgtattctgcaaaagctgcgcactgtggttcaaaatcgccacaccaatttatttaagtatgttaatgagcggggctggcaaagtgtttggattaactaacataaacatatgcatacactcttcacactcttcattctaaacaattaaaattcggcagcggaaatcttaagtttgtacaagagaaaataataaataaataaagaatcaaatatctgtgggtttctgctttatagtaatatacaatttttattttttgatatataagttatatgggttcttaaggttttattaccttgctattgcctcatatatgtacttctataagtacacactaccaaatactattttcgaaaacggcggtaatcatcgactcactcattgttttcggaattgggtctttgaccatttttagcggatgtccggcacagtgtgcgcgcttcttcgtaaaatgaaatcgagtacagcgcttgcgaagttggaaaccgctttgccccattggtactgtttgcttctattgctgctattttctgtgaccgcctctgcacggaattctcagtgtccactttcacagtaaccagcgatgggcaattgcaaaagcgactaccatcacttcctccgcctccgagtgctcttcgagttttcttatttgcgaggaatttgcctagccgcgtctagccaaagatacagatacgaatacgtgtgcagatacaaatacagatacagatacgttcacagttacagatacggagactgggaggcagaagcgctggacagtggcccataactcggcaccaaagcaaaccggcaccagagcgtcgcttgaaatggtttcaaaaatcaatgcgacgagaaaatagaacgagttatttgtgtgctaagcgtctcaatttctatatatctgtttgtgtgccttttcacagggggaattgggaatagtgagtcgttaggcaaacgagttccgtgcactgccaattataagacgagcatcatatcaacttgattgccgtgtgtttggggtcccaataaaaaatgccaaaaatgtacgatgttcctccatcgcagcacccatacaagcgcttattcttcgggcattttatatttgctatacctatagatatggctacatatgtatgtttgtatatatcttgcggctgcggctgattagataaaccaagtacccgcggggctcacgatgacgtcagccgcaaacagctcgacagggtgacacgcttgtaatctgttgttaattgagaaacgctaaaagagatatataacgaatgtctgatttgtttcaggcccggaatacggaaccacggaggcagcctggaagggcgttctgacggaatcggaacgcatctccgacgttcacatgaagatcaaggacaatctctgcaacgatgtgaacagccagataaagacgtggcagaaggagaactaccaccacacgcttatgcagatcaaggagcgcaaggacctggaggatctgttcaagaaggcccagaaaccctgggccaagctgctggcaaaggtcgagaaggccaaagcggactaccattcggcctgcaagacggagcgcagtgctaccaatcaggaacgcaatgccaatgccgatagctcgttgtcgccggatcaggtaaggatcttttttgtaaaagcaatagtttagttatacatatgtatgtataactattaatttaatttatttattaattttatgctcacaccacttctcatttcctaattaggtgaagaaaatgcacgatcgagtgcaaaagaccaaagatcaagtgcaaaagtgccgggaaaagtacgagcaggcgattgccgaaatcaccaaatacaattcggtgtacatcgaggacatgacatccgtgtttgaaaagtgccaaacctttgagaagacgcgtttgcagttcttcaaagaaatcctgttcaacgtgcactcgtgcctggacctcacaaaagtgcaaaggtgcgaattgaatttgatttgagtttaactgatccatttaaataacttttacatgacttacagcctgccccaaatctacgaggagttctcccacacgatcaacaatgcagaccagcagaaagacctaaaatggtggtcgaacaatcatggcattaacatggccatgaattggccatcatttgtggtgagttttctgtttttactgaagcccagtgtggccgctaatggaagaacttcctatttgttgacaggaatatacggaggagttccgtgacattgccaagggcaacaaatcaaaagaggcactgccggcagcacccatcacgctcatcaaccagcgacctgtggccgaggatgtgcacgtaagccagttgactacccagtagttaatatcagactaagccagctctttagcaggaatacccccagacaaacagcctgaagaagaacaccagcaccttgagcagtgtcagcagcagagcgagtgtgaagagcgaaatagcgaccacgcaatcctcagtcaccacatcggaagccaaaacatcggcggcggttgccggcgctgcgacggcaacggcagcagcaacagcggcgtcagcggcatccaatcgcaactcgagcgtaacgtaagttgaaacagtttgtattgttttgaattacacttggactgcctgatggcttgatggctgaatggttgtgtatggctgtatggctggcttgctcgccaatccagagacacgtcgcgttgaatgcgctcattttcattgaactaattgatttcaatttgtatacacagcaacggcaacggcaaagtcgatgcaaatccattcgacgaggaggaggagtgggacgagagcgacaacgtgctggtggacaacggtgagccaggcgtgccggtcaaagcgctgtatgattacgagggcgctgaaagtgatgagctcacattcaagcaaggtgtgtagaagccctccatatgataatctccaacggtcaccgctcaccgctcgttcgacccttttactctttcaggtgatgttttcgagaagctcgaagatgaagacgaacaaggctggtgcaagggacgcatgaatgggcgcgtcggactgtatccggccaactatgtggagaccgcgtaagcgggcgtaggggaagaataggggaagtcgttaagcagttatatacgcgcagatatgtatatgcagcataacacagaggttagagacgcattacggattgcgtattcagtaaaagagtcgttgatgaaaaattaccatacatatgtattagaaattgttatgagcaatcgcttgcactattcgtacttatccggacgatagtgcggcatctaaggcattgggcatcgagtggatgcagcgatcccaacaccgataccgatcatccaaccaacctaccaatcaactcaccaacagtagcaatgcggccgttagcaggccgatacgaacatgcagatatgtaacagcaaacttagcgaatgtcgtcaacagaacaataagtgtaagcgtcaatgtacggaatgacattacaaattaattgtattatgtaatatttatgctatgtataacaaactgaaactgaaattatgtactttttgtcatgatgcggcggcaattttactccctctctgtgccgtaaaccttttatgtggtcagccgggaggcgcagcgtagtttttggcatatttagatactgtacatgcatagcatttgtaatgcgtttctggaacattttatattatttatgaagttttgtgtatacatacgtgttggattatgtatactgtaaatgtacatttttaaatgacctaaattattgaaataaaaaaaaaaccaaaacccgattacgatttcttcagtttatttgggtctgttttagattcgaacttcagaattgattcatattacgcttttaaattatttaaaccgttcagttagagtttcaaattcgttgcatgcttttggggatgatcatattaatttcaatcactattagaaaaatcaagggttagctatttaccgctaatttattttttgactgttatatgattaacccttgattttcatacgcgttacttgtagagtttaactgtttactcgattaaaaagtatgaagtgtttt

SEQ ID NO: 39671 - DNA, 2619 bp, DROSOPHILA
atgtcggaagccgatgaaaagtgtcacttctgtcgcgaggtgtccttcaagtacacctgtcccaagtgcaatgctttgtattgcagcgtgggatgctacaagtccaaggagcaccttaaatgttccgaggctttctacaagtcctgcattcaggacgagctgacccaaaacacggtaacgcaggaaagccaggaggacatgcggaaaatatacgacatactgaagaggatgagagaaacggacagtggtttcaatccccaggaatttgatacagatggcctggaaaatagtttggactcggatggaggcgaggaaggagagtcagaagaagatgaggcggaagaaaacgtcaccgagggggacatactggatgaagacctggaggaagacattgcaactcgactgaaaggcgttgatatcaacgatgcggatgaagtttggagccggttaactacagaggagcaagatgagttccagaaattgatcaccaatggagatatcatgaagcttatgccagactacaagccctggtggatcaagccgaagaactctaagattgtgattatacctacacccgaagaagctgccaagaaagagagccgtgttcccgaaattttcgggagcattgccaaattctccgatatatgcaagaaaactccgtctccgtgcctgcactacaatttgtggaacatactaagcgcctacgcctgtgtggctcgtttctttggcggcgaacagaggaccaatgccagcgaggcagtggcccaccttgtcaatctcagcgccaccttaaagtacggcaccaacttcgaggatgctgaggacgctattgtctccgtagagatggaagccatcaccacgggtaatggtcctgccggcgcggctgcagttggaagtgctgcaggaggtgccaatttcctcgtcgacaacagggagcagctgcagcaggatgcccgccagttgatggctacgaaggagcacaagttggccgcccttagtgatgttctctatctgctgcagcagacgaaggcaatcagtcgccgtaagaatacccaggaagccgagttccagaagctgttcgctttggccagcggaagtgtgcaattggatcgcaccaaactggcgcaactggaaatgtcccaccacagcgatgatcagctcctccaggctggaagcgattccttctgggagcccggcaactacaaacgcaccaccaagcggatcgaggatggttacaaactctgcaatgacctacagcaactgattcaggagcgtgccgacatcgagaagggatatgcgaaaagcctgcgcacctggtcaaagaaatggggtgaactcattgagaaaggcccggaatacggaaccacggaggcagcctggaagggcgttctgacggaatcggaacgcatctccgacgttcacatgaagatcaaggacaatctctgcaacgatgtgaacagccagataaagacgtggcagaaggagaactaccaccacacgcttatgcagatcaaggagcgcaaggacctggaggatctgttcaagaaggcccagaaaccctgggccaagctgctggcaaaggtcgagaaggccaaagcggactaccattcggcctgcaagacggagcgcagtgctaccaatcaggaacgcaatgccaatgccgatagctcgttgtcgccggatcaggtgaagaaaatgcacgatcgagtgcaaaagaccaaagatcaagtgcaaaagtgccgggaaaagtacgagcaggcgattgccgaaatcaccaaatacaattcggtgtacatcgaggacatgacatccgtgtttgaaaagtgccaaacctttgagaagacgcgtttgcagttcttcaaagaaatcctgttcaacgtgcactcgtgcctggacctcacaaaagtgcaaagcctgccccaaatctacgaggagttctcccacacgatcaacaatgcagaccagcagaaagacctaaaatggtggtcgaacaatcatggcattaacatggccatgaattggccatcatttgtggaatatacggaggagttccgtgacattgccaagggcaacaaatcaaaagaggcactgccggcagcacccatcacgctcatcaaccagcgacctgtggccgaggatgtgcacgaatacccccagacaaacagcctgaagaagaacaccagcaccttgagcagtgtcagcagcagagcgagtgtgaagagcgaaatagcgaccacgcaatcctcagtcaccacatcggaagccaaaacatcggcggcggttgccggcgctgcgacggcaacggcagcagcaacagcggcgtcagcggcatccaatcgcaactcgagcgtaaccaacggcaacggcaaagtcgatgcaaatccattcgacgaggaggaggagtgggacgagagcgacaacgtgctggtggacaacggtgagccaggcgtgccggtcaaagcgctgtatgattacgagggcgctgaaagtgatgagctcacattcaagcaaggtgatgttttcgagaagctcgaagatgaagacgaacaaggctggtgcaagggacgcatgaatgggcgcgtcggactgtatccggccaactatgtggagaccgcgtaa

SEQ ID NO: 39672 - protein, 872 aa, DROSOPHILA
MSEADEKCHFCREVSFKYTCPKCNALYCSVGCYKSKEHLKCSEAFYKSCIQDELTQNTVTQESQEDMRKIYDILKRMRETDSGFNPQEFDTDGLENSLDSDGGEEGESEEDEAEENVTEGDILDEDLEEDIATRLKGVDINDADEVWSRLTTEEQDEFQKLITNGDIMKLMPDYKPWWIKPKNSKIVIIPTPEEAAKKESRVPEIFGSIAKFSDICKKTPSPCLHYNLWNILSAYACVARFFGGEQRTNASEAVAHLVNLSATLKYGTNFEDAEDAIVSVEMEAITTGNGPAGAAAVGSAAGGANFLVDNREQLQQDARQLMATKEHKLAALSDVLYLLQQTKAISRRKNTQEAEFQKLFALASGSVQLDRTKLAQLEMSHHSDDQLLQAGSDSFWEPGNYKRTTKRIEDGYKLCNDLQQLIQERADIEKGYAKSLRTWSKKWGELIEKGPEYGTTEAAWKGVLTESERISDVHMKIKDNLCNDVNSQIKTWQKENYHHTLMQIKERKDLEDLFKKAQKPWAKLLAKVEKAKADYHSACKTERSATNQERNANADSSLSPDQVKKMHDRVQKTKDQVQKCREKYEQAIAEITKYNSVYIEDMTSVFEKCQTFEKTRLQFFKEILFNVHSCLDLTKVQSLPQIYEEFSHTINNADQQKDLKWWSNNHGINMAMNWPSFVEYTEEFRDIAKGNKSKEALPAAPITLINQRPVAEDVHEYPQTNSLKKNTSTLSSVSSRASVKSEIATTQSSVTTSEAKTSAAVAGAATATAAATAASAASNRNSSVTNGNGKVDANPFDEEEEWDESDNVLVDNGEPGVPVKALYDYEGAESDELTFKQGDVFEKLEDEDEQGWCKGRMNGRVGLYPANYVETA

SEQ ID NO: 39673 - DNA, 4108 bp, DROSOPHILA
cgtacaattttgcgttagtgtttttgacttagtgttttgggggatgccaagtcacgattagtgaagatcgtgactaatcgtgaaaaactcttgctacaatgacagaaaaaatttgttttttttttattatattacaaagaagcatttaacttgaatgtctgccttatcattttaattagcccaggtaattatttttatatatattacaaactcagtaatacaaagcttaagatttcagtgtgtacttagttttaataatgccgatcgcttagcagcttcattagctcagaagttataatcactgaacatctggcttttttggaagctgtttagggaaattgccacgtcaagcacccggagacaatggcatttcaaacgtgatataattaaatcgtacccacaatacttggttattgtactagaaacaattcagatatatattgggataacgtaatcagcttcaagtggcaacgaatcgccttagaaataattttggtacgtcgatgtacttggagttatcaccatggacccgacagttcccagaaactttggagcactcagtggttggttgagtagtaacagagaaccccaagcattgtggaattctgaaagctatcgtcagttgagtgttaagtaccgagcggagcggacatatggggtccgatttgtgataagtcgcggaaatggtatggataacgccgggtctagaataaatttaccggatattactggataactatagtttagtgcaataaatataaccgatttatgttaatggagaagttagttttcgattagtgtcaattctataatgacgaaaattaaatatgaacttgttccaagtgaggagcaagaaccaaacgaaagtaaaaaacctttaaattggatagtgaaaatattatttgttgtcttggcgctttttaccctggtcatttataccttgagcggcgccaataatccgctcaagaacaatgcagatccattttccccttggaaatccatgagactccttgcgggatcaggttggaccaataatcccggagatctgtcgagtcctttgaatgttaagcatacaactcgtagtctgagtacagagaagcaatctacggaagcaatctataataaactagcagatactgagagcaccaccgaggatcaaactgagataactaccgtagaccacacggatgaagtcgtagaaagtagcacttcatcaccagctactggagcatcgaaaacagagactttatatgcactggaaggaaatggaaagaaatacttcgtccatagcccgcagtgccaaatgagccacccaaatccgtttgccaataacattcagcacatctacaagaaacattcctatatagtgtgtgataaaagtcgcgacatgatcacagtcaactacaatgtaactgacagcacgtacaggctgcacaagaacgagaactccacctgctgcttcaagcagatccttcgagcaggaacttcagccaatgcggatcataagtacaagtaagtttccaaggacatagagatggacactgaagattagtatcccggcaggctgggtccttgcgtagaatttcaccaggacttcttggtgccaacagaagtgagtgccatgatcacctattgccgtcggcctccattcgataaggtgtcgcaaaaggatgccttcagttttgtgcatccgcgaaaggatcagatcgaaaatcccacaacgccgcatagaagaaggcccagcgttttgctgtggggcattgattccatttcccgaatgaatcttgagcttacgatgccccgtatgtacgagtacttgaacaatcaacattggtttgagcttcagggatacaacaaggtaaacaataatttaattttgaatgaaaacacatggatttattaaaactgcaagcctttctacattagatgggcgataatacgtttccgaatctgatggcggttctcacgggatttaacaagacctacgcgaacgcacgttgccatcctgagaaggtgcgtggcctggatgcctgtccgtttatttggaaggacttcaaggacaagggatacacaactgccttcgccgaggactggagcaagttctccacgtttgactactctagcaggggctttttcaatcctccgaccgacgtgtacggcagaccactggtcctggccgtggagaaggagctaacgatattacaacggggtcagatgccctactgcttgggccgcaagccggcttccgaatacatctatgacatgggcgtgcagttcaccatggtcaaccggaacagcaccttcttcggaatgttttggaccaacacattcagccacaacgacttctctatgccctccgccatggatgagaggatggtgaagtacatgcggacgttggacaagaacggcataatggataacaccatcatcatcttcttcagcgatcatggatccaggtttggaccattgaggaatttggacagcggtttcgtggaagaacgcttgcccttcatatatatccgtgtgccgcgttggattcgtgagaagtacccgaagctcctgcgcaacctgcagatgaacaagaaccgcctgacgtcgccatacgatatccatgccaccctgaggcacatcctggagctagacactcccaaggataagctacctcgtcccgatggctgctccagctgtcacagcgttttcgaggaggtggactggtcgaggaattgctcacaggccgggatcgaggatcactggtgcgcatgcaacagcttctccgacgtgcccacaacggatcccagcgccaggagcatgtccacccagctggtggaggccattaacgaatatgtggccagcaaaaaaggaacgaaacggtgcagtcgcttgaaactgaaccgaatatcctcagtccagagaagaggaaactccaatcggtatctcatccagctgatggcccagccgggtgacgctctcttcgaggccaccgtggattgggatgccagtgcccaaaggattcccgctcagatgcccagcatcagtcggttagacacgtacgccgcaaagtcaagatgctcgtcggttaaggagaccaaaaagtactgcatctgctgagttccaactgcaaactctggacaaccgctagaccgcacaaaaaaggactcgctactgcaatctttcggatctcggagcctttgttctccggagcaatggaatcttatcactggggtggatctgtggccggatggttagttgctggcaactactacttttggcaaacgtaattgcagctcggcaaattgtgcgaatggaaaattagttgacaattacatgacaattggcagatactcgggtaattgtcgagtgattagaaaaaaatactggctctaattaacccaaatctttgtaaatattttttaagctagttgtaacagccgcttagaaatataagttgtatcaacaacccaaatcagttctgcacagtttgctttcttttataaggatggaaaacgtttaattcatattaaacataaatgcacacaaagagcgaatcctagattatctaaatatatatacatatatatgtatcgggtatctggattcgataaaaaacgttagtattgaacgctttaagagaggcagataggataggataaagtctaaaactaggggaatataatatatagttacttggcacagaaaagtataactgactaactgaaaatatactgaaataactgaaaacctattcaatcgagattcccaccaagtagtcaatgaatgacagtggcatgtgttttactaattcggtggttgtcatatgcttttttgaagacctctatcataaatgaagtaagcttctaaaggttagtggtttttgatttatgtaagtgttaacacgaaactatgacatacaatggtgctgtaaacggggagtgatgacattttcaaaaagcttatatcttgcatcggttccattcaatttgttacccatttgtggataggaattgcaaagaattccttctacgcatggggaaactaagaagtttctaaagatacgttaaataatttcaaaagaggcttgcatatggatttcgagtagtagtacgcatac

SEQ ID NO: 39674 - DNA, 1989 bp, DROSOPHILA
atgagactccttgcgggatcaggttggaccaataatcccggagatctgtcgagtcctttgaatgttaagcatacaactcgtagtctgagtacagagaagcaatctacggaagcaatctataataaactagcagatactgagagcaccaccgaggatcaaactgagataactaccgtagaccacacggatgaagtcgtagaaagtagcacttcatcaccagctactggagcatcgaaaacagagactttatatgcactggaaggaaatggaaagaaatacttcgtccatagcccgcagtgccaaatgagccacccaaatccgtttgccaataacattcagcacatctacaagaaacattcctatatagtgtgtgataaaagtcgcgacatgatcacagtcaactacaatgtaactgacagcacgtacaggctgcacaagaacgagaactccacctgctgcttcaagcagatccttcgagcaggaacttcagccaatgcggatcataagtacaagctgggtccttgcgtagaatttcaccaggacttcttggtgccaacagaagtgagtgccatgatcacctattgccgtcggcctccattcgataaggtgtcgcaaaaggatgccttcagttttgtgcatccgcgaaaggatcagatcgaaaatcccacaacgccgcatagaagaaggcccagcgttttgctgtggggcattgattccatttcccgaatgaatcttgagcttacgatgccccgtatgtacgagtacttgaacaatcaacattggtttgagcttcagggatacaacaagatgggcgataatacgtttccgaatctgatggcggttctcacgggatttaacaagacctacgcgaacgcacgttgccatcctgagaaggtgcgtggcctggatgcctgtccgtttatttggaaggacttcaaggacaagggatacacaactgccttcgccgaggactggagcaagttctccacgtttgactactctagcaggggctttttcaatcctccgaccgacgtgtacggcagaccactggtcctggccgtggagaaggagctaacgatattacaacggggtcagatgccctactgcttgggccgcaagccggcttccgaatacatctatgacatgggcgtgcagttcaccatggtcaaccggaacagcaccttcttcggaatgttttggaccaacacattcagccacaacgacttctctatgccctccgccatggatgagaggatggtgaagtacatgcggacgttggacaagaacggcataatggataacaccatcatcatcttcttcagcgatcatggatccaggtttggaccattgaggaatttggacagcggtttcgtggaagaacgcttgcccttcatatatatccgtgtgccgcgttggattcgtgagaagtacccgaagctcctgcgcaacctgcagatgaacaagaaccgcctgacgtcgccatacgatatccatgccaccctgaggcacatcctggagctagacactcccaaggataagctacctcgtcccgatggctgctccagctgtcacagcgttttcgaggaggtggactggtcgaggaattgctcacaggccgggatcgaggatcactggtgcgcatgcaacagcttctccgacgtgcccacaacggatcccagcgccaggagcatgtccacccagctggtggaggccattaacgaatatgtggccagcaaaaaaggaacgaaacggtgcagtcgcttgaaactgaaccgaatatcctcagtccagagaagaggaaactccaatcggtatctcatccagctgatggcccagccgggtgacgctctcttcgaggccaccgtggattgggatgccagtgcccaaaggattcccgctcagatgcccagcatcagtcggttagacacgtacgccgcaaagtcaagatgctcgtcggttaaggagaccaaaaagtactgcatctgctga

SEQ ID NO: 39675 - protein, 662 aa, DROSOPHILA
MRLLAGSGWTNNPGDLSSPLNVKHTTRSLSTEKQSTEAIYNKLADTESTTEDQTEITTVDHTDEVVESSTSSPATGASKTETLYALEGNGKKYFVHSPQCQMSHPNPFANNIQHIYKKHSYIVCDKSRDMITVNYNVTDSTYRLHKNENSTCCFKQILRAGTSANADHKYKLGPCVEFHQDFLVPTEVSAMITYCRRPPFDKVSQKDAFSFVHPRKDQIENPTTPHRRRPSVLLWGIDSISRMNLELTMPRMYEYLNNQHWFELQGYNKMGDNTFPNLMAVLTGFNKTYANARCHPEKVRGLDACPFIWKDFKDKGYTTAFAEDWSKFSTFDYSSRGFFNPPTDVYGRPLVLAVEKELTILQRGQMPYCLGRKPASEYIYDMGVQFTMVNRNSTFFGMFWTNTFSHNDFSMPSAMDERMVKYMRTLDKNGIMDNTIIIFFSDHGSRFGPLRNLDSGFVEERLPFIYIRVPRWIREKYPKLLRNLQMNKNRLTSPYDIHATLRHILELDTPKDKLPRPDGCSSCHSVFEEVDWSRNCSQAGIEDHWCACNSFSDVPTTDPSARSMSTQLVEAINEYVASKKGTKRCSRLKLNRISSVQRRGNSNRYLIQLMAQPGDALFEATVDWDASAQRIPAQMPSISRLDTYAAKSRCSSVKETKKYCIC

SEQ ID NO: 39676 - DNA, 2540 bp, DROSOPHILA
ggtttttatatgctggctattcggtggttattttcaattaacagtgtaattgatactttaggaactcagcgagggttgcctccaaactcgtttcgcaaaggcaactgttatgaaaacaaatttacgaatcaatcaaaacatacgagcatcaaaacatatcaggctcaacttgttttcccatcgaaagggatggactgaagtggaatgggatgaaataggatgggcgggcttgagaaaaacatggcagcggatgatttcatatcgggggcaactaccccgaacatcgccaacaaagccacaacaaatcaaaaactatcacattcatatttgtattgaggcatatcattatacaccgaagatcagatgcgcttcgcttagagctttagaaaatcagtttaactcattagcgaggctataaatgcatatgacatacatatggcattatatggcactggattaaattttaggatcggacttaattaagttgggaatttcatgagaacctatagcattgtcacttatgcatatgtatgaaataaagcacatatacacataccaaacatttaattcagtatatgataagctctccctcctactttaaagttcctattactgtagtcagggtgttcagatacaatcatttaactgaattcgaatcacggcgaaccttttacagggcgtcagagacaattgaacacgtgtacttgtacttcattgccttcgtgggcctaatctggaccggtgagagggtaatttgggtgggccagcggatttctacctggacggcgagaaagggaaacgcctattaagcggctcgttgcttccgaatgagaatggaattgggccaggccaatcttttcgtcctgccagacagggatggcgatactatctgctgggatgcaaatggcggcgatgggaggtccttgcataaatagctcgtggatgcgcagccagctcagcagtagcaactcgaccatcacagcgaaaggatcgcgccacgatgagtgacttcagcatcgagtatattttgaaccgagccggcgacagatacgtgggcaccaatgcctccttgggcgtcctgcagcgactccgtgccagcttgcctttccatccgtacgcccacccagcatcttatgtctcaaaggagtctggaggatctcctccagcctcggctgcggaggctcagatacccgtctacgattggctgcagtacacccggtaccatccgcccaagttgcccagagccctccgccaaaatgcgcccgccaaaaggactcctggtcgcctgccccgcataccatttactccgcagcagctgcaggccctggaaaatgcctacaaggagtccaactatctgagcgccgaggacgccaacaaactagccgactccttggagctgaccaatacgcgggtgaagatctggttccagaatcgaagggctcgcgagcgacgggagaagcgcgaaaaggacgagagctgcgactccaccttctcatcgaacgcctccagtccggaaccggaaatgatcgttgtaacgtgagctggagcaggatatccacgaggactgtttactgttacgaatttagtggctttctgtaaatacacattataggactaagtagacccataagcatatagaaccaatctgacaatattaaatctgttaatttgaaattattgggtgtttatatgggttatcatttaaaacgtttcagcaaaccaataatatttgaaaccacgcttaaactggatattaactttggtgttaacttgtaaaaacaaccttctgaacttataaagacaattctgcacggccttgtaaaaaaaatcggtcagtcatgcagaacttgaatttcaaaagattgttaatataattatcatacaaattagttttatattagtttactcttttaacttagagagtacagtctagtacacacatatttaatgattcttgggtgtaatttattttatttcgattcaattcaacgatttcgaagaagtgcttgtagatatgtatttattttggttcgacaaatacagttttttgatttctaggaaatgtgaagtacacctaattgatatgatgtattggcagaagtgttcggttgaaattcactaaggtttgattaactttttgctatctgggtaccttacctcatttatattatcttttccgagaatcgaacgattcaaggaatcctaaggaagccgtttccctttcagattacgaaataccgtcggctaattaatcggtaattaaatataactttaaaagttagaaaatttattgttgctggatttgtgccatttagtaaccttttaattaaacaaatataatatatcatgcacagtaacacaaacgttcattttttgagtgccattttgaaaaacaagttttaatgcaagattgcacttaacttgagaaagttaaaactcttagacattaaaaagtaagtaaaacagtaggtgagataaatttaatcaataaatgatttataatttaccaatttgctttaaaaaataaaataaaataaaaa

SEQ ID NO: 39677 - DNA, 540 bp, DROSOPHILA
atgagtgacttcagcatcgagtatattttgaaccgagccggcgacagatacgtgggcaccaatgcctccttgggcgtcctgcagcgactccgtgccagcttgcctttccatccgtacgcccacccagcatcttatgtctcaaaggagtctggaggatctcctccagcctcggctgcggaggctcagatacccgtctacgattggctgcagtacacccggtaccatccgcccaagttgcccagagccctccgccaaaatgcgcccgccaaaaggactcctggtcgcctgccccgcataccatttactccgcagcagctgcaggccctggaaaatgcctacaaggagtccaactatctgagcgccgaggacgccaacaaactagccgactccttggagctgaccaatacgcgggtgaagatctggttccagaatcgaagggctcgcgagcgacgggagaagcgcgaaaaggacgagagctgcgactccaccttctcatcgaacgcctccagtccggaaccggaaatgatcgttgtaacgtga

SEQ ID NO: 39678 - protein, 179 aa, DROSOPHILA
MSDFSIEYILNRAGDRYVGTNASLGVLQRLRASLPFHPYAHPASYVSKESGGSPPASAAEAQIPVYDWLQYTRYHPPKLPRALRQNAPAKRTPGRLPRIPFTPQQLQALENAYKESNYLSAEDANKLADSLELTNTRVKIWFQNRRARERREKREKDESCDSTFSSNASSPEPEMIVVT

SEQ ID NO: 39679 - DNA, 2886 bp, DROSOPHILA
cgaatgtttatgttactaatctagtcctgtttgacaaacaatgcggcaatatttattcaaatggcgtagaataacacacagcccacagtcctccaggattccctcttccgtccaccctgcggatcaaacaaaggacaagcgcaggcgcatgcttatggcccattttccgtaaatggttcatttgtactcgtaagacgaggcccacaaaaacttgggaaaacgctgaagatggttgcgggcggactagtttttgggctcaacgtaatacccattttgcgtagattgcggtaatcggggtgtgctggcttagcgaggcgtcagccagactgtccttttgcgatcctttgagggaaaggagacaatggcatggccaatgaccatagcccaagctttattcgtgtaatattgcagaaatattataagattttcggtctacgagtaatgatataatacaaatttaattattttcaggctttaaaaagtaactctcataactcttttaattagcaggaggatttaaaaagtgattgcctaataatcaaatggaaactaacctctcatatatgccaagttatgaaacttatcagtgtacagttttgattgtttacgggtaaagttagcacttcttgaaatattattattttttaaataagtatttaaatttacgaacgcagtatattccctaaactaattaaagttattatttgctttgggttatctttgaaaatcataaatttaaagaaaaacattaataatagtgttatctgtctgaagtaaagtatattaaatattattaatacataagtacatcgatttttaaagctaacaaagccgttataaaatactaaagttcgagaatataccaaaccctttgaacagaattctgactggttaccctttaagttatcgatagaagcaatcgattgaccagcctagctacccgtccctcaatattattgccagacatgcaaatgcaattcactaacgcctgacacgatagttgcacaacaaaaatcgataggcccatcgataattctgcgccatctttctttttcgggatccgcacaccaagttaagaggtaatcgagtgatttttgtcgaaatataatagaaaatagcccagttaaacccaaaatacctgtgaaatgtgtgtgcgagcgattgtcaagtgtgttggacgccaaatgccaactgcaaaacgaccgaaaaagggaaaaattgactgaaactcggcacacgtgtttcgccctacaagtcaatatgaatatcttcactaataaatgcatgcggcatggttactttgcagagcgaatcatcatgcagctgttcgtccgtggactagagaccatcgaggccctggaggtttcccaggatgccaccattgccggagtcaaggtgagtccccccaatgactgatatacaaataacataacctaattgtgtgttccccatcctcgtccattgtggccatcgcgatcgtagaaccaactggcccagatccatggattcaacgccgaggaattcagcctcgattgcgagggcatcactctggccaacgagactcccgtgaccgccctgagctcctttgagctggacctcaacattcccatgctgggaggtaaggtgcacggttctctggcccgtgccggcaaggtcaagggacagacgcccaaggtggagaagcaggagaagaagaagaagaagaccggacgcgccaagcgcaggatccagtacaaccgccggttcgtcaactttgtgcagggcttcggccgtcgtcgcggccccaacgccaactccacatagaaggattttggatgaacaagtgtctaccttttactccagattgatatgattgttcataaagtaatttcaaacctttaaacaaacggtgttgcgcatttcaaattgttaaatcacggcaagcaattgttggaggaatctcgtaccttgattatttataattaactattagaaatttatagatgtgcggtagtgcgcggagtagtaatcaagtgtaacgttaattatttaaagtgaagccttaaaatgccacacattacgcagctggtgcaatagttttgctaaagttacctgcttaaattcgaccaccgcatatggcgggaaaccagtttactagtagggtaaatgaaatggagctctcaattgatatatttatatttgatagcttatttaaatgtttatatctatatacgattttcatcagcgttgtacatgccagttactgctcattcattacactattccatggcaagagctcttaggattccccagtggtcagttggtgaactgacgccgttttcgactggcccgaaagcgacgataccagaactcgccgcacactattaaaagagccaacgtgaagcccaagagcaggaccagaaagcacccttgcatgtcgtccatgttcaccttgtggttggtaacctggcgctgggcgctcttcccgttgcacttgcccgcgctgggtaagttcatctggtgccagcgctcgatgaagcccatccggaacatgctcttgatgtggcggtttaccaggtgcagatacgcactctgggccggcacaatcatggcaatctgctcgtccacgaagctctccctgcccaaagcaaagtggcactccttctcccgctcgaagtgccgctgaacaatcaactgcagattgatccgccaatcgatgttgatgcgctcgccacgcttcaccgcctcgatgtcctcctcttgggcgctgccgtagattttcgcccgttccaggtagtgtttgaagtcctcccgcgttgtcgactgaacgtaccgctcgaagaaggtgccgtttcgcaatccatactgtacaatgtccttgtggtcctctagttgattcaaatagtc

SEQ ID NO: 39680 - DNA, 574 bp, DROSOPHILA
ttgcacaacaaaaatcgataggcccatcgataattctgcgccatctttctttttcgggatccgcacaccaagttaagagagagcgaatcatcatgcagctgttcgtccgtggactagagaccatcgaggccctggaggtttcccaggatgccaccattgccggagtcaagaaccaactggcccagatccatggattcaacgccgaggaattcagcctcgattgcgagggcatcactctggccaacgagactcccgtgaccgccctgagctcctttgagctggacctcaacattcccatgctgggaggtaaggtgcacggttctctggcccgtgccggcaaggtcaagggacagacgcccaaggtggagaagcaggagaagaagaagaagaagaccggacgcgccaagcgcaggatccagtacaaccgccggttcgtcaactttgtgcagggcttcggccgtcgtcgcggccccaacgccaactccacatagaaggattttggatgaacaagtgtctaccttttactccagattgatatgattgttcataaagtaatttcaaacctttaaacaaa

SEQ ID NO: 39681 - protein, 132 aa, DROSOPHILA
MQLFVRGLETIEALEVSQDATIAGVKNQLAQIHGFNAEEFSLDCEGITLANETPVTALSSFELDLNIPMLGGKVHGSLARAGKVKGQTPKVEKQEKKKKKTGRAKRRIQYNRRFVNFVQGFGRRRGPNANST

SEQ ID NO: 39682 - DNA, 10589 bp, DROSOPHILA
tggccaacggtatgtaactgctgcaccagctacacaaacaggcaaacaagataatcaatgtcggacgcacacacatcatcgtgtcagagttgattgcaacattcatgtggacatgggtgtgtggaagggaggacctaggcgtgtgggagttcctaggcgtgtgtatgtggcaggctggggacaaattcaccattcgccctgccgtcggcgaaatgtgcaactgacagctgctgtgcagctgcagcaacaacacagctatggccacacaactaggacgtgcctacgactactgtcaactgttcctttgcaagggacatatgtctacatacgtgccgcatactcctacaactgagactactcccaattcttgatgaggcgcacggggggttggcaggacgtgcgtgccattttgccacaacggcaagaagcaacggaaataacaacaggaaatgttgccaactaaatttttaacacagcacaagttctacgagcagcttgactaattgtgcgcgacatgcattccatttcttacaagtcctttgggtaaatagagtcgctggcaaattgtttgattgattgctgtttgtgcaagttgtcagagaaatcaagatacgaatagcaaaacgagtcctgaccttaaaagcgagtccttgaatttgcatcaaaggaaaaagctccccaaatgcttgaagtttataaaaataaatagaaaggacctctcactgaaatctaaattaagataaatttaaaatattgtaaaaaaaaatgtttcaattctttgactgctccagatattctaagaaaaactgaagaaactgagcctaataatttttattttatttttatgagatcacttttttaatttacaaagcctttttcgattgggaatacaaatttctgagtacctaaaaactcactatttaggtcaccttctttgaatcctaaaagtaaacatactgcgacttggcaccccatgtaaatcgcctcgttcaaggtttatttactcaccaatatcagcagttcgttcggtagttgtaaccatgaattacagagctgttgctttatggccatgttgttgatgtggctggcgatgttgaagctgcggttgttcctggcaaccggtggccactgccgctgatgatggccgtgttttggaccaaaagcgatccctttgtcgatggtgatgcggtcgctttagtggattcctgtgcgtctagtgggccccgccacacgcaggttgtctccatgcagaccaactgcgttccggggtgacagtgtcagtgtatgtgcccctaatagtcgaatcgtggagtgctttgtcggtgcttgtttacacgacccgcggttcacatgccaaacaagtgcgatagcaacattttgatggtagttatttgcgagtcccgcaggatattgcacataagctgcacgaaatagctgcaacaaaagtacacaaaacagttgttatcagtcacacggcgtatacgcaatgtctcgttcaataagtcaacacttgatgccagttggcagtgtgagcttagaaagttatcaagagcaatttcaaactgtcaattgctttatgtgcttggagattaaaatcgtcagatggttgaaatcggtagaaggactttagattatgataagtctacatgccacttaggtgggaatccataagtccagtgacaaaagccatcagaatttactgattggctggcaggaaacttttgtaagccactgtgcagcagccgtaaaactttacaggccctgcattctattgaaaagttatgcggaaaataaataaacaagtaagttgttcaacaaaaactgacaagtaacttaattttgattgactgagccggtaaaacttctgcctgctgaatgcagtttctcctttgttaatccttaaagccttttccgctgccttgccccgtaattaattccgccagttcggtggaatttcttccacttttggacttttcactggaatatattcagtttctcccatttcacacgctgtcaacttgacaagggaatttccagatgctcttttccttggtcccgaaaattaaatgtcaaactgcgttgcggcaactgtgaaaagatgagaaattgcattttcacaggtaatttgcatttgctgcccatcttacgcttttccattccgaatttccccacccacgcagacacaaaagacacgagaccggagcgtaaaagtaacaaaaaacaaggacaaaatcgataggtaatcaatgtttaataacttgagcgtgttccttgaccatggtgactgaaccaaaccgaaccgaaccaaaccaaaccaatgcgaaccaaaccgaatccgagtcgaattgaaaggaacggctgacggcattgtaaacattgaataagtcatgggtcgctcctagtgcctttgcgcatatttaatgggcatattttaacgagaacacgttcccgaaatactcccagtcatgccggtcaagcagttatatctggatatagtgccgaatgtgtcatttaaattttcgacgcgttttttgggccgtgaaggtcaaatcattgttaggactaggacatcgcgagaagtccgctaataaccataatttgttcttaatgacattcagcattcgtcgtttttttgaggcctggccaatttaagctggccacacccaggacatattaataaatatatattcatattggccttacggccgaccgacacgacatcatcgattcgttttaaaacctctctctttgccgtcacattaaatggcgaaaatgaatgcaaatttaaatgtgctgatctcatttatggtcgcttatgctagtgttcgctaaattaaattaacccaccgggctttggctggaaatgtgcaccacactcgcaaatggctatgtgccatgtcatgtgcaggctcctttgtgtccttaatcggaaaacgagtgacttccaacgaaactgtgcgttgcatacacaattcagtggcctggtaaactaattagtcgactgacgaaaatgtcggaaaaaatggcttaccagcaaatagacatgaaagggttaatttagtgcttatagagcgaaatggatttgtgtgcggagcataaataaaggggattccctgaagtaaaggtggaaaataaatcccattagcctgggtaaacaccagccaaaccaagcataaataaatcacctaaagacttattaaagacgaatttaatatggccagaccttagaattaaccagtaataatggtaatgattgtctagctcgataacgatgccctagatggtagccaggaaaaggcaaataaagcacaaagcaaagcaaaaaccaccatttacatacgtcatctagttgagttgaccaagtttgttgtgttgccaagtgcgacaaggcgaaatcactcgagtgcaaagagattgagattcagggccacttaagtgtcattacatttgccttcgcctcgcgtttcctttttgtcaaaagtcatttgtttgtttgttttcctcactttggctatttattgtactgctgctaaggtgaaagtggaaatacaacaaccgaaacctggaatgggattttctttatgccagcgacatgtttactttatgctaagtttgttcttgttaaataggattattccaaacacagcgggagtatttacttacacatttatttttggcggccaaagtcaatgaataacatcagcgcagtaaagacattttcaggtgtaataaaaaagaatattacttcttaacttgtattaacaaacgattgggttaatttgaaaaatatcgctgaagaatgcgctatcatcccaaatacatttaagaagtattttcaaagtgaacgagaattgaaaaataatataaagcatttacaatccaattttagtttcttctgggttattgtttcgagaaaatatttaaaagatttcagtagcacgtttttgtttgagtagttaatggcgttcctgctcattgccgtcctaaatgtacacaaacccacccacacccatgaaagctcgtctaacaaaaggttttatgtgccatgcacaacgaaatataaaaatttagactaagccaaaccctgcttttcccactttccatgtgcagacccaatcctcatccacaaacccatctacattctacaatcccatacccattccccaactagcatgtcagccgttgtcttgtcttgcctttacatacaaaatttactgtgaaaatgctttgggcactttggttctctgtttgcacacactctcgctggaatcgtcctagtccgccaccaggaccttccacacacatatgtacatacatgtgtgtgcatgcaactttcctttcaagcctggctgtctatgtcgcattatgttcgtcggtcggttctgcacatttgtattttagtttcgcgcagctttgcgttttttatgagcgaaataatttgtgtttctgttttatgctgtcataaaagaacggccctgttgcagtaaaaaagggctggaaactgtgtgcgaatggatctaaggcccgaatctatccacatttcgccacgcatgatcaattaactaatgaatgccagtgagctgaatgcatgaacagctgcaggaattcattgagtggtggcatgaacgctcgacttttgtcaacacgcacgtaattgcacacacaaaagcacacaaaatgctgccccaaaggcaagctgcaaattagattaattacacagccaccacacacacccaggaaatcaaatcggttttcaatagcattcagttcgattcaacttggcggggtcagagctcagagctcagagctgagaaatcgagcggtgttcaatcggatgagagactatttcatctgccatttgacatcgaacaaatatatattgctgtctgccaaactatgagttgttgccaattcggactgccaatcaacatgacaaaacaattgaaatcaaatccataaattgctttgtcagcacagaacgcagaatataaaaatgagttttattttgcattcgattgcattcgattgcgatgcaatcgcgaatgcgactttatctacgatatggttcgagagttgctgggcgttggaatcccaaacatggctcgtgtctggcactttgcatgattctcgaatggaattgggcccattcagagtcgtggaggtgtgcaattaattcaaaagtgtctggcaaagaaagttgcagtcattaattagctttttaaaataaacccatagactctcgctttttagttcatttggcacgtttcggtcgaaaaggagaacaaaaaagaaaatggcaactagaagagcccaaggacctggagtaaagctcatttccgttttatatttaaacactcgagggctaaaatgtttgctctactatttccacgcagtgcaaaatcagcataaaaggcagggaatgaaaaaataaatagccctggccccagagagtgccctcttcggtcgatggaccatggaactcggaggtgggaaacgcttagcaagtggatttttaaattagtttgtcgactcgacgacgacgacgaggcatcctacttctgcagataaaagccaagtcggtgacttcaggcttgccaagttggatggaaggtccttttttcgtaaatggacttggcgcgctttcggcgtcgactccttcttgcttatttaaatgaattaggtgatttttcaagagctaagctcgccacgagcagtgaactcatttccggccagtggctattggcccttcatgcttcatttggcccccactttgtggctgcattgcaatgagttgttaatttgcaggccactgcgtgccaatcaaaacttttactagatctgaccctgggaattcttattgctacccacctaagcaacaataatcgtcttaggaaaagccaaaaaaacactcttcgagcgcgatgcattgaaaaagtgctccctgagtgttaagtacattaaacagatacgtactctgcatgtataaggctcaatttttggcagaatcagggtcgacatgccgcatacgcaatatcgtgcgtttgccgcagttttcttgtcgcccgtctgttcctacatgtgccccattacgcatacgacgcgtgagccaggcggcaggtagtgaggtgagaaattcgcaataaagctgcaaagtggcacgaagaagcacacgcttaaataagtgcgagtcgaggattgaaagtgaaagggtacctcctgcacatttcgcctcgttttattgccgggttattgttatttaatgccaagtttaatgccaacacacacacacacacagaaagtggaagcaagcacctaaaacaatctcatgcccgccccattaatatatttcaactggtttggtttgttttatattattttgttttgctttacttccaagtacgtgtgggcttcccctgcatttcgggccgagtggcaagtcatttgcttcgctggttgcacaattctatgttgacgctcttttgtgttcgacttggccaaagaatctcaggtttcggtggcttatgcacgtagcttgccattgttgtgcccgctggacaaggaagcaatttgaatgcctttacagagcgctgcacaaagcacagaattatgtttacgtccagctcggctgccacttggggcagagctctcacttcaaatttcccagttcccagttcgcactgcttcctgtttccagctccctgtgcttggccaggcgtgaagatttccatagctggacacacgggcactgttttagaagtgctttcaataccatggtcaaaatgggaatgtccatagagtttttagcgtaccatttttcgaaacaaatgaataaatgattttttagttatcaatggagcttttaataataatacttttatgagaaattccattataaaataatattttcgttttacttaattaataatttattttagacataaaatatactgctttaatgcaacgtacttttctatttatctgcaacatggcccaagaatttgttttaagtgtactctgatagtaaaatggaacaagatggtgagctaatgcgttttatctgctcaaaaggacgtagctctataaagtaatgagagactcacgatgaaatgcatacaacaataaaaatgttgtattttaaagtatctttatttcaaaacgcttatacttaggcttactatcagttaaagcgacgggtttgggaaagctggctaattaatgcctccgagtcgtgactttagccgcatatagggatgtctgagtggcattaaataaaagtcgggctgactggaatttcacacttaaagttgaaataaatggggatccatttgaaaacctaatttattactacatttcccagccgttcggctggcaacccatccttccgtcggccagtctgtccgtgttattgggccgggctgtccattgtgaccctgtcaaaacaacttccattgtttgcccccatttcacctgtcaactggcctttgtgtctgctaagcttcacacttggtgggggaaaactcggaagatgggcgaaggaactcttgccgagtggtagatgggtcgcactttggtttccattgtcaacaagccagccaatttagttaattaggctaccgaaagtgaataaacaaaatctgtaaccaaaggcggtcaacagccacgtgctaagccctgtgcaaaaaaaaaaataaaaataaaaacaaaataaaaaagcgaaataaaataaaaccgcaaaaatgcacaaaacacttgacgaattttttcgttttgcttcgtaatttgtatgccgcgcgccttttccccccaaactaattgcgtcgtcgccttcggagatgttgatatgggtttgtaattaactgagactatggatttatggccagtactgtttggcactaatacccattctcattgcccaaacattgctttggggtttctgctggtaccgattcattatttgggtgcaaatatctcgaatacaacttgtagatcccctgatcagcaaacaaaatgaacatatgcaagcataagaaatgcattaatataatgagttgcgctgttataataaatcaattttaacgccttaaagcttctaatctattaatagagtttttttgtccactactaagtaagtattattttataaaataggagaagctactggtatagtaaaaagtctatgactgaatatatatttgaacaggttaatgatagttttattaccaaatggttttaaaatataattttgtattgcctcaaatattgtagttgaaataaatgattttcagagatttgaattaaatattcaaacttacaatatctacaattagttgaacttcgaaaagtgtcataaactcgagcagactcacctgcataaatcatcgcgatgtcgatggcggttgtgatctgagttttctgggcgagattagcgagagcccgtcaccgaatcgcttggaaaatcggtcaagtttttgtttgttgctggttttccgatgcacttgctggcgttaaccggctcaccagatagctatatattttcaaaagctattgctatatcgacttgttgccccgggtctcgtgtgctctcgctctctttggccaattaattggttgtcatgcgttgaataattgcacgcattttgcctaaaatctccatactcagcatttggttttcgatattcactactcagttttgcagtgcttaagttttaagtgtttagttttcagtgcttggtggtttgttgatcttttcgattgggcgtgactaggccgggttttgtgaaattaatagtttgtttgcgctagaatttgattgaaatatgttttatttgttaattgcatggattggcaacggcaacattgcactggcaatttatggcaaaccaattatttgctgtcattactcaagcagagcagacacaaaggcgaaggaaatgcagttctgatctgctgactgacatcatctataaacagaaatatttatttttgcatatatgctaatgtcacagcgggacaattatgaaaattgcactttgtcaatgctatgtttgtttcggcgacagcaaggaaaattgtttgctaatgagcgaaattacgaaatggaacgaaagcgagcgatttgattaggcgaaactagcacggcgctgaagaaaaccccattaaatcacataagacacattcacactcgtctcacactcgcgaattcattatgaatgcactcactcgctcgtcgcgcttattgcgaattttaatatttcggttttttggccaaaaggcacgtagctgcctcgagctttagttttggttatcaatcagctgtaattataacttcaatatatggctaacatccttttgcttcgatcgaggactcaacaggaactgagttcgcaaaatggtgcaaaacagctgttgttcgcgatcacgagcactcggactcgcactcggcgcttcggcaactcacacacacgcacaagggcacacacccacacagcgcacccttacactaacacccacgcaacactgttagctaccgttatgtgccgtcggcaagaaccgttagttctggccagttttctccgctcgttcgaattggcacgaccgacgcggcagaattttcaacacgaactgaattttcagcgcgaactgtgcgttcgaaattgttcgttccggaacgaatggaaagatggaaacgttggagattggaacattaaaacttgaaacagcaggaagagaaacagcgctcggtagaaaagcagaatttgttgaacagcgcgcaacagtcgcttggaaataaaatcgcatgcgatatttgctgtaagagccaagacgtctgattaattataatcccttgattctcctaatctgcattcgcctgcagccagtttgaaattccctttgatttgcgacgctttctggcttgttaacctttcggccagacaaacagccagttggccatggcaaataaaagaagccacgcataataaattggtaaattcggagcagtcaaaaggatggctggactgctagaaaaaaaggacacacacttgccccttttttgatgggcatccgctcagccttattctgattgtaccatccgctgatatttctagcaatttcattttacgacaaagttggtcgacttcaatttgcccaattttccattagagctgcgaggtattttttgtattttttttttacgatttttcgccaagtatttggcttacaatcccgccatgaccaatactctattcaaaactcattatgaagctccattgaaatcttgaaagctgagtaagtggcgggcacttgccatgaaagagctgttgcggtcattattcacttgatttctgaccgtttaatcgactcacattccaacttttatcttactgaccttttggccccgtttagtctagcccagtaataatgataaatgaaaagagaacgcctcgggctcatccccaaaactcctgccaacctccactggcatgtgtgtgtttgtatcgtctctaattaggataaacagatgttgcccaaaaattaattacacatcacgagcactgaacagccgcctagtttcctttcccaactgctca

SEQ ID NO: 39683 - DNA, 928 bp, DROSOPHILA
ccaattcgaacgagcggagaaaactggccagaactaacggttcttgccgacggcacataacgcgcaaacaaactattaatttcacaaaacccggcctagtcacgcccaatcgaaaagatcaacaaaccaccaagcactgaaaactaaacacttaaaacttaagcactgcaaaactgagtagtgaatatcgaaaaccaaatgctgagtatggagattttaggcaaaatgcgtgcaattattcaacgcatgacaaccaattaattggccaaagagagcgagagcacacgagacccggggcaacaagtcgatatagcaatagcttttgaaaatatatagctatctggtgagccggttaacgccagcaagtgcatcggaaaaccagcaacaaacaaaaacttgaccgattttccaagcgattcggtgacgggctctcgctaatctcgcccagaaaactcagatcacaaccgccatcgacatcgcgatgatttatgcagctatttcgtgcagcttatgtgcaatatcctgcgggactcgcaaataactaccatcaaaatgttgctatcgcacttgtttggcatgtgaaccgcgggtcgtgtaaacaagcaccgacaaagcactccacgattcgactattaggggcacatacactgacactgtcaccccggaacgcagttggtctgcatggagacaacctgcgtgtggcggggcccactagacgcacaggaatccactaaagcgaccgcatcaccatcgacaaagggatcgcttttggtccaaaacacggccatcatcagcggcagtggccaccggttgccaggaacaaccgcagcttcaacatcgccagccacatcaacaacatggccataaagcaacagctctgtaattcatggttacaactaccgaacgaactgctgatattggtgagtaa

SEQ ID NO: 39684 - protein, 61 aa, DROSOPHILA
METTCVWRGPLDAQESTKATASPSTKGSLLVQNTAIISGSGHRLPGTTAASTSPATSTTWP

SEQ ID NO: 39685 - DNA, 3273 bp, DROSOPHILA
ccgtcggcttttgccacacgaatcgtatcctgcatcgcgatctcaagccccagaaccttctcgtagacacggcgggcaaaataaaggtgagactaaaggttttacccgctgttggttctgtgataataacgaattccaactccagttggctgactttggcctagcaagggccttcaacgtgcctatgcgggcgtacacacacgaagtcgtcaccctctggtaccgagctccagagattctgttgggcacgaaattctactccacgggcgtggacatctggagtctaggctgcattttctctgaaatggtagtgttatatggaatgtacattccaagcggatctgattactaaacctagaattacagattatgcgccgctccttgtttcctggagacagcgagatcgatcaactttataggattttccgtaccttaagcacacctgatgaaacaaattggcctggtgtgacgcagctgccagactttaagaccaagttccctagatgggagggaactaacatgccacaacccataaccgaacacgaggcgcacgaactcataatggtgagtgcagaaaatgtacatccccaatggaaatccactactctgtaccttacagtcaatgctgtgctatgatcccaacctgcgcatctcagccaaggacgcactgcagcacgcttacttccgcaatgtgcagcatgttgaccatgtagccctgcctgtagatcccaatgccggcagcgcttcgcgtctaacgcggctcgtctgatcgtgtccaatagccccagatctagcaaattacttgtgttttctagtatagtaagttcgatgtctatctcactatctttaaggcgaaactagtaaaattatttgaatatctaatctattttacagctgccacctcattatcatgcattccccatcctaactcgcacgtaacatacgataaatacacgatcatccataagtaaagagtttatagtttatagcttagcatggattaccaggagctcagccgggcaaggtgtcgttgatgatggcgtggcgaaactttggcggcggaatcgttagcccctgctgcatcgctagcgagtctctggcgctggcgggtgtggctatcgtcgcgcatatacgtgccaagagtattgcgcatgctctcggagagcggtgaatgggcttcgacatcaccatcgtcgtcatcgctagtcggtgcatcgctcggtgcgctgctgtctgtttcctctgctgcatcttcattctcaatgggatgctccggtttgctgacttctaatagcttcgtcaatgattggcccttggccgacaataggggcagtggtcgaagtagggtcacctttctggttccgagtcttctcattacgggcgcctcttcctcatgctcgccttccacatcctctgcctccctaggcggcggaataaaaagctgccgtaaaaattagattggaaatcctgaggactgaagcgctgtactccgtagtagctaccggaattggtgtcgtagaagaacatcggctcggcggaccgcggcggagaaggtggcacaaagtagggatcgtaagggctgtaggcatcatcgttctccgccgagtcgtagctcggtcggcgcttttgttgcttgcggcgctttcgcttgcgttttttggtagcctgtgaggccacttgagctggttcctcaagctgcagctcctgatcttcatcgtaggactgcagataaaccggcgacgtctcgatgatgttcgtactgccatcgttaaagaagttggccaacggattggtcaggttacggaaactgaaagcgggctgaacactgcggacgaagctattccaaacacgaaccaacgggcgttcagttgttgtaggagctgcttttcccagactatgaatatagcgccttctgtatccaccacgagcactcggcaacaggacatactcgatgggatagtttctggagctagaataaaaatttcgttcaaagtttaactttaaaatgtcatagttatacttttttcaactcaaatataattgttttataaaaaaatgtatcctatataagcatatagttgtttgaattgtttatgtgatatctataatatgcaataataatctactatgaattattggattaaataaggttcagaaaataccaaaaagtggttatataaatgtcatatctgtcgaaaatcaaaacttcattgttagtcgtcaacgtttgctcacccaatctttgcctgcttttgcggcaagcgtcgctccatctcgtttgcggatatccttactccttgcgaaggacaactccatgctacaaaaagcactagggcagtaaacaattgccactgcattgctgtatacaatatgttcgtcgggcttactatatagtatttcgaatgcgtccgttaccgttcccggtcgaagggaaactgaaactcatccgaatcgcgaaatcagtggtcaacagctcgacggtgatgcctttgtctttttgaccagctcgttggattagtttttattggttcacagaacggttagccacagtcttagccaaattgatttgtaatggcattgtcccgagccccagatcatttccaaagctatggccatgttggtggccctaactcatgccgacactaagccaactaacccaatttggagaccatcttcatatctcccgcggggctcgttggcagctgccaatctcgcccatgcatatgtaaatggatttttatagattacacaattaatacgccattcagttcttggctgcgactgaaaaactcgtttgctggcgggttctgatttcgaaattttatgctaagctgtctgggatgagtcgtcggcttgcgaaatgctttctcctgacgaatttatgcttatggggtcttctccttatcaagattttacgatctatataaacatatgggtgtattaatggatgcaccgtctaggcagctcctattttttatggcataactatgctgattgtggtggcagccctaaatagacacattagatagatttgacaaatttgtcaaattttattactgatgaaattggagcatggagatatgatatgttttcgtcaaagggaaatcatgtgaaagaaatatcacactttctaaagatgttgcttgaaataaaaaattgtgttaagctccttaaaataataaattaaagttttaccttttgcacagattgctcaatcaagagacaccaaaacaaaaagtttttagtagtaatcccttaaatcaattctgaatt

SEQ ID NO: 39686 - DNA, 903 bp, DROSOPHILA
atggagcgacgcttgccgcaaaagcaggcaaagattggctccagaaactatcccatcgagtatgtcctgttgccgagtgctcgtggtggatacagaaggcgctatattcatagtctgggaaaagcagctcctacaacaactgaacgcccgttggttcgtgtttggaatagcttcgtccgcagtgttcagcccgctttcagtttccgtaacctgaccaatccgttggccaacttctttaacgatggcagtacgaacatcatcgagacgtcgccggtttatctgcagtcctacgatgaagatcaggagctgcagcttgaggaaccagctcaagtggcctcacaggctaccaaaaaacgcaagcgaaagcgccgcaagcaacaaaagcgccgaccgagctacgactcggcggagaacgatgatgcctacagcccttacgatccctactttgtgccaccttctccgccgcggtccgccgagccgatggaggcagaggatgtggaaggcgagcatgaggaagaggcgcccgtaatgagaagactcggaaccagaaaggtgaccctacttcgaccactgcccctattgtcggccaagggccaatcattgacgaagctattagaagtcagcaaaccggagcatcccattgagaatgaagatgcagcagaggaaacagacagcagcgcaccgagcgatgcaccgactagcgatgacgacgatggtgatgtcgaagcccattcaccgctctccgagagcatgcgcaatactcttggcacgtatatgcgcgacgatagccacacccgccagcgccagagactcgctagcgatgcagcaggggctaacgattccgccgccaaagtttcgccacgccatcatcaacgacaccttgcccggctgagctcctggtaa

SEQ ID NO: 39687 - protein, 300 aa, DROSOPHILA
MERRLPQKQAKIGSRNYPIEYVLLPSARGGYRRRYIHSLGKAAPTTTERPLVRVWNSFVRSVQPAFSFRNLTNPLANFFNDGSTNIIETSPVYLQSYDEDQELQLEEPAQVASQATKKRKRKRRKQQKRRPSYDSAENDDAYSPYDPYFVPPSPPRSAEPMEAEDVEGEHEEEAPVMRRLGTRKVTLLRPLPLLSAKGQSLTKLLEVSKPEHPIENEDAAEETDSSAPSDAPTSDDDDGDVEAHSPLSESMRNTLGTYMRDDSHTRQRQRLASDAAGANDSAAKVSPRHHQRHLARLSSW

SEQ ID NO: 39688 - DNA, 2891 bp, DROSOPHILA
acacaccaacgagcgcaccgggcagccacaatgcggcgcaccacttcggaggcggcgactccagcgacacccagacggagcagcagcaagccaacgggcacggcgaggagtccgagcttcgcttccgaaagttgcaggcctgcaaggagtcatgctgctccgaactggcccggaaggtgggaaaacttatgaatcattcactcaattttaatgctatgcgatcgatgtctttacagatgtacttcggagtgtgcgtgaccatcctgatgaccgcgtcgtgggtgggggccacccactgcattaagtacatgtacaagtaccgtgctccgtacgacgacttgctgaacgacgaccaggacacgtcctcgagccgcgcggacctgagcacggagctggaggatatactggccatcagcgactcgtcgctgcaccacgtcgaggacgccaccgagatgttcaacataccaccgcgccagccggtctacttcagcgcccccttcttcgccgcctggttcttcaccaacttctcgctgctcttcttccccatctacctgctgggtctggtctccacccgcaagtgcgagaagctgagcgacatccttggcgacgtgctgcgaggattccgggagcgcggcttcacagtgggtgagttggatttagtcgtgcgacacctatgaaaactttcttttgactggctcttggtccgcaggtcgcttcctcaatcgctgcctctgcttctgcattttgtggctggtcaccacctacctgtacaccctgtccctgcacgtcctctacgccacggatgccctggccctgttcgccaccaacgtggcatgcgtgtacctgctatcctgggtgatcctgcacgagcagttcgtgggcgttagagtgagtgctttatatctgcatatttgaaatttaaaagttataattttaaagtcgtgtaattttaattaattactgcattatacaaagataaaatccttcacaaacatcaaaacatggttaaaactgtatattaattaatttaaaaacaaaacaaaaacaacaaaatttaaacaaagctccaaaacaatataacatgaatatctaataacaatttgatgaacataaaaaatcaacgatctgtaggtgtagcaattcatctcttcattttatgtgccttcgcttggagctccttttcgttctgaacgatcttgactatttccgaaattactacactgtccagcattttcattggcttgccattctccaatacggccacctccaggcgcatctggctcatctgggttacttcgagaagggcacgcatggctagtttgatggcatcacatttggttgtcacttcatgatcgctataggccttctcaaaaaactccctcacagtatttgcccaacgcccagtggcggtcgccttgtactcgtggaatatcccggatggttcggtatgaaagagacgtgcagagccatcggcgtcaatgcctcctattagacacgatataccgaaaggacgacgtccattgcactgcgtgtacttctgcttgagctgggcaaggtatctggtgatgtactcgagggtcacctggttttcgaagttgagtcgatggctctggcactcgacctgccctcgatttataaggatccgtgcatcggccgtgagaccggcaaatgccaacgccacgtggcgatcgagcatgctgatcttgcgcaccgtccgatcctcctgcatctcggacaccgagctcttctccacacccagcaccacacaattggctccacgaacgccgaccgctgtggagccctttcgaacagcttcctgggcgtactccacctgcaacaggtggccatccggcgagaatatggttagagctcgaccgtagcgtgaggacatcctttgggttagttagcaggcaaaacaaaacaacaatttgcttgtgacaagttatttacttgaaacaatatgaatttttcttacatttgaagtttgaagtcaaaatcctttattttctacaccatagtgtaatgattatgataataatatgttattacaattctttgtaaatcaataatttcttttgagttatttacaaaactccccatatcactcccctattttgcagatcgtggccattatactttgcgacacaggaatagcgttgctagcctatatggatggaattacggaaagccgaaccctgagcggcgtggtcttggccacattggctggagctggctatgccgtgtttagggtgagtaatccgccgttcgcccacatgggatgtcctgctttcccgcttcgtgtgcggccatgtcgtgctcatgttggcctgtcgcttcacaggttatgttccgcaaggtgatgggcgatccgccggtgagccaaatcgccttcatattcaccgccctcggcttcctcaacgccctgctgctgtggcccgtagtgctgggactctacctgactggcacggaaagcctcacctcggagagcataccctggaacctgctgttcgcggcgagcctcctgctcctcggtaggactccttttccaccccccgcttcttctgcatttgttgtgccgtaaacttttatcgccgtaattaattttgattgcagttttccacgttctgatgcagttcagtgccgccgttacgtacaacatgtttgtgacattgggtctgattacggctgtgcccgtttctggcggtatgtacacggacgagctcctcagcatgttttccaagagttgggtggatacagggtggtcgaggtctggggttagcctctattcgcttgaaggattccgtgactatgagttgttttaaattgtaatattcaaacggggcactcacatgggtcacgtaacaacatttgatctttgtagtgggcacatt

SEQ ID NO: 39689 - DNA, 891 bp, DROSOPHILA
atgtcctcacgctacggtcgagctctaaccatattctcgccggatggccacctgttgcaggtggagtacgcccaggaagctgttcgaaagggctccacagcggtcggcgttcgtggagccaattgtgtggtgctgggtgtggagaagagctcggtgtccgagatgcaggaggatcggacggtgcgcaagatcagcatgctcgatcgccacgtggcgttggcatttgccggtctcacggccgatgcacggatccttataaatcgagggcaggtcgagtgccagagccatcgactcaacttcgaaaaccaggtgaccctcgagtacatcaccagataccttgcccagctcaagcagaagtacacgcagtgcaatggacgtcgtcctttcggtatatcgtgtctaataggaggcattgacgccgatggctctgcacgtctctttcataccgaaccatccgggatattccacgagtacaaggcgaccgccactgggcgttgggcaaatactgtgagggagttttttgagaaggcctatagcgatcatgaagtgacaaccaaatgtgatgccatcaaactagccatgcgtgcccttctcgaagtaacccagatgagccagatgcgcctggaggtggccgtattggagaatggcaagccaatgaaaatgctggacagtgtagtaatttcggaaatagtcaagatcgttcagaacgaaaaggagctccaagcgaaggcacataaaatgaagagatgaattgctacacctacagatcgttgattttttatgttcatcaaattgttattagatattcatgttatattgttttggagctttgtttaaattttgttgtttttgttttgtttttaaattaattaatatacagttttaaccatg

SEQ ID NO: 39690 - protein, 249 aa, DROSOPHILA
MSSRYGRALTIFSPDGHLLQVEYAQEAVRKGSTAVGVRGANCVVLGVEKSSVSEMQEDRTVRKISMLDRHVALAFAGLTADARILINRGQVECQSHRLNFENQVTLEYITRYLAQLKQKYTQCNGRRPFGISCLIGGIDADGSARLFHTEPSGIFHEYKATATGRWANTVREFFEKAYSDHEVTTKCDAIKLAMRALLEVTQMSQMRLEVAVLENGKPMKMLDSVVISEIVKIVQNEKELQAKAHKMKR

SEQ ID NO: 39691 - DNA, 7237 bp, DROSOPHILA
ttttaaacagactgcgtacgtattaaaaatttttaaaattaatttgtgtaaaatgttttaagttttgaaaaattggcaaataaagaaaacaataaaaattaataaatcaaaaacacgattgtattgtaaattgaaatatacacaccaccatttcgacctattccaaattattcctattccacaccttttcagcaaactgaatcgtttcatgtatatttcaagaatcggcttaatcaagcgcacctgtttataaagaaagatgaaggacagtggcagtggatgcaaggatctaatacctttggaatgtttccaagattgtttcttcttgatacacaaaatagggaaaacaaagcactcgatttgatttgcattaagacaatatctgtctgtttcaggcatacttgcacacacgttaggattaactttcgtagaccatttatgttttactttaaatttatagtttgtgtgtgttttcttgctcttttaattacatatacctatacaattatacttgattgatttgattttaaacccccttttataaacaaccaattgatatacaacatcacaaaacatttgcatacacataccacacgtatgaaagggattcataaaccgtgaacgtaacgtcgccaattattacgagataaaaacaaatggaaattaaataataaaaataaacaatcagagttcatcgtagaggaaggccgaatgtgagaaaaatgggagaacaacttttacgtcttaataaacaattattgttaacgaagaaaataaatgaaatgaagcatattgtactaaaatatttgatatacatacatttgttattatttgtaatacgaaaattaaataaaattgcatccagataataaaatgaaataaataaagaatgcaaacatcgtcgtctgctcaattctagactactaaacaaataaaacgccatgactctgcgtcaacgtcactgatttatttgaaattcttattagtcgtattacgctatttaaaagcatttgctgcgggaggaggacttgctccgacgactcccatcgctgggccttgtgctcacgctaacggcggtgatgcccatgtcatcgcccaagacggtttcatctacgctggtgtcgtccgcaggtaattcatcgtcgctgttttcctcgccggcgaaggaactcctgggtgttatgatagaatctccgtggagatccctgttgatcatatttcccatgtggaaagcagaatgacagttgttggcagccaacagggctttgactcggaagaccagcgtctcaatcgtttcccgcaggctgggaatatagctgattatagccgtattcttaatggacttggaatgacagcagagttggtgcagaaagcgtgtcaccttctggagctcgtgcaaaaaccttgttagcctttcgggatcttcccgaacaatagattccagcgcagacattccgtgctgaagcagcaatttaaggaatagcagggagtgttttagaaacagcccaaagtttctgggctgttccacctgctgcacaatgctgagcaagccattcaacaaatcgactgctgactcccataacttcaatttatcaccacggctgtcgacgctaacttgaccacttagggagtgaataagcacctcgcacagtccacgaaagagtagtgggaagttggccctatgaggggaaagaattaataaaacatacaaaatacggatcaactgattttcttactttttaaagttggggaaggatgtcagtgctttgtccttcgtattcagtatgctgcattgtttaaccagctcagtaagtagttcggtttgactcttggcattcgattttttcaggaatcccttaaccagctcgtccaaataaatattgcactgaccacctttgtccaaggtgccagagtagtggaaccatttacggcgcagcagcgtgccacacagtatccctgcatgagtaataaattctaaaattgcacttcatatttcatggttagtgcttacgtaagtcctcggcttgctgaaatctcggttggctagcatcgctctgtaaactgcccagctttaacaagttacacaacaatcgatgaagatgtactgcagtactaagattcaggacggatttctcatactttagaaagtattgaaaagttaggttggccagctgaggaacactttgcttctctagtctcttccattgtgttttaggctgtagcttaagcaaagactctgcaaaaatagtaacgttacattttaaggtttgcgtaaaatttaaaacaccttactatggagcagttgttcctgcgacttatcactccactcgctccaggcgaagtacaaggcaaacagccggacgcacagcccaaagcacgatttgatatagcaaaattgatccttaaacagatccagattgctgtacacatgactgacttccgtaagctgattgtcaatggcctcgcccagggttattaggtgattattcacctcgtgtaggcatggaagtagatcgcaaataaaatcctccggtttggccagatgcggcctaaagctgtccgcatcataagaatcgtgatgtcgaaggactgctgcttcaagtttttgaaccacgtcttccagcaggaatcgtagctccagaagaccaagaaactcccccatttgctcctcttccagctggtggttcaggacaaacttctgctcgaccaagagcatgatgatttccacttccattggcctgtatctctcccgcggcccatacatctgctcaaagtcagtcttcgtcttaacggtcttgcactggccaaccttaatggtgaagtcagcgatcgatggttgattaccagttaaatcgggttctggtagagttgcgtttagtttggcagctggcttaggccctggacgtttctgattctggttcgagagcttgacgttggtgaggaattgatatggcggtgccacgaagtcgacgggcgctctcgccaggaggggcttcattctctgctcgatacgaattagttctccaagtctagatagaactcgacgccgtgtgggaggatcacgttgtgatgcaaacgcactgatcgacaccctcatccaattgacggtgtgaaagtaaatgctcaaaatgtctttttgctgctccgcctcaaagttttcaaaaacggacacatagttgtcatcctcaaagaatgagggcaacacaatggcacagcctagtaaagcattgatgctctccaagctgtcttggtggcggtgcttgtacagcactctgacatagttgaacagaggagccagcacgtatatagaatcacaagctctgtaaatgggtacgttaaaatacaaaagctttatgaaactcatgagataagaaactcacttcactttgggtgataaaactagttttgagatatttatgccaatattaaggacatccgattcagtgtttgcatctgtatcgtccaattcattgatatttaactgatattccagtttaattccccttaaaagcaaatttgattagcgacatacttgtttaaaaaagtcagtacatactttaaagtctcgggcacattctcggtgacaaagcttgcctggaagcggaatgtcactaagtcgcaggcccaagcaatgaattggttgtccaactcacagccggaggttccttcattgcgctgattgaaaaccgtggccagttcttcaaaaaacagggctaaggactcggtactatttcctattgatgcctcggtgcgtactgcatggaaaaaatattaatatacacgtttaagtatgtcaggcacttaattactgattaagttggcagccattttgcctcggccatcgggcaaggaatcgacgttttccacgctggcaataaactcgtcacgatcaacaccattgttcgcgatgcgtgccattgcatcgatgagttgcacacagccaataattccctgctttttaatattatcaatggagttgatcagctgctttttaaccaccatatcgacttgctcttggagttgcaggcagggcgatagatttggatccggaaatgcgacatggcacagaaggtccatagcaacgcgggtttgtgtaagacttagatcacttatcctatccagcatgggtataagtagagttgcacaattctgaacatccttggcactctttcgttgcagctcgcgaagcaattccagtgccattgttgtcaggtggggcgatgatttgtcacaggtaagctccaacagcttctttagaatatttttctggatcgagttaaaaatcttaaaaagtatactgcaaaaaaaaaaaacaaagtagaaattaatatgatttttctttagggttctttaggtaaccacacctgtacgaagatttggcgaaatcggacacgatgcgatttttctctcgcataaagtcgtgaaggatgttcatcagtgtggttatgtgctgctccaggatgtgtctatagtgctgtcgtatctcttccaaaatgctcactgtaatatgctccagtttaatgcgtcgtcgaagctgacgaattagtaaaatgtaatgaatttatttttttttttattttttaaggaatacttacaatattttcgatgtacaatgaattatcttcattaacatgtatcaacaaaagcagaagtatcatgtcaaaggagctgcaaatatgtaattatttaaacttgaattcgtataggccagtctatgtactcacgtaaattcggcagctggcacactagcagatgacctttggcacgcttgataaaacttcttcgatcgtatcaagcctagttctaggaagccaaaaagttccagctgagacttcttactgtcttcgcttgccgagattttttccgtctcatttgtgtgacgccagttgaagattccacgcaggctgcctatcaactgcaaatgaacgaactgaaaccgaatgcttagggaacggagtaagaaccttacgtcgcgcacgctgtcatctgtatcaattttcagaacgttaagcagcagcctgatgagatgcggcaagatctaagataacaaaacatttaaatagaattctagaatcggtctaattttcaaattaccgcatccgaacattgaccacttgtggcgaagtccaaaatgcgcactcgtaacttggcctgcgttctgtctgaaagcgataagttacccagagtttgcactgtggtcatgtgaaagaggtcttcagtgctggaatagttgatgctgccacgaaattaaattatacgattagtaagaaagaacgtagatagtccatagagcgagcgagtacacaaattcttctgctctgctttaaataattttacttacttaagcagctcgacgaactcatcgtgcatactggcatcgagtatcaactcagcattggctatgatgtccaatttggccgattccgtagccctgttgaaaatgacctcgatgcgactgtagatctctactttgtgcgaggcggtcaagtagcgcagttgcgtcagcatcagcggtagcagtggcaagggaatagctgctttgcccattatgactcgatcagatttggccacctcctcgatcttgttcagcagcacctccacgcaggcatctcgcataaagtcgatcatgaggaagttcataaacatgctgttctgggactggtagatctgttcctcgccagctgcgtccacggtgcagccggttaggagcttctgcaccagcttcgacccaggcgccattgcagcattcagacccgtcttgaatgtctccattttgtcggtatacgaggaggcactcgtaaagatttcccgcagcttggagactatggggacatgatcgcaggccaggatgaggctatcaccctggtccaactggacccctgctcgaaccaggaccagttcgaaaaagttgttcggttgtcgggagagcgttgcaatgttccggctggaggattgagtgcgacccagagtggcggccaggataacactgtgctgcgacagaaatcgctgcgtgtgctcctgggaggcgggtatgttctcctcgcttccgccagatgaggactcaacggatatatttgtggtcgtctccgccaggcgctgaaacacagattttggtcaagtaaatggagttccaaattccgactggtccgaatgtccacttaccggcacttttatggtcgcgttctcatcgatggtgttcagaggtttctttgagcgttttttaaattgtttatacatagtactggaaagctttataagcttcaatcttcaatcttaaatcacaaaataataaaaacaaaacaatttaatggcgcgtatgcaggtgcagtgtgaccgagcattgacatcagtttttatcgatagccgcggtggtcgaggttcgtgaattcgctaagcgcaataacgaatatcgtaacaattcttatacaaattttacgattttcaaatgattataaaaattaactaataattcaactcttatagaaatacttatttttttttaacattactaattaaaatctaacaaaataaatgaagaaacgacctttagagcactgtgtgtagaagtctaaataaaaatccactttcgtcaattcaaatttttattgaaacataatctacataattcgtacaaaactattattgtattttcttttttttaggtttacataacattcaatcatacgtaatgactataaaatgttccttaattttatgatcgatacggaagcatgatccataaattgataatcgtatatgtaaataagatgattatgagcttatttgttaatttaaagcctttcgattttaattatttaactcgggtgctagatgtctctgataattagataaatatttcctagtatcgattttcaactcttaaaagtgcaaaaactctattgtgccatacatttttaaatgtatataaatacgctttataaaaaggaagtacaacatatgtatgtcttgaagtgattatgccagaaattgacttattccggggccatttagacccttcactacctagttcatagaaaatcactaatttggcgttgttttcagtattgctattgagtatatataatgatgaacatgatgccgattctatcacaccaatgcagtccaaagcgaaatttgcgattctttcacaatactgtgctaacggaaactcaactcagtgtcttccggttattgcttttcatatttctagatagtaataaactattgttttttcgct

SEQ ID NO: 39692 - DNA, 3810 bp, DROSOPHILA
atgtataaacaatttaaaaaacgctcaaagaaacctctgaacaccatcgatgagaacgcgaccataaaagtgccgcgcctggcggagacgaccacaaatatatccgttgagtcctcatctggcggaagcgaggagaacatacccgcctcccaggagcacacgcagcgatttctgtcgcagcacagtgttatcctggccgccactctgggtcgcactcaatcctccagccggaacattgcaacgctctcccgacaaccgaacaactttttcgaactggtcctggttcgagcaggggtccagttggaccagggtgatagcctcatcctggcctgcgatcatgtccccatagtctccaagctgcgggaaatctttacgagtgcctcctcgtataccgacaaaatggagacattcaagacgggtctgaatgctgcaatggcgcctgggtcgaagctggtgcagaagctcctaaccggctgcaccgtggacgcagctggcgaggaacagatctaccagtcccagaacagcatgtttatgaacttcctcatgatcgactttatgcgagatgcctgcgtggaggtgctgctgaacaagatcgaggaggtggccaaatctgatcgagtcataatgggcaaagcagctattcccttgccactgctaccgctgatgctgacgcaactgcgctacttgaccgcctcgcacaaagtagagatctacagtcgcatcgaggtcattttcaacagggctacggaatcggccaaattggacatcatagccaatgctgagttgatactcgatgccagtatgcacgatgagttcgtcgagctgcttaacactgaagacctctttcacatgaccacagtgcaaactctgggtaacttatcgctttcagacagaacgcaggccaagttacgagtgcgcattttggacttcgccacaagtggtcaatgttcggatgcgatcttgccgcatctcatcaggctgctgcttaacgttctgaaaattgatacagatgacagcgtgcgcgaccttcgacgacgcattaaactggagcatattacagtgagcattttggaagagatacgacagcactatagacacatcctggagcagcacataaccacactgatgaacatccttcacgactttatgcgagagaaaaatcgcatcgtgtccgatttcgccaaatcttcgtacagtatactttttaagatttttaactcgatccagaaaaatattctaaagaagctgttggagcttacctgtgacaaatcatcgccccacctgacaacaatggcactggaattgcttcgcgagctgcaacgaaagagtgccaaggatgttcagaattgtgcaactctacttatacccatgctggataggataagtgatctaagtcttacacaaacccgcgttgctatggaccttctgtgccatgtcgcatttccggatccaaatctatcgccctgcctgcaactccaagagcaagtcgatatggtggttaaaaagcagctgatcaactccattgataatattaaaaagcagggaattattggctgtgtgcaactcatcgatgcaatggcacgcatcgcgaacaatggtgttgatcgtgacgagtttattgccagcgtggaaaacgtcgattccttgcccgatggccgaggcaaaatggctgccaacttaatcatacgcaccgaggcatcaataggaaatagtaccgagtccttagccctgttttttgaagaactggccacggttttcaatcagcgcaatgaaggaacctccggctgtgagttggacaaccaattcattgcttgggcctgcgacttagtgacattccgcttccaggcaagctttgtcaccgagaatgtgcccgagactttaaaagcttgtgattctatatacgtgctggctcctctgttcaactatgtcagagtgctgtacaagcaccgccaccaagacagcttggagagcatcaatgctttactaggctgtgccattgtgttgccctcattctttgaggatgacaactatgtgtccgtttttgaaaactttgaggcggagcagcaaaaagacattttgagcatttactttcacaccgtcaattggatgagggtgtcgatcagtgcgtttgcatcacaacgtgatcctcccacacggcgtcgagttctatctagacttggagaactaattcgtatcgagcagagaatgaagcccctcctggcgagagcgcccgtcgacttcgtggcaccgccatatcaattcctcaccaacgtcaagctctcgaaccagaatcagaaacgtccagggcctaagccagctgccaaactaaacgcaactctaccagaacccgatttaactggtaatcaaccatcgatcgctgacttcaccattaaggttggccagtgcaagaccgttaagacgaagactgactttgagcagatgtatgggccgcgggagagatacaggccaatggaagtggaaatcatcatgctcttggtcgagcagaagtttgtcctgaaccaccagctggaagaggagcaaatgggggagtttcttggtcttctggagctacgattcctgctggaagacgtggttcaaaaacttgaagcagcagtccttcgacatcacgattcttatgatgcggacagctttaggccgcatctggccaaaccggaggattttatttgcgatctacttccatgcctacacgaggtgaataatcacctaataaccctgggcgaggccattgacaatcagcttacggaagtcagtcatgtgtacagcaatctggatctgtttaaggatcaattttgctatatcaaatcgtgctttgggctgtgcgtccggctgtttgccttgtacttcgcctggagcgagtggagtgataagtcgcaggaacaactgctccataggatactgtgtggcacgctgctgcgccgtaaatggttccactactctggcaccttggacaaaggtggtcagtgcaatatttatttggacgagctggttaagggattcctgaaaaaatcgaatgccaagagtcaaaccgaactacttactgagctggttaaacaatgcagcatactgaatacgaaggacaaagcactgacatccttccccaactttaaaaaggccaacttcccactactctttcgtggactgtgcgaggtgcttattcactccctaagtggtcaagttagcgtcgacagccgtggtgataaattgaagttatgggagtcagcagtcgatttgttgaatggcttgctcagcattgtgcagcaggtggaacagcccagaaactttgggctgtttctaaaacactccctgctattccttaaattgctgcttcagcacggaatgtctgcgctggaatctattgttcgggaagatcccgaaaggctaacaaggtttttgcacgagctccagaaggtgacacgctttctgcaccaactctgctgtcattccaagtccattaagaatacggctataatcagctatattcccagcctgcgggaaacgattgagacgctggtcttccgagtcaaagccctgttggctgccaacaactgtcattctgctttccacatgggaaatatgatcaacagggatctccacggagattctatcataacacccaggagttccttcgccggcgaggaaaacagcgacgatgaattacctgcggacgacaccagcgtagatgaaaccgtcttgggcgatgacatgggcatcaccgccgttagcgtgagcacaaggcccagcgatgggagtcgtcggagcaagtcctcctcccgcagcaaatgcttttaa

SEQ ID NO: 39693 - protein, 1269 aa, DROSOPHILA
MYKQFKKRSKKPLNTIDENATIKVPRLAETTTNISVESSSGGSEENIPASQEHTQRFLSQHSVILAATLGRTQSSSRNIATLSRQPNNFFELVLVRAGVQLDQGDSLILACDHVPIVSKLREIFTSASSYTDKMETFKTGLNAAMAPGSKLVQKLLTGCTVDAAGEEQIYQSQNSMFMNFLMIDFMRDACVEVLLNKIEEVAKSDRVIMGKAAIPLPLLPLMLTQLRYLTASHKVEIYSRIEVIFNRATESAKLDIIANAELILDASMHDEFVELLNTEDLFHMTTVQTLGNLSLSDRTQAKLRVRILDFATSGQCSDAILPHLIRLLLNVLKIDTDDSVRDLRRRIKLEHITVSILEEIRQHYRHILEQHITTLMNILHDFMREKNRIVSDFAKSSYSILFKIFNSIQKNILKKLLELTCDKSSPHLTTMALELLRELQRKSAKDVQNCATLLIPMLDRISDLSLTQTRVAMDLLCHVAFPDPNLSPCLQLQEQVDMVVKKQLINSIDNIKKQGIIGCVQLIDAMARIANNGVDRDEFIASVENVDSLPDGRGKMAANLIIRTEASIGNSTESLALFFEELATVFNQRNEGTSGCELDNQFIAWACDLVTFRFQASFVTENVPETLKACDSIYVLAPLFNYVRVLYKHRHQDSLESINALLGCAIVLPSFFEDDNYVSVFENFEAEQQKDILSIYFHTVNWMRVSISAFASQRDPPTRRRVLSRLGELIRIEQRMKPLLARAPVDFVAPPYQFLTNVKLSNQNQKRPGPKPAAKLNATLPEPDLTGNQPSIADFTIKVGQCKTVKTKTDFEQMYGPRERYRPMEVEIIMLLVEQKFVLNHQLEEEQMGEFLGLLELRFLLEDVVQKLEAAVLRHHDSYDADSFRPHLAKPEDFICDLLPCLHEVNNHLITLGEAIDNQLTEVSHVYSNLDLFKDQFCYIKSCFGLCVRLFALYFAWSEWSDKSQEQLLHRILCGTLLRRKWFHYSGTLDKGGQCNIYLDELVKGFLKKSNAKSQTELLTELVKQCSILNTKDKALTSFPNFKKANFPLLFRGLCEVLIHSLSGQVSVDSRGDKLKLWESAVDLLNGLLSIVQQVEQPRNFGLFLKHSLLFLKLLLQHGMSALESIVREDPERLTRFLHELQKVTRFLHQLCCHSKSIKNTAIISYIPSLRETIETLVFRVKALLAANNCHSAFHMGNMINRDLHGDSIITPRSSFAGEENSDDELPADDTSVDETVLGDDMGITAVSVSTRPSDGSRRSKSSSRSKCF

SEQ ID NO: 39694 - DNA, 3847 bp, DROSOPHILA
taaattgtttatacatagtactggaaagctttataagcttcaatcttcaatcttaaatcacaaaataataaaaacaaaacaatttaatggcgcgtatgcaggtgcagtgtgaccgagcattgacatcagtttttatcgatagccgcggtggtcgaggttcgtgaattcgctaagcgcaataacgaatatcgtaacaattcttatacaaattttacgattttcaaatgattataaaaattaactaataattcaactcttatagaaatacttatttttttttaacattactaattaaaatctaacaaaataaatgaagaaacgacctttagagcactgtgtgtagaagtctaaataaaaatccactttcgtcaattcaaatttttattgaaacataatctacataattcgtacaaaactattattgtattttcttttttttaggtttacataacattcaatcatacgtaatgactataaaatgttccttaattttatgatcgatacggaagcatgatccataaattgataatcgtatatgtaaataagatgattatgagcttatttgttaatttaaagcctttcgattttaattatttaactcgggtgctagatgtctctgataattagataaatatttcctagtatcgattttcaactcttaaaagtgcaaaaactctattgtgccatacatttttaaatgtatataaatacgctttataaaaaggaagtacaacatatgtatgtcttgaagtgattatgccagaaattgacttattccggggccatttagacccttcactacctagttcatagaaaatcactaatttggcgttgttttcagtattgctattgagtatatataatgatgaacatgatgccgattctatcacaccaatgcagtccaaagcgaaatttgcgattctttcacaatactgtgctaacggaaactcaactcagtgtcttccggttattgcttttcatatttctagatagtaataaactattgttttttcgctcgtcgtctcttgaagcccgtcatttgcttgagcagctgtgagttttcgtcatccagatccatatttggctcccagagccgcagtcgtttgggtatatagatgaggcccagtagagttatagctaaaaaggcgaaagattcaatttactaaatggttcggggtgttacaaaaaagatataatttgttattactgaattttagttgtgtttacttacaatttagcacacacgggaagatcacgtagaagttaatggtgctggagcgaaagtagagtgcctcggtggcatagaagaccatggtgagggccaatgagcagccgcccatgctgaccaccctaaacgtagggaaatatccccattagtgacgataatctaaccagaggatatatgggattcacttacggcttgtagtgaatgtagagggtgcagtggacgagagcgatggccttcagcaggcagtacatcccgatgatccgcgatatggtgtagtcccctgtgaaagaacccatcaaatgcgactccagcagctcaatccatccccacttaccctctatgaactgggtgtcgctgtgatcgcccaggaagctgcgtctttctatgtagctcctaaaggccgtgcccaggtccatgaaggccacgaatgctatccatccccggaaggcgtacagcaatcgctcgcggggtcgtccgccagactgcatggcagccctacaagtaaattttctgtgttatttaatatccattctccctttaaaggaaaataatttaatctaaggaatgggtttaccaattggtctaatgtccaacacaacttgaagactttattacacatatcagggttatatatttagaaaattatttgaaattttgacaaaatggtcattatactgcagaaaacttgtaatagaatgtacaatgtaacaattcgtcgtaaggtttttttatgcctactcgtattcgtgtaacgaatgttttaagatataagaaaaactcattaagaaccttagccagaaaatatacaaatttagctcaggtcatagtatcattatgcttaaagcagaccgacccagtctagattatgatgatataataagagaaccaactatgtacatatttcggtattacaaagccattagaataaacgcgatactattgcgtgtgcataatgaggtgcttttgtttaaaggcttttagcacaagcatgaactccaagcgagcagccgagtccaatggcatcggtggcaaccggcttatcttcccctgagaatcgcatcgcactcggaagtcccagcacatgccaccacccaccccactccacttcactccgcaggtctgggcaaaatcgatattatggcacactatgctgctgtgctatttgcgcaatgcaaatatgcggagcgtaattcccggctgcacgcgaccacgtggagcgcttatggtggatccaccattagtcccggttgtttatttccaagcaacatcgccgactgggtcgtccgagcaacgcgatttatgggccccggaccaaccggctagccactatcaggcggttcacaataaatgcaccactggctatgtgtgtatttgatttcgggagcactcctcaattcactcacattttgcaaagattcccgtgttaatcagcagtaccgcgatccgtcccacccggcgtatgcgtaatatttgtttgcagcactgccactggcactcttgtgtccctcaaaaacctattttatgcagcagcgattgtttatttcatatatgtgtattttcgccgttcagctgtaaacgcgaccgattctcgtaccgccgcctgcaacgccttgccagccactaaaagtctagaatgggaaagtttcgtgcgaggacaggcagcttttatgctttcggagctttggttcttgttgattggttcgtatcgcaccgggaatacctggaaaaagtggtctaagtcctcaattaatatagtatgattatgattaaaaaaaatatattcacaagttggccattactgacttaaaaaaaaagtgtggcttgcatttttagcatcattttatttagcaaagtacaaaagttgtaaactgtgttcaatcggaattgctatatgtataggcaacatgtataaaagatcaacaatttgtcaagttctatggctctcttgggatgaaactggtctagtctggtctagtccttgccaatgttggcctcagtcttgcggtactcggcccagtcgacaaatccatcgttgttcaggtccatggacttcagcacatagtcaatggtgtcctccagagccttgtccgtgtacacagatccggatttgtgatcatcgggctgctgcgcttggccctcggcgtggccttcctggtgtgcctcggctggtttttctccactatccttgactagaaaggtaatgtacactttaaggctccgctgggcatggttaacttgttagctaagctcacccgaaaccggaaaatgtgttctagtgtctacaattctacttgatagagggattacatgtggtggtcgcgtgtgatttgaagttgactttattcgctaattcggctttacttacagagatttgcatgcgtctatatagtaggtttcagtttaaaaagacggggttttcttcgcttatttttttgcatagtttcattttctttttgtacaaaacaaacgtttacacaatcagtctgttttttttgctgctctaaagtcgcgcttaaaaattagttcatatcgaaaagtaactaaaattatgacaatcgaaaacaaaacgaaacaaggcggctggaattgcacaacccactcgagagattcgtgagaaat

SEQ ID NO: 39695 - DNA, 717 bp, DROSOPHILA
ggctggcaaggcgttgcaggcggcggtacgagaatcggtcgcgtttacagctgaacggcgaaaatacacatatatgaaataaacaatcgctgctgcataaaataggtttttgagggacacaagagtgccagtggcagtgctgcaaacaaatattacgcatacgccgggtgggacggatcgcggtactgctgattaacacgggaatctttgcaaaatatgcagtctggcggacgaccccgcgagcgattgctgtacgccttccggggatggatagcattcgtggccttcatggacctgggcacggcctttaggagctacatagaaagacgcagcttcctgggcgatcacagcgacacccagttcatagagggggactacaccatatcgcggatcatcgggatgtactgcctgctgaaggccatcgctctcgtccactgcaccctctacattcactacaagccggtggtcagcatgggcggctgctcattggccctcaccatggtcttctatgccaccgaggcactctactttcgctccagcaccattaacttctacgtgatcttcccgtgtgtgctaaattctataactctactgggcctcatctatatacccaaacgactgcggctctgggagccaaatatggatctggatgacgaaaactcacagctgctcaagcaaatgacgggcttcaagagacgacgagcgaaaaaacaatag

SEQ ID NO: 39696 - protein, 166 aa, DROSOPHILA
MQSGGRPRERLLYAFRGWIAFVAFMDLGTAFRSYIERRSFLGDHSDTQFIEGDYTISRIIGMYCLLKAIALVHCTLYIHYKPVVSMGGCSLALTMVFYATEALYFRSSTINFYVIFPCVLNSITLLGLIYIPKRLRLWEPNMDLDDENSQLLKQMTGFKRRRAKKQ

SEQ ID NO: 39697 - DNA, 4583 bp, DROSOPHILA
aggcttttagcacaagcatgaactccaagcgagcagccgagtccaatggcatcggtggcaaccggcttatcttcccctgagaatcgcatcgcactcggaagtcccagcacatgccaccacccaccccactccacttcactccgcaggtctgggcaaaatcgatattatggcacactatgctgctgtgctatttgcgcaatgcaaatatgcggagcgtaattcccggctgcacgcgaccacgtggagcgcttatggtggatccaccattagtcccggttgtttatttccaagcaacatcgccgactgggtcgtccgagcaacgcgatttatgggccccggaccaaccggctagccactatcaggcggttcacaataaatgcaccactggctatgtgtgtatttgatttcgggagcactcctcaattcactcacattttgcaaagattcccgtgttaatcagcagtaccgcgatccgtcccacccggcgtatgcgtaatatttgtttgcagcactgccactggcactcttgtgtccctcaaaaacctattttatgcagcagcgattgtttatttcatatatgtgtattttcgccgttcagctgtaaacgcgaccgattctcgtaccgccgcctgcaacgccttgccagccactaaaagtctagaatgggaaagtttcgtgcgaggacaggcagcttttatgctttcggagctttggttcttgttgattggttcgtatcgcaccgggaatacctggaaaaagtggtctaagtcctcaattaatatagtatgattatgattaaaaaaaatatattcacaagttggccattactgacttaaaaaaaaagtgtggcttgcatttttagcatcattttatttagcaaagtacaaaagttgtaaactgtgttcaatcggaattgctatatgtataggcaacatgtataaaagatcaacaatttgtcaagttctatggctctcttgggatgaaactggtctagtctggtctagtccttgccaatgttggcctcagtcttgcggtactcggcccagtcgacaaatccatcgttgttcaggtccatggacttcagcacatagtcaatggtgtcctccagagccttgtccgtgtacacagatccggatttgtgatcatcgggctgctgcgcttggccctcggcgtggccttcctggtgtgcctcggctggtttttctccactatccttgactagaaaggtaatgtacactttaaggctccgctgggcatggttaacttgttagctaagctcacccgaaaccggaaaatgtgttctagtgtctacaattctacttgatagagggattacatgtggtggtcgcgtgtgatttgaagttgactttattcgctaattcggctttacttacagagatttgcatgcgtctatatagtaggtttcagtttaaaaagacggggttttcttcgcttatttttttgcatagtttcattttctttttgtacaaaacaaacgtttacacaatcagtctgttttttttgctgctctaaagtcgcgcttaaaaattagttcatatcgaaaagtaactaaaattatgacaatcgaaaacaaaacgaaacaaggcggctggaattgcacaacccactcgagagattcgtgagaaataatattcgaaaatgcgaatcttttgaaaaaagagttctcagaaggacgtttagttacaatttgttcaatgaagttctccgattggaatgcttgcagcatgttaagtaaatttcattcaaatttatctaagaagtgcgctaaaatcgtcgacgaggtcaacgtaatttcagggtgttttgggcagaaacaggagtatgtgttgcacgtcacagagcgcgggacgaggacatggttttatgtatgtaaactgaacgcatctgggtgactactaatgaaccggctgctgctgctgctgctgttgctgttcgtgcggctgctgttgttgctgctgctgctgctgctgcttctcggcggccttttgctgcgccttaatgaactccggatagtcgatgtagccgtcgcgtgaggtgtcgtccatctgcaggatgggatcaatgagggccaccagctcctcgtcggagaaaaccttctcctccacatgcggcttctcaccgttcggctgctccttgctgccttgctctgcatggcaatgatttgttatggcggatgcgagatggattagcatgagattcgagcatgaccacaaccataaccggaaacagcccagttttattacgcatatgcaaagaagtagaacagaatagtgggtcaaacaaaacgaaatacagaaaccacaaacgcaactctaaccagcgagccagattaaaaagcagtagctatcttaccgtgccaatggatcagcgatttgatcagctcgcagccgtccaacttgttgttgttgtccgagtcgtgcatcttgaagtagtggaactgcagctcagcctcggacatcttgctcgtatcgattggcacttgcatgtgctcctggatgtgactgaaattgaaagagtaaggtttggtattagatccaactgatcgttgatttggttgaagaaatagatcagcccagaaatattatgtaagtactatgtctaatttacttttaacatggaacttttgatatataatttctttaaatgcgaatggaaacatttgctgtatgaaaatgtcactatgcttaatttatagacttttttcctaattaagccttaggtttgcggtacaacaaaatacctcccttcacttttatgatttatttatgacatttttactcgtataccctaaagctccattgatggataatgattgccagtggcagtgataagatagacgggcacttacgcgcgctcctgctgaatgttgccggtgtttaggacttgctgcggttgcccatggtggtggccacctgcctgctggtggtgcccctgctgcggctgttgctgttgctgcatcgtcggttgctggtggattggttgatgttgctgctgctgctgctgcacaggaacttgctgatattggaccggtgcctgctgttgcacgggaacttgaacctgttcgtattgctggaagtcggaggcctactggttaattgcttgccattcggaaatgcgcatttgcactcacgtattgctggggcggcacaccgggtgctgagtggacctgttgctggtactgcggctggtggtgctgcggtggtggcggtgggtggtgctgcggcacctgctgcggcacttgttgctgcaatatgtgtgggttaattccctcattggcgaatgggggtgcttcaaatcactcacatagtgctgcggattcactccgggagcgacgcgctgtccgctggccaatccaatcaggattaggggcagcagcagctgaactgctggcaattccgtgacgcgcatctgcatggaagtgctggattctggcggggatcggatcggatcggtttgggatctatatcgcttctggtggctctgtaatcaccacgtcgcaaagacgaaacacacacgtacacaaatcgcttcttcttcgccggtggacattcgcagcgagcgacagctgattctcaggtaagtgcggacattcgccacgaaacgtgtgagcggcatgacaacactgcgcgcctgggttaggggtatgcgcgtagataatattatcatgcttcaaaccgaaaaaaaaaatcataaaaacaaacttgatgcttccatttaacaactcaaaatttaatcaatctaatatgtgtacgatttcaccgttaggggtttagtattagtaccccgctaatatttagctcaaggaacaccccaaatgcagttgggcataattagggtgttttaaagattgaagctacggtctaccgtggacaccctgtaaaacttctcttcgttttcaaccagcaaattgactggttcagcgctgctcaaaatacaaagatttgaatatctcgaccagggaaattgctaaataatggtaagaatgctgttgccgaacaatccgcaactactgcgagtcaatagtagtgcttgcattgcccttgccaacacgaaataccgtgcacgtgcgatggccgttcaacctaaccccacttaatcgatgtttccgccaaatccacaggctgctgcacccaaggatattgagaagccccatgtcggcgattctgcctctgtgcaccgcatccgcatcaccctgacatccaggaacgtgcgttcgctggagaatgtgtgccgcgacctgatcaacggtgcaaagaaccagaacttgcgcgtcaaggtgagaattttgcgtccaactcagggatttagaggttgcatttacctggaggctttgcgttcccccagacgcttagcctagtcattaataaatgctagataaagtgccagaatcggacattattcccgcactgatcgactgcagagctggaatatcacatggttcaggctacaatacccattttcatgaggaattcctttctaattcttaaatattcatttatttcagggccccgtgcgcatgccgaccaagacccttcgcatcaccacccgtaagactccttgtg

SEQ ID NO: 39698 - DNA, 1234 bp, DROSOPHILA
tcgctcgctgcgaatgtccaccggcgaagaagaagcgatttgtgtacgtgtgtgtttcgtctttgcgacgtggtgattacagagccaccagaagcgatatagatcccaaaccgatccgatccgatccccgccagaatccagcacttccatgcagatgcgcgtcacggaattgccagcagttcagctgctgctgcccctaatcctgattggattggccagcggacagcgcgtcgctcccggagtgaatccgcagcactatcaacaagtgccgcagcaggtgccgcagcaccacccaccgccaccaccgcagcaccaccagccgcagtaccagcaacaggtccactcagcacccggtgtgccgccccagcaataccaatacgaacaggttcaagttcccgtgcaacagcaggcaccggtccaatatcagcaagttcctgtgcagcagcagcagcagcaacatcaaccaatccaccagcaaccgacgatgcagcaacagcaacagccgcagcaggggcaccaccagcaggcaggtggccaccaccatgggcaaccgcagcaagtcctaaacaccggcaacattcagcaggagcgcgctcacatccaggagcacatgcaagtgccaatcgatacgagcaagatgtccgaggctgagctgcagttccactacttcaagatgcacgactcggacaacaacaacaagttggacggctgcgagctgatcaaatcgctgatccattggcacgagcaaggcagcaaggagcagccgaacggtgagaagccgcatgtggaggagaaggttttctccgacgaggagctggtggccctcattgatcccatcctgcagatggacgacacctcacgcgacggctacatcgactatccggagttcattaaggcgcagcaaaaggccgccgagaagcagcagcagcagcagcagcaacaacagcagccgcacgaacagcaacagcagcagcagcagcagccgcggagccttaaagtgtacattacctttctagtcaaggatagtggagaaaaaccagccgaggcacaccaggaaggccacgccgagggccaagcgcagcagcccgatgatcacaaatccggatctgtgtacacggacaaggctctggaggacaccattgactatgtgctgaagtccatggacctgaacaacgatggatttgtcgactgggccgagtaccgcaagactgaggccaacattggcaaggactag

SEQ ID NO: 39699 - protein, 361 aa, DROSOPHILA
MQMRVTELPAVQLLLPLILIGLASGQRVAPGVNPQHYQQVPQQVPQHHPPPPPQHHQPQYQQQVHSAPGVPPQQYQYEQVQVPVQQQAPVQYQQVPVQQQQQQHQPIHQQPTMQQQQQPQQGHHQQAGGHHHGQPQQVLNTGNIQQERAHIQEHMQVPIDTSKMSEAELQFHYFKMHDSDNNNKLDGCELIKSLIHWHEQGSKEQPNGEKPHVEEKVFSDEELVALIDPILQMDDTSRDGYIDYPEFIKAQQKAAEKQQQQQQQQQQPHEQQQQQQQQPRSLKVYITFLVKDSGEKPAEAHQEGHAEGQAQQPDDHKSGSVYTDKALEDTIDYVLKSMDLNNDGFVDWAEYRKTEANIGKD

SEQ ID NO: 39700 - DNA, 2908 bp, DROSOPHILA
tgcgagtcaatagtagtgcttgcattgcccttgccaacacgaaataccgtgcacgtgcgatggccgttcaacctaaccccacttaatcgatgtttccgccaaatccacaggctgctgcacccaaggatattgagaagccccatgtcggcgattctgcctctgtgcaccgcatccgcatcaccctgacatccaggaacgtgcgttcgctggagaatgtgtgccgcgacctgatcaacggtgcaaagaaccagaacttgcgcgtcaaggtgagaattttgcgtccaactcagggatttagaggttgcatttacctggaggctttgcgttcccccagacgcttagcctagtcattaataaatgctagataaagtgccagaatcggacattattcccgcactgatcgactgcagagctggaatatcacatggttcaggctacaatacccattttcatgaggaattcctttctaattcttaaatattcatttatttcagggccccgtgcgcatgccgaccaagacccttcgcatcaccacccgtaagactccttgtggtgagggttccaagacctgggatcgcttccaggtgggttatcccctataatatatatagtaacaaacgggcgaatctgatatcgtggttgggcattcaaccagtcgctccacagtatcaatgatttgcccagataaaacgtattctcatagtacaatttgttggtatttcctcacactttgcctctctgaatgcgacaaaactaattaataatgactcagctattagcttgccaatggagttgcatattaaatcaatattacattattccagatgagaatccacaagcgcatcatcgacttgcactcgccctctgagatcgtcaagaagattacctccatcaacatcgagcccggcgtagaggttgaggtcaccatcgccaactaagatcggcagatgccacatttttacacctcgaaaagtttggcgtgctaataaaaacaaagaactttttccatacacatttggccaactttattgtgcgaaaattggagtactttactggaatgtttttttatggtaaaggcagtctaatagtagtcgggaactggggcgcatgcaatcttgacaaagtctgcataccgcacagtgctattgttgttcacattggcctcccggaagatgttgtccacttcgcgcatggacaggccctctccccagttttgaagtagattacgcagctgtctggccgagatggtgcccttattctgcggatcggccgctttaaaggcggcaatgacctcgtccggcaaactctccaccttggagtgctgatgcatgatgtccaggaagtcggcgaagctcattttcccattcttttgcttcagataggaaaccagttcttggatcgtcggcgaaagacccaaagaacgcataataacctgatgacgtgaagtttacaccattagtatgttttttttttctggggtgggagctcaactcacggttagttcgtccaaattgttgatttggcccgaacgggcgaacagataaaaacactcacggaactctgggggttacagataagaaatgttttcggtatgaaatcatcaattcacattgatacgcatatttaccatcaatgtcctgttctttaaagtaacgagcctgaaataaagttcagaagtagaaagttgcataaatacaaatggttaatgggggcagtcgagtggaaagtgcagttatgaacagaagaaagcattttcagtttaagtgaatggcttatgtaactcaccattttagagtttttaaatacgttcaattagttgaattaagcttactaaaccataaataaataccgtaaacaataagatagagttaataaataaacgaagcgtagaactcaaacaggtagcagcccagtgtgaccaacaagttatgggaccgttgacggcaaattcaaacaccacatttatctgtggtaagaccgtataactgtgggattcccggtaattcaaattatccagatttagggaatactttttagaaatgaattaaaaagtaagaaactttgtctatcaattaaataacacatatcatttaactccgtctgtaggaatatttcaattgatgacctacactgatattcatttagtttgctttaaaaaactgatttgagataaatttgaatttaaattcatattcttacggaatctttgttacatttgttactattaaattaaaatacgaatgtttgatcccctttaatcttattataagctaattagtttttactgcaaccagcttctaatagatttaacgctttttaactaaatgggttcacccaaaataaaaaacattttctttttgactttaaaatgtatttaccttgcgacacaattacacaagtcagagcacactgttgtatttaaatattaaaacaacattatttagttattgtacaataaaaaatatctgcttccctttgcatacaaaaaatctgaaactgcacctgatgatcttaaaaactaagtacgtcctcatcaaacaagaagttatagtatataatatatgcttgcgagccccggacggcaccgcttcaaatgaatttgtgaacatcaaaactagaaagtatagcttaaagaagcaatatgctaataatttgtgtccaaatgttgtagatagtcgaaatattagttgtatttgtgggtggttaggtctgtagttgtgtttggatattttaagcgccgtttctgcccaatgggctctactaaagcgtttccgtctcagatacacgaactggtaggcataagtacgtcgtcggcacccttgcctttgctggttaatgcacattgatgatggactcacggccctttccaacgcccacccagcgcacgggcacactcagctcgctctcc

SEQ ID NO: 39701 - DNA, 645 bp, DROSOPHILA
ctgctacctgtttgagttctacgcttcgtttatttattaactctatcttattgtttacggtatttatttatggtttagtaagcttaattcaactaattgaacgtatttaaaaactctaaaatggctcgttactttaaagaacaggacattgatgagttccgtgagtgtttttatctgttcgcccgttcgggccaaatcaacaatttggacgaactaaccatgcgttctttgggtctttcgccgacgatccaagaactggtttcctatctgaagcaaaagaatgggaaaatgagcttcgccgacttcctggacatcatgcatcagcactccaaggtggagagtttgccggacgaggtcattgccgcctttaaagcggccgatccgcagaataagggcaccatctcggccagacagctgcgtaatctacttcaaaactggggagagggcctgtccatgcgcgaagtggacaacatcttccgggaggccaatgtgaacaacaatagcactgtgcggtatgcagactttgtcaagattgcatgcgccccagttcccgactactattagactgcctttaccataaaaaaacattccagtaaagtactccaattttcgcacaataaagttggccaaatgtgtatggaaaaa

SEQ ID NO: 39702 - protein, 114 aa, DROSOPHILA
MRSLGLSPTIQELVSYLKQKNGKMSFADFLDIMHQHSKVESLPDEVIAAFKAADPQNKGTISARQLRNLLQNWGEGLSMREVDNIFREANVNNNSTVRYADFVKIACAPVPDYY

SEQ ID NO: 39703 - DNA, 7947 bp, DROSOPHILA
aagctcattttcccattcttttgcttcagataggaaaccagttcttggatcgtcggcgaaagacccaaagaacgcataataacctgatgacgtgaagtttacaccattagtatgttttttttttctggggtgggagctcaactcacggttagttcgtccaaattgttgatttggcccgaacgggcgaacagataaaaacactcacggaactctgggggttacagataagaaatgttttcggtatgaaatcatcaattcacattgatacgcatatttaccatcaatgtcctgttctttaaagtaacgagcctgaaataaagttcagaagtagaaagttgcataaatacaaatggttaatgggggcagtcgagtggaaagtgcagttatgaacagaagaaagcattttcagtttaagtgaatggcttatgtaactcaccattttagagtttttaaatacgttcaattagttgaattaagcttactaaaccataaataaataccgtaaacaataagatagagttaataaataaacgaagcgtagaactcaaacaggtagcagcccagtgtgaccaacaagttatgggaccgttgacggcaaattcaaacaccacatttatctgtggtaagaccgtataactgtgggattcccggtaattcaaattatccagatttagggaatactttttagaaatgaattaaaaagtaagaaactttgtctatcaattaaataacacatatcatttaactccgtctgtaggaatatttcaattgatgacctacactgatattcatttagtttgctttaaaaaactgatttgagataaatttgaatttaaattcatattcttacggaatctttgttacatttgttactattaaattaaaatacgaatgtttgatcccctttaatcttattataagctaattagtttttactgcaaccagcttctaatagatttaacgctttttaactaaatgggttcacccaaaataaaaaacattttctttttgactttaaaatgtatttaccttgcgacacaattacacaagtcagagcacactgttgtatttaaatattaaaacaacattatttagttattgtacaataaaaaatatctgcttccctttgcatacaaaaaatctgaaactgcacctgatgatcttaaaaactaagtacgtcctcatcaaacaagaagttatagtatataatatatgcttgcgagccccggacggcaccgcttcaaatgaatttgtgaacatcaaaactagaaagtatagcttaaagaagcaatatgctaataatttgtgtccaaatgttgtagatagtcgaaatattagttgtatttgtgggtggttaggtctgtagttgtgtttggatattttaagcgccgtttctgcccaatgggctctactaaagcgtttccgtctcagatacacgaactggtaggcataagtacgtcgtcggcacccttgcctttgctggttaatgcacattgatgatggactcacggccctttccaacgcccacccagcgcacgggcacactcagctcgctctccagaaaccggacgtagctctgggcattctccggcagctccttgaagttgcgcacctcctcagtggatgtctgccagccaggcagcacggcgtactccacctcgatgtttccgagctcggcaatggtgccggggaagtggtcaagcttctcgccattgggcttcttgtaggccacggccaccttgatctccggcagcgtgtcgagaatatccagcttggtcagacagatgcacgtgtagccgttgaccagcgaggtgtacttcagcagcggtatgtccagccagccgcagcggcgcttccgcttggtagtgacaccgacttcaaagccgcgcgtctgcagcaagtcgccaatatcctgcataacgaatggggatcataagccaaacggttgaaagggtattcacaaagctactactcacatttagctgctcggtggggaatggaccgtcgcccactcgcgtcgtataggccttgaccacgccaatcacctcgccaatcgtctgcgggggcagacccaggcccgtgagaacaccgccaatgctgcagttgctgctcgtcacatacggatacgtgccgaagtcgatgtccagcatggccgcgttggcgccttcgaccaagatcgtcttgccgttgcgcagggcagtgtgcaggaagcaaatggtgtccttgacatagggacgaaccttatccgcgtagtccttgtagcgggccagctcggcctctacgtcgacgttaatcgatgggaacaggcgcacgtgcgtggccacaatcgacttgaacctaaatgggtgtcaaagagggcggttagaatctaggttcccctaattcccccagccaaaactcctctcacttttcgctgaatagattgaagtcgccgagcagctcgcccactcggatgccattgcgggtagccttgctggagtaagccggaccgatgcccttcttggtggtgccgagcgacttgccgcccttctcagcctcctgcatgccatccacatgctgatggaagtcgaaaaccaggtgggcacgatccgagatgatcagccggttctctaggtgctgcagccccttggcttcgttcttcagcacctcgtcgaatagcgagggcaggtgaatgacgacgccattgcctgcaaatgtagggttcatgttcttagtattcgttcattttccggtcactagccatttgcaaagtccctgcattcaataactaataaattacgaacaaactgcagttggcaggggtctctaaatcttagttttattgccgtaaaacacatttctgtaaaagccaacttaatagggccttttcttgtttaaaactaataaacaaagcaaaacggtatattgtgtgtcccaggaaaagtaaaagcaactatcaagttcttaaattcttcagaaaacgaatacgttttaatgcttttataacagttcttcgcaaatcgcacaagttatcgttcaatccatggacttttcttgatggtcctataaaaaatagtcaagataagacgttcttcgatcaacttaaatgtcacataagaactgcttcaacagcatagagatttggctgccctcaaagactgatatcgatagcgcgaagagacattgttgcataataaacgaaatgagtattcttattttgcgcatccatggaaccaatttaaatatcataatgccaaaacacgcgagccggctcaacgaacggggtcgttttgaattgagttccgagcggcaaggaaattaaaaataataagttaattgcctgattagaataattttccgcttcacgtatgtgagcctcagtttttttttgtggtcgagtgtcataaacgatatctgaatggcaaagcttttggggaattgtggtggttgtggggtttcgctggcttggtgcggatggttctgactatctcgtaaattagtcttgtgacaaacgatgacagtgcggatggcttgttgctctgtgcaaacaaaccaaccccaaccccaccgcacccacccacgaccactcgccctgcttgcaacatcgattaaactttgacaaagttgcgattattttattgacaaactggcgaccttggcgttgacagtcggtgacgtcactgcggcactggctggcacccaggtaatatacattttacatattccacgctgatttaattatctaaattgcttatctacgaaaatagaatagagaaaacctttcgttttcacggtcaaacggcgtaccaaagtcgaaaaacagaccaactgacccgcaagccaatgtcaatgatgcactaaatctctgccagaaattccttgcctacatctgactttctatatatcggactacatatatgcatatgtttgtatatagcagcatgtatatgtatgttcgatacgttcaatttcacttcgccgcagagcgagtgaaaactaaaagcaaaacaaacggacaacagaccgtatatttacgacctatactgtatgcgaaaattctgtagatatgtatgtaatagaaaaaatacaaaggggaatatcttgctcattttcattgacaattcttctctataaactctgcatatgcgttctaatattctagtcaaaatattcttataacttgaaaaataaaaaagttgtatgctatatctagaagatccccatcaagttatgatgggaatcatacaagatactttatacaatgagctaagacttatttttcttcattagtcttgcagatcctggcctacgtacaatatacaccaaatcagcatcccaacttaccaatgacggaaacgcatttctcgttcacaactccactgggcaggagatggaagtcgaactccgtgccattagccaccacagtgtgtccagcgttgttgccgccctgtggattggaaagattgaaaatgtagtttcccagatatacaaagtatgcctgttgatatacaaaattagcaatatttgttttgctttcgtttgtgcgacgagcgagaagaaaaacaaaagcttgtgggaaaaataaataaatattataggtatatcttgcgaattgaaacacacagagcccatcgaaaggggtatctacatacatatgtacataagtacgtatttgtcccacgtgcccacaaatatcaaatgacaataaatggaaaacgttttcacacatacagataactacgaccatttcacgtaagcactcgagaaatttaatgtgtttttccgtttcatttcattttggcaactgtacagaaaatgcctacatttcgctaatctaacgaatttgttttctatatgaagagaccgaccgtcaggagaatacgaaatgggtgattagcggcagcagaagagtgaaaattctggaaccttcacaaattattgctaaaaaccaaaaacaagataatcaaaatgtttacgcggtgccaaggagagggcttatacatacatacatgtgtatgtatgtatgcacatagcttatagtccgggtctatgataagatacggtgaaatggcgagatcgcaatcggcgcgccttcaaatgccctcgaaacgagttcctggcctttggagacgcagtatgcgtaattcagaacagatcatatgtattgtacatacataatattaacgatccagtaaatcgggaaatcacccatcacagggggcgtgtcagtcgtgtgactcagtgcgattatcaactgagaatgctattatataaggcacactgataagacttcgattctgcggaccaaccacaatgatggttttgaatccgcttctggccgcatatcgtccattgaactgcgtagatggtttcgagaaatcaacaagtggtcggacataaacaacccgttactagcacgcaatgttctaatcctacggatgtttttacagccctcccgagttctgaaaactatagataattatgaacgattggattgcatttccagagattctatgaccatgactccaagtttctgctaaatgatgttgggcggttatgtaaacccggcggccgagcggccagcacagatgtgtggaagagggatggggatagaatttaacgtcagccgcgaaagagacggccgctcgcagagagagaaggagacagagagcaccagtgacgaattctgctgcgccaacattgttggcagacatgctgacggaatactagtgctgtaggctattgtcttgaagaacattggttggtgggacatttatgaataaaatagaatttgctgatttatgtttaaataaataggcaaaaaaaaatctaaaacgttactacaatgcataggaaagtttttcaagagtaaaaatataatagaagaaagtttacctaactgtttttcctttgaaatataattcgggtaatgatataaattatttaaaaatatatggaatagaaaaagtttagccttgaactcaattatgaaaagaataccaacgacatgctactttcttttttgacatcacttacataatattttttataactaatcgttttcttagtaaaaactataagaacaagaaaaattgtatctataaaatagatatttttctttggaaatacttttgttcagtgaacctgtgtaggcgggaacatgctaactacacctgcagactaagttagttcctgacctctgaaacaagccagatttggcgtgaaaaccgctgcgacggcagcactacggcatacagaccaacacatgggaacgccaatggaagtggaaaatgtagctcaagggagggcaggggagaggagcacacatgcgcgctctgcacgaacacttggacaaacaggctcacggacggacgcacacagacgcaaccacatggcgagatggcagaattgataaatacaaatgggaaagcatgcggcggcggcggccgaaaagagcgatagcgagtctctttcgggttggaaaaaggtggctcatctggtgaaatacgcagaagctgggtggcaggctaactgggctatcgggtgcctagatttggatgtccttgggcaaggatatcgcgcgttatcaatggcgattcttctgatttttccctactttccggttatgccctctgctcacctgacacctgcagacgatgtccacatcggaggccagcatgtccaccactttgcctttgccctcgtcgccccactgggctcccaggacgacgtccacctttgacttgtacatcttggtgcggccttggtgcagctgctcgtagtgcgtgccgttggtggcgctggcagacatttccccgtagtggaacggaacagatcggatcggatcggagcacggacacggatctcgggcactcggaaatcgttcgcgaacacgttgtgattactctctgctggctgcgctcgaccagcatttggctataaaacaaacagagggtggcccggtgcgggcgagcggtcctactgcgcgcgccatttgcgccagcggctcgcgatggtaacactgaacgcgttgcgtgggtggaggtggtacggtcatattaggtcccttactgtttatttgcagttatatttttatttttaattaattaagttgtttttcatttatataagcattttcaatctctcataagtctttttacatttaaagtacttaaataatatattattattctcttttcattgatgttcgtagttgataggtgtattgtttagttacaacgaatttttgtaaaaagactaactagttaatatttaaatatattttatctttaaggttcatatttgatatacatagttatttgctaataaattcctatgtaaaaaacaagagaaattgcgtaattcaaattaaatccaactcttataatatctaagtcgtataatttgtttacaaacaactttattttgtttacaacaaaataaaaacttatccatttgaaaagccgttacttaacgaatcgtggttacggtcacactacagcgatcagctgttggcgaccgcactattttgtttattccattttgtttgaccatgtcggaagccgatgaaaagtgtcacttgtaagtagttaacaagtaatattaattatagcggttcaatatatattaatctcctgcagctgtcgcgaggtgtccttcaagtacacctgtcccaagtgcaatgctttgtattgcagcgtgggatgctacaagtccaaggagcaccttaaatgttccgaggctttctacaagtcctgcattcaggacgagctgacccaaaacacggtaacgcaggaaagccaggaggacatgcggaaaatatacgacatactgaagaggatgagagaaacggacagtggtttcaatccccaggaatttgatacagatggcctggaaaatagtttggactcggatggaggcgaggaaggagagtcagaagaagatgaggcggaagaaaacgtcaccgag

SEQ ID NO: 39704 - DNA, 1984 bp, DROSOPHILA
ccgcaccgggccaccctctgtttgttttatagccaaatgctggtcgagcgcagccagcagagagtaatcacaacgtgttcgcgaacgatttccgagtgcccgagatccgtgtccgtgctccgatccgatccgatctgttccgttccactacggggaaatgtctgccagcgccaccaacggcacgcactacgagcagctgcaccaaggccgcaccaagatgtacaagtcaaaggtggacgtcgtcctgggagcccagtggggcgacgagggcaaaggcaaagtggtggacatgctggcctccgatgtggacatcgtctgcaggtgtcagggcggcaacaacgctggacacactgtggtggctaatggcacggagttcgacttccatctcctgcccagtggagttgtgaacgagaaatgcgtttccgtcattggcaatggcgtcgtcattcacctgccctcgctattcgacgaggtgctgaagaacgaagccaaggggctgcagcacctagagaaccggctgatcatctcggatcgtgcccacctggttttcgacttccatcagcatgtggatggcatgcaggaggctgagaagggcggcaagtcgctcggcaccaccaagaagggcatcggtccggcttactccagcaaggctacccgcaatggcatccgagtgggcgagctgctcggcgacttcaatctattcagcgaaaagttcaagtcgattgtggccacgcacgtgcgcctgttcccatcgattaacgtcgacgtagaggccgagctggcccgctacaaggactacgcggataaggttcgtccctatgtcaaggacaccatttgcttcctgcacactgccctgcgcaacggcaagacgatcttggtcgaaggcgccaacgcggccatgctggacatcgacttcggcacgtatccgtatgtgacgagcagcaactgcagcattggcggtgttctcacgggcctgggtctgcccccgcagacgattggcgaggtgattggcgtggtcaaggcctatacgacgcgagtgggcgacggtccattccccaccgagcagctaaatgatattggcgacttgctgcagacgcgcggctttgaagtcggtgtcactaccaagcggaagcgccgctgcggctggctggacataccgctgctgaagtacacctcgctggtcaacggctacacgtgcatctgtctgaccaagctggatattctcgacacgctgccggagatcaaggtggccgtggcctacaagaagcccaatggcgagaagcttgaccacttccccggcaccattgccgagctcggaaacatcgaggtggagtacgccgtgctgcctggctggcagacatccactgaggaggtgcgcaacttcaaggagctgccggagaatgcccagagctacgtccggtttctggagagcgagctgagtgtgcccgtgcgctgggtgggcgttggaaagggccgtgagtccatcatcaatgtgcattaaccagcaaaggcaagggtgccgacgacgtacttatgcctaccagttcgtgtatctgagacggaaacgctttagtagagcccattgggcagaaacggcgcttaaaatatccaaacacaactacagacctaaccacccacaaatacaactaatatttcgactatctacaacatttggacacaaattattagcatattgcttctttaagctatactttctagttttgatgttcacaaattcatttgaagcggtgccgtccggggctcgcaagcatatattatatactataacttcttgtttgatgaggacgtacttagtttttaagatcatcaggtgcagtttcagattttttgtatgcaaagggaagcagatattttttattgtacaataactaaataatgttgttttaatatttaaatacaacagtgtgctctgacttgtgtaattgtgtcgcaaggtaaatacattttaaagtcaaaaagaaaa

SEQ ID NO: 39705 - protein, 447 aa, DROSOPHILA
MSASATNGTHYEQLHQGRTKMYKSKVDVVLGAQWGDEGKGKVVDMLASDVDIVCRCQGGNNAGHTVVANGTEFDFHLLPSGVVNEKCVSVIGNGVVIHLPSLFDEVLKNEAKGLQHLENRLIISDRAHLVFDFHQHVDGMQEAEKGGKSLGTTKKGIGPAYSSKATRNGIRVGELLGDFNLFSEKFKSIVATHVRLFPSINVDVEAELARYKDYADKVRPYVKDTICFLHTALRNGKTILVEGANAAMLDIDFGTYPYVTSSNCSIGGVLTGLGLPPQTIGEVIGVVKAYTTRVGDGPFPTEQLNDIGDLLQTRGFEVGVTTKRKRRCGWLDIPLLKYTSLVNGYTCICLTKLDILDTLPEIKVAVAYKKPNGEKLDHFPGTIAELGNIEVEYAVLPGWQTSTEEVRNFKELPENAQSYVRFLESELSVPVRWVGVGKGRESIINVH

SEQ ID NO: 39706 - DNA, 4837 bp, DROSOPHILA
ttactttgcagagcgaatcatcatgcagctgttcgtccgtggactagagaccatcgaggccctggaggtttcccaggatgccaccattgccggagtcaaggtgagtccccccaatgactgatatacaaataacataacctaattgtgtgttccccatcctcgtccattgtggccatcgcgatcgtagaaccaactggcccagatccatggattcaacgccgaggaattcagcctcgattgcgagggcatcactctggccaacgagactcccgtgaccgccctgagctcctttgagctggacctcaacattcccatgctgggaggtaaggtgcacggttctctggcccgtgccggcaaggtcaagggacagacgcccaaggtggagaagcaggagaagaagaagaagaagaccggacgcgccaagcgcaggatccagtacaaccgccggttcgtcaactttgtgcagggcttcggccgtcgtcgcggccccaacgccaactccacatagaaggattttggatgaacaagtgtctaccttttactccagattgatatgattgttcataaagtaatttcaaacctttaaacaaacggtgttgcgcatttcaaattgttaaatcacggcaagcaattgttggaggaatctcgtaccttgattatttataattaactattagaaatttatagatgtgcggtagtgcgcggagtagtaatcaagtgtaacgttaattatttaaagtgaagccttaaaatgccacacattacgcagctggtgcaatagttttgctaaagttacctgcttaaattcgaccaccgcatatggcgggaaaccagtttactagtagggtaaatgaaatggagctctcaattgatatatttatatttgatagcttatttaaatgtttatatctatatacgattttcatcagcgttgtacatgccagttactgctcattcattacactattccatggcaagagctcttaggattccccagtggtcagttggtgaactgacgccgttttcgactggcccgaaagcgacgataccagaactcgccgcacactattaaaagagccaacgtgaagcccaagagcaggaccagaaagcacccttgcatgtcgtccatgttcaccttgtggttggtaacctggcgctgggcgctcttcccgttgcacttgcccgcgctgggtaagttcatctggtgccagcgctcgatgaagcccatccggaacatgctcttgatgtggcggtttaccaggtgcagatacgcactctgggccggcacaatcatggcaatctgctcgtccacgaagctctccctgcccaaagcaaagtggcactccttctcccgctcgaagtgccgctgaacaatcaactgcagattgatccgccaatcgatgttgatgcgctcgccacgcttcaccgcctcgatgtcctcctcttgggcgctgccgtagattttcgcccgttccaggtagtgtttgaagtcctcccgcgttgtcgactgaacgtaccgctcgaagaaggtgccgtttcgcaatccatactgtacaatgtccttgtggtcctctagttgattcaaatagtccacgcccggttgaaatttggggaacgtgaggaaggccacaaggttgccgcaataggtggtcaccagcacgataaccacgatccaccaaaagccgaccactaggcgcccactgtctgctgtgggcaagtacatgcctcctgttcacgataagagaatattaaatattcgattttgctgttcaaagtaatccatctttcacaccatataatgtttcattttgtatagtagtcttatataggtatgataaactaatgcactcaccctgttgtaacaaagccccgaatatataccaaaaacagctcttaactgtggacaggcccacgattcgcatctccttcagaggagctaggcgattaatggcgtacagcgtgggagcagtcagcagaatgatgcccattaggcagaaccaagtctccacggtgaagggtgccgtgaacaagtaaatgcgggacacctcatccggcttgcgggtgatgaaggagtacttctgcacactgatgggctgggtataattgaagggcttttggtcgggatcctcaacggtggctgccacggcagcgatgaaaaactgattgccctgcaccatctccaccactcgatagggtatacgaaaggtcatggaaccaactagctcgtcctgcgaaaattggatttctcaaggagtttcaaaaaatgtgaggatatacccacgctttcatttccgcccgctgatgtgctgagtgaatcttcttccttccatgcggaggcttcgtgaaggtagtagctgaagtttagggcgcgactcagctccttgacgatctccataacaatgcccttgtgctccacgatgaccccattgctgttcttggtaaggatttgccagggtggattctgcgagcgatttgaaccaataataagaactatattcctggctcaaaaactcacgtgcacggtcagaatgtccatggttatgttgcggaagtggtgctcgatgtgcggaaaggcgagctcctggcagacgaatcccagcacgggtgtccaatagccaatgttgatgaactcaaaatttcggttcttagcgtcgcgttggggagctgctctaagatattgatatcaagttattctaatttcggaatataaatcggactgacttgagcgaaacttgcgattctcctggcttttgccccaggtaatggccgtctccacgcgccatctcgcgcagctggagcacttggcattggtcttcaggaattcctgatccacataagaataaaataataagaataagagcagcatatttgttaactacaatatacattttaaatggagctacctactcgactatcagatacccgtttcgattggcaaggaaaacaataaaatcaaaaataatattcttacattacgggtatcataatttcttaaaactggtttcatttaaagcagatatgtgtacataccttcatgtactccagaatctcggcctgcttttcctgcttggtaaagcggatggcctcccattcctcatcggagatctcaccatatatggactcctcctcgacggtaattttggaaatagcgttgaccagagcgagactaatttccgagatcgtgcagtttagcgagtcctggcagttgggatccgtttcgttgagggcgaaggctatgttggctccctcgtccaggtttatggtcacagtgccggcatcgaagtcccgagccaccatgtccagcacgaaaatcatccactgattgcccacgtgaaacatgttcagggtctcggctatttcgatgatgtcctcgtgaaaggcagatatgaccaggaactgctggcgcatctcctcgtgctttttgggagcgaattgagacagagcttggcgcagagcaactcgcttctgttggcccctcagggagtcgttgatctcgtaaaggatcagggagattggggtgatgtggttggttatactttcgtgcacaatcgattttaccagaagtgcgttctcctccactgtcggaattaaatattgataacaaattaaaatttaaagaaataatataaagggtatttgagacgtccaactgattcgaagctctacccacatatggtttgatccacaaaaacaacggcattgattcggcattccacagtcttcgggtggagacgtgtttctttcaagctacgaatagcaagttctaaaaactacaacagtatagtgaaagttaaacacaaagtgtaaagtgcagtttgcacaactaacaattattgactatagtaattatttactaaaataaataattattccatattgttctggtaattgttatatgtggacttagaacaatgaatcaaaacgacatacgttctcagcgacaatgtgaacaagacgagcgccggctctctttacaacgcaacaatgcatacttttctttcgtctcaccgcaaatcggtgatcgagcaccctcaccttcaactaactcgaaacttttgccctcagcgaacgacagaccgcgttcttgctctccctctctgcctgcttcggctcacaagtcgtggagcgaagagaccgcctctcctaccccgctcctctcgcagcgccaaacgaccgtcccgggtaactgtaacactgcaataaccgagtgcagtgacctcactggcaactgccacaacatcaacttcgtcagcggcccaactaattattcgctgtgccagctgtaaataattcagcagcacttgaccgtttgcaacaacaataattgcaccgtaaagaagaatcaaaacaaaagcagaagtcgatttcgactgtgcagactggcatggatcgctacatccaaatcaagagaaagctcagccctcaaaacaataagggcaggaacaacccaaaatcaatcgaaccaacaacggcaatgaaaactctgcagtaaataattcaaaccgatatgctatcttggctgattcttgcgaccgaacaacccaacgaaaaaacggtaggggaaccaaaaaagaccaggcctccaccaattttcataccgagaacaaagtacaaatgcacttgtaataaactcgttgctttgattggtgacagcaagttccacattatcccacttaaaaaaggaaatattcatggaaataaaactacagatccaaacagaagcagaccaccgtattagtgactaaatacctaaatgattgctggtaaaaactactacacataccaattaaaaagttgcaaagggctcaggtagtacttaagggcattgaagcaacag

SEQ ID NO: 39707 - DNA, 2245 bp, DROSOPHILA
tcaataattgttagttgtgcaaactgcactttacactttgtgtttaactttcactatactgttgtagtttttagaacttgctattcgtagcttgaaagaaacacgtctccacccgaagactgtggaatgccgaatcaatgccgttgtttttgtggatcaaaccatattggaggagaacgcacttctggtaaaatcgattgtgcacgaaagtataaccaaccacatcaccccaatctccctgatcctttacgagatcaacgactccctgaggggccaacagaagcgagttgctctgcgccaagctctgtctcaattcgctcccaaaaagcacgaggagatgcgccagcagttcctggtcatatctgcctttcacgaggacatcatcgaaatagccgagaccctgaacatgtttcacgtgggcaatcagtggatgattttcgtgctggacatggtggctcgggacttcgatgccggcactgtgaccataaacctggacgagggagccaacatagccttcgccctcaacgaaacggatcccaactgccaggactcgctaaactgcacgatctcggaaattagtctcgctctggtcaacgctatttccaaaattaccgtcgaggaggagtccatatatggtgagatctccgatgaggaatgggaggccatccgctttaccaagcaggaaaagcaggccgagattctggagtacatgaaggaattcctgaagaccaatgccaagtgctccagctgcgcgagatggcgcgtggagacggccattacctggggcaaaagccaggagaatcgcaaagcagctccccaacgcgacgctaagaaccgaaattttgagttcatcaacattggctattggacacccgtgctgggattcgtctgccaggagctcgcctttccgcacatcgagcaccacttccgcaacataaccatggacattctgaccgtgcacaatccaccctggcaaatccttaccaagaacagcaatggggtcatcgtggagcacaagggcattgttatggagatcgtcaaggagctgagtcgcgccctaaacttcagctactaccttcacgaagcctccgcatggaaggaagaagattcactcagcacatcagcgggcggaaatgaaagcgacgagctagttggttccatgacctttcgtataccctatcgagtggtggagatggtgcagggcaatcagtttttcatcgctgccgtggcagccaccgttgaggatcccgaccaaaagcccttcaattatacccagcccatcagtgtgcagaagtactccttcatcacccgcaagccggatgaggtgtcccgcatttacttgttcacggcacccttcaccgtggagacttggttctgcctaatgggcatcattctgctgactgctcccacgctgtacgccattaatcgcctagctcctctgaaggagatgcgaatcgtgggcctgtccacagttaagagctgtttttggtatatattcggggctttgttacaacagggaggcatgtacttgcccacagcagacagtgggcgcctagtggtcggcttttggtggatcgtggttatcgtgctggtgaccacctattgcggcaaccttgtggccttcctcacgttccccaaatttcaaccgggcgtggactatttgaatcaactagaggaccacaaggacattgtacagtatggattgcgaaacggcaccttcttcgagcggtacgttcagtcgacaacgcgggaggacttcaaacactacctggaacgggcgaaaatctacggcagcgcccaagaggaggacatcgaggcggtgaagcgtggcgagcgcatcaacatcgattggcggatcaatctgcagttgattgttcagcggcacttcgagcgggagaaggagtgccactttgctttgggcagggagagcttcgtggacgagcagattgccatgattgtgccggcccagagtgcgtatctgcacctggtaaaccgccacatcaagagcatgttccggatgggcttcatcgagcgctggcaccagatgaacttacccagcgcgggcaagtgcaacgggaagagcgcccagcgccaggttaccaaccacaaggtgaacatggacgacatgcaagggtgctttctggtcctgctcttgggcttcacgttggctcttttaatagtgtgcggcgagttctggtatcgtcgctttcgggccagtcgaaaacggcgtcagttcaccaactga

SEQ ID NO: 39708 - protein, 635 aa, DROSOPHILA
MRQQFLVISAFHEDIIEIAETLNMFHVGNQWMIFVLDMVARDFDAGTVTINLDEGANIAFALNETDPNCQDSLNCTISEISLALVNAISKITVEEESIYGEISDEEWEAIRFTKQEKQAEILEYMKEFLKTNAKCSSCARWRVETAITWGKSQENRKAAPQRDAKNRNFEFINIGYWTPVLGFVCQELAFPHIEHHFRNITMDILTVHNPPWQILTKNSNGVIVEHKGIVMEIVKELSRALNFSYYLHEASAWKEEDSLSTSAGGNESDELVGSMTFRIPYRVVEMVQGNQFFIAAVAATVEDPDQKPFNYTQPISVQKYSFITRKPDEVSRIYLFTAPFTVETWFCLMGIILLTAPTLYAINRLAPLKEMRIVGLSTVKSCFWYIFGALLQQGGMYLPTADSGRLVVGFWWIVVIVLVTTYCGNLVAFLTFPKFQPGVDYLNQLEDHKDIVQYGLRNGTFFERYVQSTTREDFKHYLERAKIYGSAQEEDIEAVKRGERINIDWRINLQLIVQRHFEREKECHFALGRESFVDEQIAMIVPAQSAYLHLVNRHIKSMFRMGFIERWHQMNLPSAGKCNGKSAQRQVTNHKVNMDDMQGCFLVLLLGFTLALLIVCGEFWYRRFRASRKRRQFTN

SEQ ID NO: 39709 - DNA, 2534 bp, DROSOPHILA
cccatagactacaatctaacaacctccacgttcgctgatgataccgcgatactcagtcgctcgaaatgcccaataaaagccacggcactcctatcccgacacttaacatctgtagaacgatggcttgcctgactggagaatttcaataaatgttcaaaaatgcaagcaggttacctttaccttaaacaaacaaacatgcccaccactggtcttgaataacatatgcattccacaagccgacgaggtaacatatctgggagttcatctggacaggcggctcacttggcgcaaacatatagaagccaaatcgaaacatcttaaacttaaagcaaggaacctccactggctcataaatgctcgctctccacttagtctggagttcaaagctcttctatacaactccgtcttaaaacctatctggacttatggctccgagctgtggggcaacgcatccagaagtaacatagacattattcagcgagcacagtcaagaattctgagaattatcactggagcgccgtggtaccttcgaaacgaaaacatacacagagacctaaaaatcaaattagtaatcgaagtaatagctgagaaaaaaacgaagtataacgaaaagctgaccacccatacaaatcccctcgcaagaaaactaatccgagtatgcagtcaaagccggctgcaccgcaacgacctcccagcccagcaataaacttattagggcattaatgaaaaaaaaaaaactatcactaagtgaaagttaattaagttagattaagatttgaacacttattgttagtctcttaacacaaagggaagattcaataaataataaaaattaaaaaaaaaaaaaaaaaaaacaaaaacaacggcggtcttccaatttagaatctgctggaccttggcatccagaataagttgggggaattcatcgccgttctcaacgatgggtacctacaaatcgatctagcttagggtttaaagttgcctagaatcaaaagtcctctcataccattagagctctatttaggggcagcctgggacagtcggaatccgtaatggcgatcagtagaattgaagtttcctgagtgttcttgtaaaagttccatgtattctcgcaatccgtaacagttatggcagccaaaaaatctatgattttgttacatttaatacaaatcccaatccttacattcgtttcgaacctcacccttcttcaatcgcactgcattccagctaaaatattttacgtttatgccaccgttccttagattctcccgtattacgtcgctcaggattttctcgaaatgagccaatatattctcgccatgaaccgtcatatactcgtgatccaccacaacggctgcacagccaataaatcgtttaatttgatggttaatccgtaaaatccgaactcacccagcgatgcattggcgctcaggaaggacgaaaagtcattggcctcagtgggtaccaggatagagagctgcagtccagccaggagcagaaggcaagccgaaggccgcatttcgccaggattcatcgaacacgactgagcaagtggaacccctcgaagctacgaggatacctcgctgataacagctaacccaattaaaaccatacccactactggatttccggtgagcgtgtgcaggttccatgaaaaattgattggggagaaagtggaaaagtctggtgattgacggtttgcggttaggcgtcgataggatattcacatctaatgccaaatcgagtgcaggtgttcatcgagggatatcatttttgttaacttgttttatttaattgtaagtgtttgtaagtattttatgaaagtgttgttctcagattggcctgtatgagcggtaattacattttacaatcttatatcttaggggaactgtcagaagattgggtaattgggggggaaacaggagaaagttgcgttcatggatctaagatagaattacaactcacttaggttagatctactggctaaatgcgttgaatatatatcgtcttcggttgtgtaaattgtgtccggcttcttagggttaccagttcactgatcctgtcgtctgggttatatccatgtctataaataatttagctacaattacgactataggtcaattcccaaaaatgctttcaaatataaatgcaatacgatttcgatttgttgcaagtgttggttcgtggttcctccagtgtatagtttatgtatatggttattacgagtaagttacgaaagggagtataacctgtataaatatatatttatatttatatattcattatatatgcctcagtgtacatacatatatacatatgtatatatgtatatatatgtagctcgaatctatattaatatctggttccacgccgccttcaaactggtgcaaactttcattggtggctccggtatgctaaactccactccactaaactccacaactttgggatgattgggatgtcgaatattgactatttcgtctattgatcttgatatttgctccatcgaattgcacattcccagctctgctctc

SEQ ID NO: 39710 - DNA, 420 bp, DROSOPHILA
atgaatcctggcgaaatgcggccttcggcttgccttctgctcctggctggactgcagctctctatcctggtacccactgaggccaatgacttttcgtccttcctgagcgccaatgcatcgctggccgttgtggtggatcacgagtatatgacggttcatggcgagaatatattggctcatttcgagaaaatcctgagcgacgtaatacgggagaatctaaggaacggtggcataaacgtaaaatattttagctggaatgcagtgcgattgaagaaggattttttggctgccataactgttacggattgcgagaatacatggaacttttacaagaacactcaggaaacttcaattctactgatcgccattacggattccgactgtcccaggctgcccctaaatagagctctaatggtatga

SEQ ID NO: 39711 - protein, 139 aa, DROSOPHILA
MNPGEMRPSACLLLLAGLQLSILVPTEANDFSSFLSANASLAVVVDHEYMTVHGENILAHFEKILSDVIRENLRNGGINVKYFSWNAVRLKKDFLAAITVTDCENTWNFYKNTQETSILLIAITDSDCPRLPLNRALMV

SEQ ID NO: 39712 - DNA, 3212 bp, DROSOPHILA
actggcgaagagaaaatcaacaatcagttagtttctaggatatggggcttggtgtttccttaaaaggtgttaggagtatttgctcgcaccggttgggaatatttcccttatattgtctaactaggtaagtaataaatacatctaggcgtggggtttattcaatacaatttgatacactttggtaataagtatgatataatcagctaacagctatcgaccattactttatctaaaacaaactcaaagaggtggcaaggtcaagccaaatcaaacggttatcaatttgtcattagtcatctgctttggagtatctttggttacttcacatatatatgtatgtatgtatatttcatgttccttgctctatatttatgtgtataatactaggctcagtttgttgttgtaagtggtacatacaaattacacagagtttggtttgattctcaatttgatttccgttcatcatctttgagcgcatcgttcactattttatcagtaaatatcttgtgttttgcattttgtatttttgtaggtataacactgtattcatctcaaaagttcattaaaataaatgccttttagtttgtttgctggcacttcagtgccgaagtgtttgtatctgataatgtagtgtaaatagttccttgtttagttggtggtgggtggtggggtctgggctcagttagtagttggttagttagttgattagtttgtcttggcttgcctttgagtgttggctaaaagaagggccgaaagaggtttgaggaacccgctccactggcggaggagttttgaagaagctattcggaaagctctaaatcatttcggaatctcttgaaaattcgcatgcgaaaacagcacatatgcatacacatttcgcaggactctaatcctgggtcctgcgaccgtgtatgctgctgcttgtattggtattgctattagtttttgggccctctcaaatgacactcatgcgacgcctgccatttccagtgccctcggctcagttggcgttggccagtgtctcatggcacacctccatgtagtccggatcgtgcatgatgccctttatcatgtccttcagcattgtgtagcgtggaaatatcggatacatctttgagctgccgtactcttcctgcgtgttcaaatacggattagaataaaatgtgaactttccaccggatgccactcaccttcaacacacggatgaggtgtcgcagtcccagatactttttcagcaagcgatacaagtcgtttattagctgcgtattctcgtgttcgatttgcgcagttgtcatatctacgagtacatttatcttaaatagttttctcttttcattggacaggaggctgacttcacttacgttccaatcgctccatccgctcccgccgctctgccgcctcctctgccaggcgggcggaggtcttgactccctcgccggacttctgggtcttctccatgatcgagcaggcccgcatcacgtaagagggcaccgtctcctgcttctcctgccgcgggatgtccaccagtgtccagtactgggtctccaggcggatgacttcctgtggttggtattatatatatagcattagcttcttaaacggagggttaatgacaccctttttactgaccttaatcatcagcttgagcatgggatagcgctgaaagatgttgcgctggctcttcgagtcgccgtacttgttcatgaggttgatcagggctttcttggcggtctcgtaggactcctccaggcgaaggcgcaaggatcgcaggcgctcgttcgtctcgatcacctcgtcccgcgtcattccactgggcgccccctcgtccttcacatcctgcacgattcggcgcacactctgcgtgaacttgcccacgaagtttgtggttgctgaatggcgaaaaaaattgtataaattaagtgataaaacaaaatacgtaaatatatagtagttaattgtacggaaattgcacgaaacactgtcattcataatcggaatttcagtagacacgcgcattaacccttaattaatctgcgattcatgcggaaattgttcggctatggaaaagtcaaactattatgccatgatgaaatcgcatcgtacgcgccacatttgattaaaaatagatttttgtcactaatttaattttttccttgggcttctggcttcggcgagaatcgaacccacgtcgcaaaactttttggtggtgcatacagcagatcgcgctaaccggagcaccacgtccactatcataaggcatctgttttatgatcgatttgtttgcgtcgctctttagaggccttgaactcatgtaatttttacaatttacatttgggggatatttgaaaatatgtttaccaaatagaactggatgtttcgttagtttctttcaaggcaaggtaaaaaattgtataaggactattttggaaatcgtcttaatttcaattacttttcttattattattatttcaaaaatgatttatttactttaactgcaaaattttgtatataaaattgtttccttattaaatataatatgatttataaaacgtaaacgtacgtatttgaaccaataattaaaataataattttttaacgaaagaatttatataaatagtattttattaaaccacgtggagcttgtgtatgacagaactaattcaagtctcgattattttaaaattaaaacttatgattatgtagtaacgaaaagtagtaagaatccatagcgtttaatgaacattttcaagtaacgacaaaattcaaaaaattgttgacttccaatggcgtcataaaacctcttgcaaaattttaatttaaaagaaacattaaagtgtgttcatttgcatttcggtttttattggtcgatgggtctacattttcacgacgtccattatggcaacgaatgggaaaactccagcctcaattgagagccgtttaatgagcatttcgtcgagatggcgaaaagtgcaattagcattcgtcattgtcagtctgtttctgcgtccgtaaagtcatgcaaaacgtgacatatctcagtacagaaggggctcgttgatggctgattctggtggtgacttgaaacgcggcgaattagtcggcgttacatctatatggatttggatgcacattctaattggaaacccggccatctgtggattcagacagaggcgtgcccttatgcggaaagtgcactgtcagtttccagctgt

SEQ ID NO: 39713 - DNA, 723 bp, DROSOPHILA
atgcaccaccaaaaagttttgcgaccaaccacaaacttcgtgggcaagttcacgcagagtgtgcgccgaatcgtgcaggatgtgaaggacgagggggcgcccagtggaatgacgcgggacgaggtgatcgagacgaacgagcgcctgcgatccttgcgccttcgcctggaggagtcctacgagaccgccaagaaagccctgatcaacctcatgaacaagtacggcgactcgaagagccagcgcaacatctttcagcgctatcccatgctcaagctgatgattaaggaagtcatccgcctggagacccagtactggacactggtggacatcccgcggcaggagaagcaggagacggtgccctcttacgtgatgcgggcctgctcgatcatggagaagacccagaagtccggcgagggagtcaagacctccgcccgcctggcagaggaggcggcagagcggcgggagcggatggagcgattggaacatatgacaactgcgcaaatcgaacacgagaatacgcagctaataaacgacttgtatcgcttgctgaaaaagtatctgggactgcgacacctcatccgtgtgttgaaggaagagtacggcagctcaaagatgtatccgatatttccacgctacacaatgctgaaggacatgataaagggcatcatgcacgatccggactacatggaggtgtgccatgagacactggccaacgccaactga

SEQ ID NO: 39714 - protein, 240 aa, DROSOPHILA
MHHQKVLRPTTNFVGKFTQSVRRIVQDVKDEGAPSGMTRDEVIETNERLRSLRLRLEESYETAKKALINLMNKYGDSKSQRNIFQRYPMLKLMIKEVIRLETQYWTLVDIPRQEKQETVPSYVMRACSIMEKTQKSGEGVKTSARLAEEAAERRERMERLEHMTTAQIEHENTQLINDLYRLLKKYLGLRHLIRVLKEEYGSSKMYPIFPRYTMLKDMIKGIMHDPDYMEVCHETLANAN

SEQ ID NO: 39715 - DNA, 3199 bp, DROSOPHILA
tcggctttgccagtggggctggcccaaattattaaaggatattctgtattgaactaaccaaattagcgattttttatttatggttcgtcggtatatgtgtaaaaaaaagacattttcaattaaagcagttaaggcaaccaattaaagttaattatttctcttatgcctttttgtcttttgaaaggggagggatgcccgttttttgcttatttgttttccaattgacttaaatgttttattactttacacttcattgaagatggattgcataaatttaggattaattgtttactacctagtaagcaattgcatttctagaaactaatttccgtgcaattggtggtcgcaatcgaaggttttcacctcccttccattcatttatttcttttctatcgccagctgtagtccttttccccaacacctctcgagaaaaggtcctagataacggtacaaagcaggacagcgacagcttgacaacaaatctccgctgagttaatttgccagcctaatgtcatttcccgtggtattcaggaacccaatcgcaggacgtaaggcgattacgcagagccacgcccaacgcccccttttcgaattttgttcagctgaatggatccgtttcttaagtattttttgagggcatccgtgatgggcttacgtttggcaggaattaagtccacggcacttggtcgctactagtcttaacctttttgcaggaaaattcgcaacttatttatatgattggggtgaggaaacttaatgaaactcaaacttttcggaagtatctctctttgttctttttaaaatattatagtttgcctttttacgattcaaattattaaactgcatcattgtattctagatactttataagttaagtaaaccatttaaagatcctaaaactcattgagtagagttgaaaacaatttaaacaaccataatgatcttaaagtccaaatgtagtgaatttcaaagtgatttgcggtttttcttagtgcatggactacttaccgcttccgctgtcgtaggatctagtggtggagccactggtattagagcgctttatctcgcgtcgccccattttgcttgcggtcggctgcaggtactccgggttctgaggctggtgtgtctggtgattgggcggctgctgatcggtatccctggacacgtggcacgtggcaaggagcgcgcaggccgtggaggcagccgctctggcaacagccgagctgtactgaccactgactgtggtgcaggggggctgctgctgctgctgctgctgctgctggtgcggatgctggtggtggtggtgctgctgcaagttcagggacggcgtggagactgcggtgcgtccgctgtggtgcaacgacgcctggacaggagcggtgggcgggaactcaaagtagttggcctgcagatgattggccagcaaattgatggccggtttcgtggccaagccgcttgagttttccgcgtggctggtgtgactggagctgctgctgcgcctgtgctggtggttctggtactgcgggtggtgcggcagtggatggtgatgtggatgcggatacggatgctgggaattagaattggaatggggcggagtgctgctgctgctgctggcgggattcacttggtgcggcgtgggcggcggtgggggacaggcgttgttgatgctgctgctgctggcggaggatgatttgcgcagtgatgatggtctcaaccctttgacagggtacaatgggtactatcgtccggcaacgcgtacccaatcgcggtggtcactgttgtaccaaatacctgaaaaatgtcaatatatttgttacaattattctgtatgttgaaatttggttgctgtaagaaatgcaccgcattcagtattttgaataataatatgtatgtataataatcaaatcgattaaattttatataaatgtagattaatatttttttcttccataaaacttaagattactgatttctggtaagcgtaatcccctacaatttcatatagatcaatatacgaccacccccaaaaagatgtggtgaactgtgctacgtaatcgctattgtgtcccattgataagcggacattaactgcatgtacacacaaaagcacacacaagtgtagcgggatttggggcaaagtgcacttaaagccaattccagtgtcgacgcgtgtcctgcatgacaacgcagattgcgcatacgccccgttaatgtccgccattagcaacgccatttgggacagctcggccatcgtcggcgtcaattttgccaaatatttggcacatgaaatcattttgcgctaataaaattttacgccccttgggcggtcagtccattgatttcctgtaaaacgccaggacacaaaaactgaccacacactcgccgttgggcgccacatacccagccactacaaaaacaaccgcacagtaatcgcctctaatggccgggcattaagattcacagagaaaggccattaatatctatgtctgggcggcaagtgtcaaggattagtcgatgtttgacaatcaaaattgattaagtcgcgccgacaattgaaaatttaatgaagcgaagtcatgaaggagcccttctagttccaagaaaaactaattaggtccgggaagtatggggaaatacatttgtttacccagttggaaactgatttttgcgctcttaagggctcactttacttttcctcgcaagtcaaactcgacaaatcatcgaacaggcaatgcaataatacccagacatcggcaatagaatcagtgcatattgaattagatgctgcaatcgagggggccatccacatcgttgcctggcgacagttcaacaggttgcgccaggttgtgccaagttgccgatggtaaaatcaattgattaactggaagcgcatcaaatcgagtcagcgacaatacatgtgggccaggcaaatagaattgcagctgcatcggtgcgatgcactattgaattatggccggccagccagctacagctagtttgccagccagtcaggcagcctgcaagtcccaggtggcaaatcagcactcgcaaataaggcagatgctcgctcaaagacaactcgatccgacccgagccaaatgcaatttaagttaatgggattctcggaaaggagtccgccctcctcctggtcagcaccagctggtgtttccaactctgcacttggccccgcacacacaaa

SEQ ID NO: 39716 - DNA, 801 bp, DROSOPHILA
atgcgcaatctgcgttgtcatgcaggacacgcgtcgacactggaattggctttaagtgcactttgccccaaatcccgctacacttggttgagaccatcatcactgcgcaaatcatcctccgccagcagcagcagcatcaacaacgcctgtcccccaccgccgcccacgccgcaccaagtgaatcccgccagcagcagcagcagcactccgccccattccaattctaattcccagcatccgtatccgcatccacatcaccatccactgccgcaccacccgcagtaccagaaccaccagcacaggcgcagcagcagctccagtcacaccagccacgcggaaaactcaagcggcttggccacgaaaccggccatcaatttgctggccaatcatctgcaggccaactactttgagttcccgcccaccgctcctgtccaggcgtcgttgcaccacagcggacgcaccgcagtctccacgccgtccctgaacttgcagcagcaccaccaccaccagcatccgcaccagcagcagcagcagcagcagcagcagcccccctgcaccacagtcagtggtcagtacagctcggctgttgccagagcggctgcctccacggcctgcgcgctccttgccacgtgccacgtgtccagggataccgatcagcagccgcccaatcaccagacacaccagcctcagaacccggagtacctgcagccgaccgcaagcaaaatggggcgacgcgagataaagcgctctaataccagtggctccaccactagatcctacgacagcggaagcggtaagtag

SEQ ID NO: 39717 - protein, 266 aa, DROSOPHILA
MRNLRCHAGHASTLELALSALCPKSRYTWLRPSSLRKSSSASSSSINNACPPPPPTPHQVNPASSSSSTPPHSNSNSQHPYPHPHHHPLPHHPQYQNHQHRRSSSSSHTSHAENSSGLATKPAINLLANHLQANYFEFPPTAPVQASLHHSGRTAVSTPSLNLQQHHHHQHPHQQQQQQQQQPPCTTVSGQYSSAVARAAASTACALLATCHVSRDTDQQPPNHQTHQPQNPEYLQPTASKMGRREIKRSNTSGSTTRSYDSGSGK

SEQ ID NO: 39718 - DNA, 4282 bp, DROSOPHILA
atttatttatttattatatatatatatatatatatatattaatattataaaaatttaagagttagtagctgatcgcatttctgatagttgaggaactcgactgtagcgttttctcttgtttcaatttgcctttttttaaatatctacaccgttactacatattttttacatgacacagtagcgccatctgtgcacttatcagtgttggatagcagcggcgacttcgattaagcaatcgattatttgttgcatatgttgtttacggcaattgtttatatttatttactgctggtgaagtgattattcgtgatggattttgacagtcccgaggagaaggagtttcccgggctgtacgcctccgaggcggcggacgctaagtcgaggaagagcaaggaggagagcgactgtgagtggagcgcaaagatgtgggcgtaagctgggaaaaaatcaatgggctcaccttgcctttacagttagtgaggatcacgaccatagcaagaaggacttgttgattggccggcgcaaggacaagaaggaaaagggcaaggatcgaggatacgccgctctggagggcgagagctcgccggaggaggagctggacaccaagtgggtgcaggtcagctgacccagagacaagtaatattttttcttttacttccagaagtccatccaagtcgaaaaagtcaaagacctttaagttcaccagctccaagagcaaggagaagcgggaaaagtcgcgggacaagtctgaaaaagactcgaagcacgcagaggaggagccttccgtctcccacaaggtcaaggagaaagagcgggataaggagaaggaccgtgatgagcccaagaagaaggacaaggaggagaagcgcaaggaaaaggacaagaaggctgacaagaaggacaaaaaggataagaagagcaagcagctgtcgcagcagcaggacgacgtctccgccgcggaggaagtgctggcacttgggtatcccgtctttggggtgtccgttagcttggcgaccgaacgatcccgctgccacgacggcgtggacattcccctggttgtgcgcgactgcatcgacttcctgcaggatcacctgaagtgtgagcagatctacaagattgagcccatcaagacgcgtctgatgcacttcaagcggttgtacaacaaccgggagcacgactccgccgttgatgagctcaacctgcctaccgcctgcagtctgctgaagctcttcctgcgcgaactgccggagccactgctgaccaccgatctggtggcccgctttgaggaggtagcctctcatccgaaggtaaccacgcagcaggcagagctgcagcagctgcttgaacaattgcccaagtgcaatcgcaccctcttggcgtgggtgctgctccacttcgacgcggtgatccagcaggaaagacacaataagctcaacgctcagtcgctggctatgctgctcagtccgacgctccagatgtctcaccgactaatggtggccctactctgccactgcaacaacttgttcgcggacgtccagctgataaagtgagcaaacaccggctagccggataacagtggtgggaaatatccaagtacctttgtgttggtaaaagagaagtccacatttaacaactatagttaaatcacaagaacgaatcgaagtcatagctctgaagttaactactaaactgttagttttagtaaactgttagtttccatatttatctaatgatataaattgtttttttatatgtataataggtacttataagaacccagataattcccaccactgttggcagttgataagattgctgctataaaaatcgccagatttagtcgtttattttgcaaccgacgatgagcacattaccccgtaaacagaagcgctttccacgtttcgccagttttctaatcaggcagaatggcacacatttaaacaaagttatcataatactaaattgtcatctcttaggtatgtgccccctttaacatcgaccagcccaaagcttccggatacgccggaggacatccagacggagttgcgcaagcaggacagcctcctgtcccagatccacagcgagatgaacgccgggttcattaccaagaaacgcgaggaacagctgtgggaagtgcagcgcatcattacccagctgaagcggaaactacgaacttttgagaagaaacaggaaaagactgcggaggaagtagacaacagcagcagtgctccgcccgctgtagccagtgaagataccactgactccaaaccagctggaactccagccgtatctacgaacaacagtatttcccaggaagagccaaaaaccgatacactaactccgaaagatgctcctaacgattttactattgatcccagcactggctttattttgctccccaaatcaaatccgcaccgcgaaaatttgctgcggctccaaattgaatatgacgagctaatggaatggcagaacgaactaaaagcacgtatcgtcgccgagcgcaacgaagtctataggctcaagcagctgtacgagcagcagtcaataaacagtcaaatggcctccttggcctcgggatctcaggctcccccagaatccgactatgagcggataatcgagcactatacacgggagaatgcgctgctggagcacaagaagaatatgctgggcatggaactaaaggaggaacgacgggcctgtattgctctacaagttgagctgcggctccagcagttttaatgtattaattcgattaatgtattacttggatgggtcaatttgagggatataactaagttcctattccggaaacttaatggtcacatttccaaagaaacataaaaggtctactaggcaatcataggaggtttcttagattcgtagaagacaattctatgtcacatatctaaaatattcaaatgaataaacttgtaaagtttttgataattcatttatctgcaaacgtagtcactgttctaaacagtgtcctttgtgaattgcaatatatgagaattttcagttcagcttttaaggagataaaatactgctaaaacataaaacggattcctcatgcctaaagtcagtttattgtttatttggaaatgagctagtttcagacttgacccaccgaaatatatgtatgtatatagggttaccaattttaaatctcaatgtctacttgcgatcaaatgctttgttcaaactataattactgttaaacggcgcaaagccccaaagaaatcttgttagacaactttactgctttcaacaattaaatgagaaaacaaactcaaaattcccttttctgtactgaactattgcatcgaaatatgtctcctcgaagaattttgtaaatgccggtaaagtagctgcgtttgtgtgtgccgacaatcaagatccgattttctaaatcggtctgatgacttaattccaatccgagaaatacagggcacagattagaagatgtttagacgacggattggctgttcgctggggtgaaacggaaatgacatcatctcatattacgtcttgtcaacattgtgatggtcaaggaaccgaggtgggctttgcgtgttacgattactttatttaatatttattattaataattttagaatacattatcattatgcattacgttcggggcgtgttttctgtattccgctgaagtacaacttaaaaatatcacacacaaataccacgggggaaagatgagtcctccggaatgccaaaccgcgtcaactcgctcccctccatgattaagttatttccgctggactacagatcaatggatccatagctctacggacactccttgtcgctgattttttgaaagtctaaggaagagcacggaaagggattttaattaataatcagttgtggataaaataaaaaaaaatgtatggtagtaatgtgggttaattcccttgcacttacttgcattctggagacaattttccgtcttcatcacgcacagattgcgataggtcttggtggagcccttgtcgtccgcagcgcaaatggatcggtactcctgcgtgtcgcactccatgacgcacttggtgctgggatcgggcagaccgaggcactggaccagcgagagggcaagcagcgcgactataaatagatggaggcatcagacccaattagttaggcaggaggcgtgcgaaagaaccactgcccgccaaccgggcaacccgcatacaaagtgccctgatcagcccatcgcccatgatatcacccacaatcacatccccaccacatcgcccatatccgcccatcg

SEQ ID NO: 39719 - DNA, 2495 bp, DROSOPHILA
tcgattatttgttgcatatgttgtttacggcaattgtttatatttatttactgctggtgaagtgattattcgtgatggattttgacagtcccgaggagaaggagtttcccgggctgtacgcctccgaggcggcggacgctaagtcgaggaagagcaaggaggagagcgactttagtgaggatcacgaccatagcaagaaggacttgttgattggccggcgcaaggacaagaaggaaaagggcaaggatcgaggatacgccgctctggagggcgagagctcgccggaggaggagctggacaccaaaagtccatccaagtcgaaaaagtcaaagacctttaagttcaccagctccaagagcaaggagaagcgggaaaagtcgcgggacaagtctgaaaaagactcgaagcacgcagaggaggagccttccgtctcccacaaggtcaaggagaaagagcgggataaggagaaggaccgtgatgagcccaagaagaaggacaaggaggagaagcgcaaggaaaaggacaagaaggctgacaagaaggacaaaaaggataagaagagcaagcagctgtcgcagcagcaggacgacgtctccgccgcggaggaagtgctggcacttgggtatcccgtctttggggtgtccgttagcttggcgaccgaacgatcccgctgccacgacggcgtggacattcccctggttgtgcgcgactgcatcgacttcctgcaggatcacctgaagtgtgagcagatctacaagattgagcccatcaagacgcgtctgatgcacttcaagcggttgtacaacaaccgggagcacgactccgccgttgatgagctcaacctgcctaccgcctgcagtctgctgaagctcttcctgcgcgaactgccggagccactgctgaccaccgatctggtggcccgctttgaggaggtagcctctcatccgaaggtaaccacgcagcaggcagagctgcagcagctgcttgaacaattgcccaagtgcaatcgcaccctcttggcgtgggtgctgctccacttcgacgcggtgatccagcaggaaagacacaataagctcaacgctcagtcgctggctatgctgctcagtccgacgctccagatgtctcaccgactaatggtggccctactctgccactgcaacaacttgttcgcggacgtccagctgataaagtatgtgccccctttaacatcgaccagcccaaagcttccggatacgccggaggacatccagacggagttgcgcaagcaggacagcctcctgtcccagatccacagcgagatgaacgccgggttcattaccaagaaacgcgaggaacagctgtgggaagtgcagcgcatcattacccagctgaagcggaaactacgaacttttgagaagaaacaggaaaagactgcggaggaagtagacaacagcagcagtgctccgcccgctgtagccagtgaagataccactgactccaaaccagctggaactccagccgtatctacgaacaacagtatttcccaggaagagccaaaaaccgatacactaactccgaaagatgctcctaacgattttactattgatcccagcactggctttattttgctccccaaatcaaatccgcaccgcgaaaatttgctgcggctccaaattgaatatgacgagctaatggaatggcagaacgaactaaaagcacgtatcgtcgccgagcgcaacgaagtctataggctcaagcagctgtacgagcagcagtcaataaacagtcaaatggcctccttggcctcgggatctcaggctcccccagaatccgactatgagcggataatcgagcactatacacgggagaatgcgctgctggagcacaagaagaatatgctgggcatggaactaaaggaggaacgacgggcctgtattgctctacaagttgagctgcggctccagcagttttaatgtattaattcgattaatgtattacttggatgggtcaatttgagggatataactaagttcctattccggaaacttaatggtcacatttccaaagaaacataaaaggtctactaggcaatcataggaggtttcttagattcgtagaagacaattctatgtcacatatctaaaatattcaaatgaataaacttgtaaagtttttgataattcatttatctgcaaacgtagtcactgttctaaacagtgtcctttgtgaattgcaatatatgagaattttcagttcagcttttaaggagataaaatactgctaaaacataaaacggattcctcatgcctaaagtcagtttattgtttatttggaaatgagctagtttcagacttgacccaccgaaatatatgtatgtatatagggttaccaattttaaatctcaatgtctacttgcgatcaaatgctttgttcaaactataattactgttaaacggcgcaaagccccaaagaaatcttgttagacaactttactgctttcaacaattaaatgagaa

SEQ ID NO: 39720 - protein, 625 aa, DROSOPHILA
MDFDSPEEKEFPGLYASEAADAKSRKSKEESDFSEDHDHSKKDLLIGRRKDKKEKGKDRGYAALEGESSPEEELDTKSPSKSKKSKTFKFTSSKSKEKREKSRDKSEKDSKHAEEEPSVSHKVKEKERDKEKDRDEPKKKDKEEKRKEKDKKADKKDKKDKKSKQLSQQQDDVSAAEEVLALGYPVFGVSVSLATERSRCHDGVDIPLVVRDCIDFLQDHLKCEQIYKIEPIKTRLMHFKRLYNNREHDSAVDELNLPTACSLLKLFLRELPEPLLTTDLVARFEEVASHPKVTTQQAELQQLLEQLPKCNRTLLAWVLLHFDAVIQQERHNKLNAQSLAMLLSPTLQMSHRLMVALLCHCNNLFADVQLIKYVPPLTSTSPKLPDTPEDIQTELRKQDSLLSQIHSEMNAGFITKKREEQLWEVQRIITQLKRKLRTFEKKQEKTAEEVDNSSSAPPAVASEDTTDSKPAGTPAVSTNNSISQEEPKTDTLTPKDAPNDFTIDPSTGFILLPKSNPHRENLLRLQIEYDELMEWQNELKARIVAERNEVYRLKQLYEQQSINSQMASLASGSQAPPESDYERIIEHYTRENALLEHKKNMLGMELKEERRACIALQVELRLQQF

SEQ ID NO: 39721 - DNA, 2251 bp, DROSOPHILA
tattccggaaacttaatggtcacatttccaaagaaacataaaaggtctactaggcaatcataggaggtttcttagattcgtagaagacaattctatgtcacatatctaaaatattcaaatgaataaacttgtaaagtttttgataattcatttatctgcaaacgtagtcactgttctaaacagtgtcctttgtgaattgcaatatatgagaattttcagttcagcttttaaggagataaaatactgctaaaacataaaacggattcctcatgcctaaagtcagtttattgtttatttggaaatgagctagtttcagacttgacccaccgaaatatatgtatgtatatagggttaccaattttaaatctcaatgtctacttgcgatcaaatgctttgttcaaactataattactgttaaacggcgcaaagccccaaagaaatcttgttagacaactttactgctttcaacaattaaatgagaaaacaaactcaaaattcccttttctgtactgaactattgcatcgaaatatgtctcctcgaagaattttgtaaatgccggtaaagtagctgcgtttgtgtgtgccgacaatcaagatccgattttctaaatcggtctgatgacttaattccaatccgagaaatacagggcacagattagaagatgtttagacgacggattggctgttcgctggggtgaaacggaaatgacatcatctcatattacgtcttgtcaacattgtgatggtcaaggaaccgaggtgggctttgcgtgttacgattactttatttaatatttattattaataattttagaatacattatcattatgcattacgttcggggcgtgttttctgtattccgctgaagtacaacttaaaaatatcacacacaaataccacgggggaaagatgagtcctccggaatgccaaaccgcgtcaactcgctcccctccatgattaagttatttccgctggactacagatcaatggatccatagctctacggacactccttgtcgctgattttttgaaagtctaaggaagagcacggaaagggattttaattaataatcagttgtggataaaataaaaaaaaatgtatggtagtaatgtgggttaattcccttgcacttacttgcattctggagacaattttccgtcttcatcacgcacagattgcgataggtcttggtggagcccttgtcgtccgcagcgcaaatggatcggtactcctgcgtgtcgcactccatgacgcacttggtgctgggatcgggcagaccgaggcactggaccagcgagagggcaagcagcgcgactataaatagatggaggcatcagacccaattagttaggcaggaggcgtgcgaaagaaccactgcccgccaaccgggcaacccgcatacaaagtgccctgatcagcccatcgcccatgatatcacccacaatcacatccccaccacatcgcccatatccgcccatcgattctccgcgacgccagagcgtctggcaatgccaacgaatcggagtgcctgactttcctatgggaggaggggcgattgacgtaccctggaattagcgctgcatacccaattagccatgctggcacgcaacaaaaccaagtccccactacccaactgcgttgctggggtgtctaacccaatgactcaatcgaagtatgaaattttccattcataggtttgcgattgcatatgaatgaagttcattgggcctgtgcaaaatacccttcattgtattccgaaatcattttctttatgtaagctatgttagttttagtgtcctttcacccgatttagcagtttagggtctccactttgtgggtcatttgcaagactcggaagcgttatgaagatacatttatttatgctgataaatatgagttaagttaataaatgaaaaactattgaattgtatacaatttaatatattttcgggaaaacccctaatatagtactttgaagaattaatgaatgcgatttaaatgttttcaaggagagtcgctcagttatgcaattgaaattgatttatttattttttattgataagaatgctttaaatgttaaaccctgtgccaaatgaattgtatatacactagtttgacctcgcatttttggcacacataaaaattaaatctaaagcttaccaaattttcttagaaagggtcgtaaatatgtttatttaacataaaaatctttggaatttcttcaaattaaacagaaatgaacccccagg

SEQ ID NO: 39722 - DNA, 151 bp, DROSOPHILA
atggagtgcgacacgcaggagtaccgatccatttgcgctgcggacgacaagggctccaccaagacctatcgcaatctgtgcgtgatgaagacggaaaattgtctccagaatgcaaactttcaaaaaatcagcgacaaggagtgtccgtaga

SEQ ID NO: 39723 - protein, 49 aa, DROSOPHILA
MECDTQEYRSICAADDKGSTKTYRNLCVMKTENCLQNANFQKISDKECP

SEQ ID NO: 39724 - DNA, 3366 bp, DROSOPHILA
tctaccaggcactttccgtcaccgaagtggcattttttcaccttggcagctgtggagaagatggtcttgtttagccggttcaatcaaggacatttgattcaaaaacccacgcaacttctggcactgcagtccaccgaacagctgaattgttataatcacgtaggccaggaaatgcatctgacagcgaaataaactcgaatactccacaagtaacgcttaagcactcagtagaccgatacactagcatagccgatgccaactactcggtgattaaatcggatttgttgtagtggcggaatatcataaggaaatctaagcagcgcccattatcataacgtgttcccaaacagcccatatagctatacactgactgaaaaaattaattactttaaaagtgtacagtttgtaatatactaaagtggatgtacaaatattctactcagtgtttaaatacatttaattaattgctctaatttgcacccgtttcgatctcaccgcttagaacgagatctcaactgaaaagcttccgattcctaagctttcaccacacctgagcaagattttcaatcgatcgcatttgcaacagatttcaagaaacattcagttttacaattacgaaatccggttcgagatggatccaatactcctcaaaattgttactaatacgttcgttaacgatcacggaaagatcactgttcttcattatgctgaatgcaactgaaaaccaaataaatacctataaaactgtgctgtgtaacaagaaaagattacttatatgccgatctatgataatacgaggactaagcatatcctttgttgtcgacgttaagaaaaaacttagcagcaaacccaacgtttttttatatcaagccgaaaaattaagatatggatctggatgtggtcatagtgatgttcccaataccatagaacctttgctcactcacattctaaggcaaggtgacgattccattgctaaagtgtatagccgtccagtggtttcctatagatccccgctttcctcacctttcaatcccagtagctgttgaaaatgtaaattcgttggatcacgtttacaagttctgtaaagtcttacgtaattcatcggcttaagctaggaaatccactattgcgagttatgccaagctgaattgcatttttttcaatggcaaatcttaaagtcaaacgatggattttaaagctatgttatagctttaacaagttttagaccattacatcataaaacgtttatattattatagttaaatgagaggtattatctgcatgatggtatcgttttctcaagttccgcaagaaagatacataaacaaagatcaaaataattcaatgaaatgaatacattgaattgaatactcttagtgaggtccaaagaataatattaataaaatattatacttgcatattaagccgtcctccacaacaaattaactaagctcgactttacatatttgaagaacagtattaatcatataacatttaaccatttctcataactgtttttaaatcaaatatgtgttgtactttcagtccctatacaaatcgtcatatggtaacttattagctactcgctggagaatcgactcgaccaactgatccaccgcagaggtgatacccctgcgaaggttatgccaaatttccagccactttgtgttggccacaacgttcatggcatcgctcatttcaggattgttgaaaagattttccaagttcaagtgcatgctgacaaggaaacgttttgttagaaatcatttggaaataagtttgaactgcgaaattacccctgcacatccagcaagcacttgaccttggatattccggcatatagcttgccatcgtctcggagatcctccagaactcgcactttgcaacgaacgcggcattctctgatctccaccttggcttgacctttgccatgaatgggcatagtcagcaaactgcccctcatctcgtaagttccattgagtttcagcaatggaatccagccactcaactcgaggacccgaggcaaatccgcatcgaatccctttgcctccgtcactgtggagtctgcgaatccgattacggttaggttagggaatttcaaatcaaaagtagatgacccatctggttccaaccgactaacgacgacatcctcgaatccaatggagtccagagcaaccaatccaatggagggcagacccttcggatacaagcgcagaatcctggtgactgtttccgctatgcagatggaatcgccagccctgcatttctcgatctcaggagctgcaagttgtacaagtttcaacaatccatttatgtatcctaggaatatcctttctcttacgcaactgtcccaaacttggggccatccacaggcagcaaacgaatacgattagcctcatttcgatttgatttagtgataattaatgagtggcttgcgactaactattcgcttttataggccattaagcatcgtcagacaattgccggttacatgcaaatgcaaatcagtcaataatcacttcgatgaatgggatatattagatacccacgcccacgccctgacacctgacacctaacactttgtagcttgagcgatgcaatgatcaactcattaaccttttggggcagtcattttcactttcagtcaactaatcggtcattacactgcttttaattacaacaacataacagccacttgatgcagtctatgacataagtccctaaaatataatttcagtgttttccgattcatgtaacttttaacgaaaatagatgctctttacagcttaaatcttttaaacttaaatataaaggccagtggaacatgtgtttcctaatataataaaaatctttatttatagcgatttttgtagacaacaattttaaaaatattttttgcaactatctaggagatgatggactcctctggacctttagtttacattaaaaagtgcagatttaaattgggagttcttaggttaaacagtacaaaataaatacaaagtacaaagtataattttaaaacatttgataaataattactcacatacgttcaatgtagagacatacaattatatcattttacagacaaattgaaatacgattagacaattgaagtggttcgatttacactcagttaatttcacagccttattattagacttttaaactatttgctttaattaaaagtgatttcgattagtgataatttagacgatttcatggattttctattttgtctcttcgcgcttctcagtaagtagagtttatgaaccgtttttggtacgcttttcaattagaatttagttattgtgttacactgatcccaggtcctctccgagaacctcttatataagtatacccgaa

SEQ ID NO: 39725 - DNA, 630 bp, DROSOPHILA
atggccccaagtttgggacagttgcctcctgagatcgagaaatgcagggctggcgattccatctgcatagcggaaacagtcaccaggattctgcgcttgtatccgaagggtctgccctccattggattggttgctctggactccattggattcgaggatgtcgtcgttaactccacagtgacggaggcaaagggattcgatgcggatttgcctcgggtcctcgagttgagtggctggattccattgctgaaactcaatggaacttacgagatgaggggcagtttgctgactatgcccattcatggcaaaggtcaagccaaggtggagatcagagaatgccgcgttcgttgcaaagtgcgagttctggaggatctccgagacgatggcaagctatatgccggaatatccaaggtcaagtgcttgctggatgtgcagggcatgcacttgaacttggaaaatcttttcaacaatcctgaaatgagcgatgccatgaacgttgtggccaacacaaagtggctggaaatttggcataaccttcgcaggggtatcacctctgcggtggatcagttggtcgagtcgattctccagcgactactgggattgaaaggtgaggaaagcggggatctatag

SEQ ID NO: 39726 - protein, 209 aa, DROSOPHILA
MAPSLGQLPPEIEKCRAGDSICIAETVTRILRLYPKGLPSIGLVALDSIGFEDVVVNSTVTEAKGFDADLPRVLELSGWIPLLKLNGTYEMRGSLLTMPIHGKGQAKVEIRECRVRCKVRVLEDLRDDGKLYAGISKVKCLLDVQGMHLNLENLFNNPEMSDAMNVVANTKWLEIWHNLRRGITSAVDQLVESILQRLLGLKGEESGDL

SEQ ID NO: 39727 - DNA, 2861 bp, DROSOPHILA
gacacgaagctggtcgagatgcggcactactccgtgcaggtggtgccggttggcttaaagcgggcggtccagaaaatcgtcaaaggaacggtacccaatctgggcaagtgcaacgaagtcgtggactttgtgaccaagtaggaaatgaccgtttgttctcattccatcaaataatcataatattgattttcagggacggctatgcctccgaatcagaggccgaagatgatgagcaatcacatgtggtgctggcacagactcttaaaagcaagggcaacttggaggacaaaaagagctccataaagctacacgagatcggacctcgactaaccatgcagctcatcaaaatagaagagggccttctgacgggcgaagtactgtatcacgaccatgtggtcaagacagaggacgaaaaggaaaccctgcgcaagctggtcgaaaagaagcgaaagcagaaggagcagcgcaagaaggagcaggcagagaaccgtgcccgcaacttgaagcttaagaaggatgaaaaatgggctgccaagagggcggcagagggacggactgacagcgatcccgaggatgatgcagagtactacaaggaggaagtcggcgaggaaccagacgaaggtgagttgtgctacatgctgcgtagaatataaactaatgtttcctttgcagaactgttcaaaatggaagcgaagtcctcccgaaagcggcctagtttgggcggcggaatgaaatacaagaacaagcgcgctaaactggataccaaggacaagaatgacaaatctgagcgcacggacaagtacgatcgtaaggacaagttcgatcgcaaggacaagaaggacaaattcgaccccaagaacaggagagccaagttcgatcccaaaaacaagcgcgccaagtttgaccacagaaagagtagaaaatcaaagtagtacatttaacataagctattttataaagaccattggttaacacgacatcgcaatgttatcaatgggaactaactaaacatacgttgcaccacctccttgtaatgggccttgctatccttccagctaacagcgatgttgtcgcgcagcttgctgaactctcgcttctcctcgtagttgggcattcgctcgatggtggcttgcgccttggcgaactccttcaggtgatagtaggcgagtgcacgccggtagatgctcttctcgctgggactctcctccgtctccacaaactgcgtgtggtagattacatgctcatagcgtttctcctgcagcaaacaggcggccaggttggtctgtatctgaataaagagctcctccaccgcctggccgttgatgccattggtctttttggtcagtttatcgaagggtttgtaggtgatcagcaactttgcggcacgcacaaagtaatcaaaggcgaatttcgggaacgtcttaaaggtggccacgccgctttccttgagacgtagtgccacctcatagatctctgcagcgcttagcttctccacctgagtgttcttcacaattttctccagcttcagttcaaattctattcgttcgccggttttggtcgtgatgctacaggctgccgtttcacccggcacaaattgctgcagcagcagctccaagtagcagtccactgcggtcaggctggtgcccatttccaggctgtgcttttgaggatacgtagcggactcatcgctgaccaaatatttgctaggtcgtcctcccaagttggtggctttcttgttgacactgaattccaccgtactgattatcgtgggcttgtccatttcggtgaattggaggccaattaccttcttggccagaccacggttcttgtcctcccactctgtgcccacgtaccagtccattttggaatatttgcaaattgggagcttcgaaatttagcagtaagcaaagtttgcgatttggcgatgtgaccagaaaaccgtcaaaaatgtacctatcgcgaatttcacaaaaaatactttgttctcactagttcataaatgtaatgcatggactacgcatctatttgcaaaacaagtgagttagtcgactatcagataccttgtacgcagctggtgggagtgcgaaggagaaattgggcaacaatatgaaaattttcagagcttaggaaatacaataatatgcggttatataatattataaaaccgcccaattcaattctagtggttttaatctttctattccaaaacaaaaatgttagcatgcatttattgtaactcatggctctttagtaaaactttttattacccatttccgcttcactaaatttaatcaattgggtgagtccatttaagataaacaattttctagcatttatacacaatttattattatttctagttatgttacatatactaagcccattcgcgcactagcagttgctcggccatcgtttaacatgctgccctctttccactaacagttttacataatccggagtatgtgttcatatttttgttaacacttttgttaaagtaaaacgttatgtacatacattagttaacgcggaagcggcgtgatcgtgatccagatcaagtatagcattggaacttaacttacaaatagcaatacacatagtaaaatatccattgatcacaatcaacgaacggcatacatacatataattatattgttgaaattgcctgggaatttgctattttctacatacatcggtatatctaaaacctatagttagcatagatcaatcaatcaaagaatcggttatatattgcagtacaatggatccattttcaattcatcttcgctcgaaagatgtgcaacttccagttgcagacactgctgcgtgtccttctttacacaattaacttttcaattaaaata

SEQ ID NO: 39728 - DNA, 861 bp, DROSOPHILA
atggactggtacgtgggcacagagtgggaggacaagaaccgtggtctggccaagaaggtaattggcctccaattcaccgaaatggacaagcccacgataatcagtacggtggaattcagtgtcaacaagaaagccaccaacttgggaggacgacctagcaaatatttggtcagcgatgagtccgctacgtatcctcaaaagcacagcctggaaatgggcaccagcctgaccgcagtggactgctacttggagctgctgctgcagcaatttgtgccgggtgaaacggcagcctgtagcatcacgaccaaaaccggcgaacgaatagaatttgaactgaagctggagaaaattgtgaagaacactcaggtggagaagctaagcgctgcagagatctatgaggtggcactacgtctcaaggaaagcggcgtggccacctttaagacgttcccgaaattcgcctttgattactttgtgcgtgccgcaaagttgctgatcacctacaaacccttcgataaactgaccaaaaagaccaatggcatcaacggccaggcggtggaggagctctttattcagatacagaccaacctggccgcctgtttgctgcaggagaaacgctatgagcatgtaatctaccacacgcagtttgtggagacggaggagagtcccagcgagaagagcatctaccggcgtgcactcgcctactatcacctgaaggagttcgccaaggcgcaagccaccatcgagcgaatgcccaactacgaggagaagcgagagttcagcaagctgcgcgacaacatcgctgttagctggaaggatagcaaggcccattacaaggaggtggtgcaacgtatgtttagttag

SEQ ID NO: 39729 - protein, 286 aa, DROSOPHILA
MDWYVGTEWEDKNRGLAKKVIGLQFTEMDKPTIISTVEFSVNKKATNLGGRPSKYLVSDESATYPQKHSLEMGTSLTAVDCYLELLLQQFVPGETAACSITTKTGERIEFELKLEKIVKNTQVEKLSAAEIYEVALRLKESGVATFKTFPKFAFDYFVRAAKLLITYKPFDKLTKKTNGINGQAVEELFIQIQTNLAACLLQEKRYEHVIYHTQFVETEESPSEKSIYRRALAYYHLKEFAKAQATIERMPNYEEKREFSKLRDNIAVSWKDSKAHYKEVVQRMFS

SEQ ID NO: 39730 - DNA, 2667 bp, DROSOPHILA
cacagtgcaactaactcaaatcctcaggatggcgtgccaaaaccaaaatgccgccaacttcttgagcaatggcaagaaaattgtgggggtggctctcaattacatgtaactcagtgtcatagtaatcttgggtctgcatgggtaatccacgaatactttcttccgtcgcagggacgttgtgctggccaggaacgttcccgtgcccaaggagccgctcgtcttcctcaagcccacatcttcgtacctccaggagggtcagcccattgtggtgagttctacagagaattaattaagataacattaagatagtagcaagatagcaaaagtccataaactggagagtaaacgaatggaaattgaaaatccctcttgtgatttaaactttgtattcccccagttaccaaaagtctttaccaaggtggcatatgaagtggaactaggcgtggtgattggaaagccctgcaagaacgtatccaaggcagatgccatgagctatgtggcaggatactgcctggctttggatctaactgcccagtgcaatttggtaagaagatggatgcactcaatcaagagccattgttgtaatcaataatcaatttcagggaccagctcgggcggccggtcatccgtggaccttgggcaagggatttgatacttctacgcccgtgtcccagtttatacccatcgaaaaagtgacggacccgcacaacttgccgctttggctcaccgtcaatggagaccttaagcaaaacgggtgcactgcagacttaatattcaaggtgcccgacatcatttcctacgtgtccaagtacatgaccctggaggccaacgatctgatccttaccggaacgcccaatggtgccgatgcgttcaaggcaggcgatgtaattcagtgtggaatggccgatctcgctaaattgaccttccaagtggaggctgaataaaagtgaagaatttaattttgatgctatattcggatataattggatatgtgcaatggctatttcttcttattactggccacatcatcacaggcaaccaaatatttccacatcgctgtgcaatcgctggtgtttttccatttgctggtcgggcagttgatgtagaccttttccatgacgcaggccagcaaggtggcaggatagaagtcgcagtcgcccttcttgggcatccattggaactcctgcacccgcttcctagctatttagaattaaccattattaagtagaaaaaaactttcgtatgctaactcaccgtagtccgtgcaactattgaggctcttcaacatcagttgcgacatattcggatcgtttttgtagcgttgctgatagctcttctgcaatgcctgggtattaacagtgccattgctcaacaagaatccattggtcctgaaggagcactccgcaatacactgaggattacacgtttcccaagagtaaagccagttttaaaatgatatattttagagcgatacttactgcatgcaaagccactttatccgacttaagattgcgcacttccccattcgaattggttgaattattgcccagcaaggacttgcgacacgaattgatggccttgtcgtttttttgaacatcacagcatgagctcaactgccaaatattcagttgtagtaataaaaacacgattttatttgaagttttcatacaaactttggctgctttgcgtgatcgcagcttgtataattaaaggattttgcacaatagctaaaaactattacaacgaaaagcagattatacacatacatgttgtgcttaaaatttataattaaactggtacgatgggcagctgaacttgagttttaaagccacattttaattaaccgtaatttaaaagttaatgatgcataaatagctcgcctaatgctgtgaaaaaataattgaaatgagaaggcacagaactaaagtgctgttgaacgcatattttcttgttttattacattttagtttagtcagcaacttgcttcattttaatcaaagctaaaagttgtaactaatgaaaacagctacgaaataaagtagatggttttcagcggaaaaattaggtaatgaggtataagaatattcaattatccatctatacccttgtcgccaatagttttagtaacagaagtaatgttttttaataacaggctttcagaaaaatattttttcaccaggaaatcgttttcttatttaaaaaaaacgttgtttcgcgggcaaaggctgtgtgaccagctatcggtaatctggatggaagttttcgtgttattctcaataaaataatatcgaagtgcaaacggccccaacaggttcctaaataaacgtttcctcatttattttatttactttttaaaatatgcgagcttgaaatggaaatataccaaacattatgcactgcagcttatcaaccaatgaatagacttcgctttagacacaagttcctcccgtaaatataataaaccaaaaacgtatttggaaaactaagttttcgaatgttttcaatggactcttttgccatggacaaggatgcgaagttgtacgaaggaaatgctctattccgaaaccagccgtcgtacaaggtgttcaataaatccttcgagcacgtggacgatgcgctgtacacattgctgaacgaagtggagccagatgtactgcgaatggagct

SEQ ID NO: 39731 - DNA, 546 bp, DROSOPHILA
atgaaaacttcaaataaaatcgtgtttttattactacaactgaatatttggcagttgagctcatgctgtgatgttcaaaaaaacgacaaggccatcaattcgtgtcgcaagtccttgctgggcaataattcaaccaattcgaatggggaagtgcgcaatcttaagtcggataaagtggctttgcatgcatgtattgcggagtgctccttcaggaccaatggattcttgttgagcaatggcactgttaatacccaggcattgcagaagagctatcagcaacgctacaaaaacgatccgaatatgtcgcaactgatgttgaagagcctcaatagttgcacggactacgctaggaagcgggtgcaggagttccaatggatgcccaagaagggcgactgcgacttctatcctgccaccttgctggcctgcgtcatggaaaaggtctacatcaactgcccgaccagcaaatggaaaaacaccagcgattgcacagcgatgtggaaatatttggttgcctgtgatgatgtggccagtaataagaagaaatag

SEQ ID NO: 39732 - protein, 181 aa, DROSOPHILA
MKTSNKIVFLLLQLNIWQLSSCCDVQKNDKAINSCRKSLLGNNSTNSNGEVRNLKSDKVALHACIAECSFRTNGFLLSNGTVNTQALQKSYQQRYKNDPNMSQLMLKSLNSCTDYARKRVQEFQWMPKKGDCDFYPATLLACVMEKVYINCPTSKWKNTSDCTAMWKYLVACDDVASNKKK

SEQ ID NO: 39733 - DNA, 2647 bp, DROSOPHILA
aagtagaagtagaagtataagcaagtgataagctaagtcgaaggggcattacgggctctaagaccgtggagagatttaagtttcatgttacagataataaatcttaaatttcgattcagtttacgatggctcgtaaaaggagagaataacagcaaaacaactggataaacggacatcaatgacgctggactcggacttcgactgggacttggaagtggaagtggaattggaagtggatgaggatgtggatgtggatttggactcggttgggttggcgttaagcgtgggcggaggctgacatgcgggcctgtgggtgaccaaacgatcaagtgaggcgctatgcctttgtcccgctggctgaaaaatgacagtggcaaaaacagaagcttctggccaaaactcctcctctgattgtggccagaaattgatataaatgaaagtgcacataaagcgacgggcgtcttattgtccttgcggctatggctagcacaatttgagggacttcagcatcacttgataaatctgttgaccgcgacatttgccgaatttattgcttttttatactttatgggccaggaaacgcagggctgacacatcgattcctggcggccaatcatcaatggtatcaatattcgcggtatcgcggccaacaacattctaaggcaattgaaatgcacataaaatgagaaacatgaaattgattgtaagcagcgcctaatacggacaaggtgagccatagaagcatatgatgatcttgatcttgagacgactgctccactgactctcctacataactgcctaactggctaactgccttactgaccagttttccccgcagctgattgcattgagtggcgctcactttcggttcggtcgcctggtgcaaatccactataaaagccgcactcggagctcaagttgtcaccagttgacaatttgaaatcattagcctagctacctttcctacttcagttatcccgccaaaatccaacgcctcaaaatgttcaaagtagtgagtatcattgtgcagaagaagttgtaaccagtttgaatccaagcatcgtatcattatgatattatatcagtttgctctatagcatttaaaaataaatgcaataaattaagtttatattacaactcatatgagtcacctagtttgttgttaggattggtcttatcttactcagaatgagtaatatatgctttaaagtctgcgacaactaaccaaattcactgtggagtggcagccacctgctgctccgtctaatgccactaatcaggctaattcgtgaactctgatccgccgcagctgttcgtgctcgccgccttcgtcgcctctcaggctatcgcccatcccggcgtggtggccgtggcacccgtggtggcgcacccggcggtggtccacacgcccatcatccatcatggagcccactcggtgcactcgtaaggccattcatgtccaatctgcttatcaccaccgaacaactcacccctttcattttcagccatgttgttcatcatccggcagccgtcaaggtcatcacacccgtcgtccacaagcccgtggtggcggtgcatgctgtcaggccggtggttccattggttccagtgcatcatgccgcccccgccgtcgtcgtgcatcattaagtgcagcgaatacggttcactttcaatacctttcccgctcccgatcccgttcccgatccccaccagacccagaccaatcccttcctgagcaccataaccacgatcccacaataaaagttcatagccacgtaattggagcgagtgttttcaacttacctgtccagggaaacggcaatcaggctgtagaccgaggctgccacggagacaccttgtatgtagggcacaaacttgcacatcagccatccgagcatccaggctgcgagttccagcagttcgcgaaacatgaaagggggaaaagtgcgggaggtgagtaaatattggtcataaacaacgcacaaattatgctgagtaactttcggtcacattgtccttgctggtgtcctagccatacactgaaggaaatgtgagggcctatggcaacaaaaaaagaagaagatgcagatttttctaaaataccccaaggacactttgctcgaaaactttataaatatcctaaccacgaaaatcaaagcaaattaatgtggttaaccgaccgaaggatgcttattgttctcatgggaaatattcgaaatagtagatggtgtatcactttaaatacaaaccgtaagtcatcttgactgcttagctaagaaaagagtgaaaatattataaaactaataattctccgctaagtattataatatatttcatatcttacttttattcttgaataagtacagttttacagctggggatcattgagttctttatagctttactgcttttccccgagtgcactggtagtggttatgctcatggttgtggtgatggtggtggtggtgatagtggtagtcatggacagttgggttcgagatctggttagcgttcaatgcttcttgtcattgccgccgcccacgttcccgtcgttgtttgctgactgagatttatgtgctgcatatcattcataatttggtgacaagtctcagattgcgcccagccatcgtagtgggtggggcagaat

SEQ ID NO: 39734 - DNA, 288 bp, DROSOPHILA
atgttcaaagtactgttcgtgctcgccgccttcgtcgcctctcaggctatcgcccatcccggcgtggtggccgtggcacccgtggtggcgcacccggcggtggtccacacgcccatcatccatcatggagcccactcggtgcactcccatgttgttcatcatccggcagccgtcaaggtcatcacacccgtcgtccacaagcccgtggtggcggtgcatgctgtcaggccggtggttccattggttccagtgcatcatgccgcccccgccgtcgtcgtgcatcattaa

SEQ ID NO: 39735 - protein, 95 aa, DROSOPHILA
MFKVLFVLAAFVASQAIAHPGVVAVAPVVAHPAVVHTPIIHHGAHSVHSHVVHHPAAVKVITPVVHKPVVAVHAVRPVVPLVPVHHAAPAVVVHH

SEQ ID NO: 39736 - DNA, 2174 bp, DROSOPHILA
caatgaaatttggaacgcgttttttgcgaattgtaattgaaacgcattaccgccaaatggtagtcacagagttcggactgtgttcctggctctaatgggcgttggctacagatcgtcggcagctccggcagtttgtatcacataaccacaaacaacgtaggcgatgacagcatcgggaaatggagaccaaaactgagaactacgcacaggagcggaggatggaggatgaggggtaggatatggatacatggtagccgaaagtaggtgaaacagccgctaacgaagaccaactggaggcaccaagacagtatcaatgggcggctatcggacatggtgacgcattggcagccaacacagaaagaaagaaactcacaaagtccaaagtgggtggcactcgacacacgcactgcgttggaggaactaggcgggactcccaggaggaagtgcagctggtcttttagggacaacaatgcgcggttcgatttgtttgcgatttggttaaagcatgtttacggcagccgaagaatgtcttttgtctataaattcagatctttctctgggtggtcaacacccagaaaccagttggaataagttcctttactcagagccatcttaaccaccggtgatccctaagtagagaggcaatctattaagtgcatttaatgacgcttaggtgtttgcccatcggatgcctctgttggaagcccatttgtcatatgcaacgcagatcctccataacggttccattttggcctaagcacatatgccacatgggaattcttgtcattagccgatcgccacaaccacacctgttaatattcataggtatggtcacgtgcaggaaaaataagcgatttgacctaaccaagagacaaaaacgtggactcgtcaaaaatcgatgatcagtgattcagttggacccgcgggacatgaggaagaaccgttgtggcgacgcgatactagcaggtagctatgatcgataagggatcgagcaactagtttaaacggattgcatgacactgccaaaaagattgttgaacgaggaagaggcagtgcgtcttcgcgatccgctgacggcgactctgacggcaatgttggaggtgactgtgatgggcacgacggctccatattggtcataccagaggttgaggatcgtgatggccggcacgttcatcacatgatcgccggttcagatcattttggatttactcttttcaggagcaacattgcttatattcctcaatatttcatgatctgcgttttaaatgcccgagatataaaatgttttcataaccattttcccgaaggaaacgaccagaaaccgaattcggaatatgcatctaacttgaacccacacttattatgagttctctgtcgctcaagtttagctgcttttacacatctttgcttgcaaaactcatcatgcttcgagaggtgacccaattacttcataattgtttgcatccaattgggtctcttgatcttctagccgcatatctcctttctgtggattccaccttggctcccagacaaactacaccactaagcgcctcgaattcgccccaaaaacgagaaagttcattatgtccggcgatcattttcaggctgatcatttccatttcgatttgcgtggcgtcggcggcgtcggtctgcaaattatcctgacacttggctccatccaacatctaacgccatttcagtattgctctctgcccagttcggaattgtttcggattcggtttctaggcactacgagagcctcttgatcatcatccaggcagacagttgcgtgttttccagatttcggtctcgtgttgaagtatatggaaagtggagtggaagagggtggatcgaggcgttattttgatttaaaatacgatgaccgcaattagtagacgtggttcctagcatctgagccttgaaaagcctgcaccgcctggccaaccttcatccctcgattacagtgagagttcatctggattccatttccctgggaatatcgatcgcctggagcggctagtctcaagtggagtatgattgggcacgacaagcactagacagctggaaaaacttccatcctgggagtgcctttcatttctatccagttgcaaattgtgtacacattgcagatctgaaattgcatcgattgcactttaagcgcgagtattaaactt

SEQ ID NO: 39737 - DNA, 174 bp, DROSOPHILA
atgaacgtgccggccatcacgatcctcaacctctggtatgaccaatatggagccgtcgtgcccatcacagtcacctccaacattgccgtcagagtcgccgtcagcggatcgcgaagacgcactgcctcttcctcgttcaacaatctttttggcagtgtcatgcaatccgtttaa

SEQ ID NO: 39738 - protein, 57 aa, DROSOPHILA
MNVPAITILNLWYDQYGAVVPITVTSNIAVRVAVSGSRRRTASSSFNNLFGSVMQSV

SEQ ID NO: 39739 - DNA, 2279 bp, DROSOPHILA
aaagtgagagaatctcctttttattcttgcacccggttcccggtcccgaacagagtacttaatggctatttgtggggccatgtatttttatggccagccacgggctccgtctccgtttttccccccatcttcttcatgggcttttgtacggccacagtgcggttacgtaatttttgtgaattgtgtatgagaaattttcataattgtacattggaatatgcgctggtcgagtgtcactatcgtgtccgcatcccggctaggagcgagctgttcccaattgcctgaatactatttgcgaatcacatttgattagggcttgcccatgcagaaagattcgacatgctcgcaagtagcgattgctgctggcgcgtatgaataatatttggaactatttttagtgaatatttcgaatactcgatgtttttgtgcagggtatgggcgatgtgcacgagacaaacgagctcttcagtgtaaacacaaactttattgataccggaattatagtgtttatggcatttgaatttataatcagcgattgttgatatatgagttaaatatttttggatgtttgtgctgagtagtatcttcggtttatgaatgaaattcaacttagggatcagtcttattatttttaaaaattaaagcaagtttcaaaacgtgttcgctagcaatttattattataaattctatttccaatgtccaagaaaatttattaagctatcgaaaagacaaaatttgaggcgacggaaatttatatgagtataaagagaaccactttatttcacaaattagaaaacatttatattttaaaagtgatttaaaataaatgctttttatgtggaaatcagtcagttgattatatgtactctgattagggtatcctgaatgcgagttcactttaaagttccgactctttgctttccctgccggcataactacatatgtgtgctcatgtctgcccgcggatgctcggccattcttgacatttcgcaaatatttatgattatttgtttggcggacggtttcctgcggcatcgtaacttataaagcgattactcatgcttataattaacgcaccgtgttacccactttgcagagcctcctggcgaggatggggtgcccgaggcgggccaccgaccaccacctcgcatcacgttcagcgagaactccagttccctgatccgctgcatccccaacgaacgggccacgttcttcgtgaagatcgattgctccgaagaggatgagcccgagctgctgcccttcaaattcgagtggtaagtcataaatctgtcgagtgaaaatttatatatatatatatattttccttggcttacctgtgcactcgttcgcgggtgtgtgaatcaccgtccttgctccgcgcggtctgctgtgcataatgccaaaaatttgcgcattaacatatgacttctgcgccaaggagaccgatttgctcaattgagcagaccgagagcacagatccaacaaagagcaaaccagcagcattagatgtttaggtttcccagttttcgtttgttgctctgagtattccgccatgggccacccaaaaactcttgagcggccagttccacatcgacgatcggcgcattaacatatccgttgcccagcgggcggacattaagaattgtagcagcggcggcagtgctatacgaaagttctatatatactcgtacaccactgcgtatacgtactggttcgtggaattcgggggtgtgcacgcgtcgtatacttaataaatcacctacatatcgaaatcaatcaattgtgcgcgagaattcctgagggatatggcacctggttgttggaggtgtccgatccgcaggccgagttctgtaacgaacgtctaattatagcaacattaacaaatcgctggctgtcgcgtccgcggaactttcgtctgccttggatttcgttgttttttgggggggcagtgccatggtatggaatgtcggcgatgtgcgtcaaaaacgtttccatttaatgccctaaaagtgttgaaaatagtttttctcaaacgaaaacgaaaattacataatacctacataggtggagagtgcgatcggatcggattggatcggttctgatgtttggcaatatacgagcgagagcaacagacaaataaataaaccgatactactgggctacacaaaggaaacaagaaacaatttgaaaattctcgaactcggccaaaacgacagcgaaacaacaagttattagcgctcaacatcaaaaacacacgcatcccaaaaataaattggca

SEQ ID NO: 39740 - DNA, 219 bp, DROSOPHILA
atgattatttgtttggcggacggtttcctgcggcatcagcctcctggcgaggatggggtgcccgaggcgggccaccgaccaccacctcgcatcacgttcagcgagaactccagttccctgatccgctgcatccccaacgaacgggccacgttcttcgtgaagatcgattgctccgaagaggatgagcccgagctgctgcccttcaaattcgagtggtaa

SEQ ID NO: 39741 - protein, 72 aa, DROSOPHILA
MIICLADGFLRHQPPGEDGVPEAGHRPPPRITFSENSSSLIRCIPNERATFFVKIDCSEEDEPELLPFKFEW

SEQ ID NO: 39742 - DNA, 2135 bp, DROSOPHILA
tgccattaaaaaatgcacacaaatgtcgaatcctagtggctttttatacgctggctataacgcccacttctgttagccaacttgagtggaattcccaatggaattctatggggcaatcaaagtgggcagctaacccatcgcatcgacaggggtaaatattttaggaaatgatcagaaaaattcaaccccgacatatatggtatatatgcgcatttttttttttttaaccccaaacccgtatgcgtatccctcaatcccaaccaaacaaatcaaagttcctttctttcacttttcccacactttgtttacatttgcaacatattttctcaatttttcttctcgtttttttttttttttgttgtccgttggcgctgttattgttgggccagcaattttgtttgcatacataaatttggaatgaaatcatgtgtcacattagcagcggcatctatgcgccgccatttccatcaggacctccattatttcgcatatatcgatgcgatactgttgatacacagccagccagccatccagtttgattatcatttgtgtggcgcggtctggtgtggtcttgtggccatctaatgtcattttccagcgctcaatttgattacaaatcgaaattaataatgctgcgaatgcatttctcatgtacttgtactctgccctttttttctcggtttttttttgtggctgccaggacattgcttaattaagttcagcaaatgatttttcaattaacactgacgccggggcaaaagaaatggaagcggaatgaaaatatttatatttacacaactcaggaggggcgacgtgcggagaggcaagcataaggcggcttttcctcctcggggtccaggattcaggatccaaggaactggtccacttgcagtccgcccacaaaggaggcaaggaatggaacggaaacggatgcgccgctgtcaatgttggcacaaattgtttgtcacgcagtgcaaataattcgtgctgttgctctggtatgcggtattatgcgcgatttatttctctgtctgtgtggcagcaacaacagcagcaacaacagcaacaggagcagcagcaacagcacaacaaggagcaacacgaagacagcggcggcggcagcagcaacatctgagaacaacagtgccccgcagcaatgccagcacacagcaaatttgatatttgttgatttttccgttttcctacgcatttgacccaacccaggcatttccaaccgccccccccctcctcctccctcagcagcacaattaaagccagaaaaatgtgtaatattagacttaaatggtgaataatgttataagcttcgagggaaatctgtcagcttattaactcaactttacctgggcttcgaaaatgaacaaaaaaaaaaaaaaaggcaagcaaagcacacctctccgcacaacttttaatgcatttttatgaagttttagtagtgaacgctacccccccatggcaggggacttaattttatttacattttgcattttgcgctctaaagtttgccaaagtagttgattggctttgcctgccaccaaattgcaaaataattgccacggcaaagaggcaaccgaggtggctaggtggcaagaacgattgcgaaacaagctaatttcattgaaagtgatgctcgtttgtggcctgccacatgggtggtggtccattacaaacaccacccaacctgcaacttgcaaccagcgcaataaaagcaacaaaacttgctagtgatgacggcaagtttgtgtaatgtaattaattaattacggcgaaacaacgtagttacatgtacagttatggcagcagggaaagtggctggtcggggtcaccacacccacccatccaccagagaaccacaacagagcagcgatattacttcggttttattagccagcacaaaccctttacccccttcgacattccggcacgcgtagttttggtgtctgcccggtgacttaattacaaattatagtgcaattaattctgcgtcctggcattattaggcgcatcgggcgagcgtaacacaaaaccaaaggagcagcgaaaggaatgcccgccgcccgcgatgccgaaaacaccaggaatacctttggtaagtagatgaatattaagtggaatct

SEQ ID NO: 39743 - DNA, 135 bp, DROSOPHILA
atgcggtattatgcgcgatttatttctctgtctgtgtggcagcaacaacagcagcaacaacagcaacaggagcagcagcaacagcacaacaaggagcaacacgaagacagcggcggcggcagcagcaacatctga

SEQ ID NO: 39744 - protein, 44 aa, DROSOPHILA
MRYYARFISLSVWQQQQQQQQQQEQQQQHNKEQHEDSGGGSSNI

SEQ ID NO: 39745 - DNA, 5679 bp, DROSOPHILA
gattcagatatagcccggccgtcggcgcgaacggaagtcaccgatataggatgcactcgcccgcccagtcgcccattttggatgtcaccgagaccgtatcgatgcactccgaactggatgcggaactggagtccaagaacaatccgtcctactccatttccattccccagaatcttcggctaaccggtctgggctttcccggcatgatcggtgccaagagatcgtcggaaactctacccgccttcgagtatatcgcaccaccaagtcacgctctccaggcactggaatttccgctgatggagctcaatcgtgtgggcgtaattggaggcggtatgtttccgggttttgtgcaccgtcgcgtccgcggtgaaaagcgacccattccggaggctcaaaaggatgccaagtactttgagcggcgcaagcgaaacaacgaggcggccaagaggtccagagatgcgcggaaaatccgcgaggataggatagcattccgagcagcgctgctggagcaggagaactccattctgcgggcgcaggtcctggcgctgcgggatgaactgcaaacggtgcgccagctcctcggagccacaacagccggcggcatgttgtccatggccaggcaggtgtgaaccactctgcgggatcagatggaaaagtgtacatatcaatgagggaagctagtgagattatttagtttgatgttaataaatgtttaaaataaatactaaggatattctaataatatatgtatgcatatgcaggtgtcccttaaaaaaatatgttattcagatatataaatattggcccatctatatagagtattttgctagtgctagtactatagttctataaagtcatatatatatcatttatatatcacaaattgtgcaatagaaaccattaaaattgattaaaagtgagtaggactagttcgagtttatttcattttaaaaaatgatttcaacaaacgcatacaaataattagaaaatatttaacaagctagtagtccagagtgcgcgactgcacctttccagtcgagtccaggatgagcagaacctgttcctgtccacaacttcgagcaccggcaatgtccgtcaccttgaggcgtgtgtccatgagctcctccacgggtaactctctgtcgcgatagaaatcgtagtgacgcacagtgccattggtgagggcggaaagctgccagccgtcgctggagaggatcagggcctggacgagatgctggcgcagaccgctgccacttaggagcagctgctggtcaaagaccctcatttcgtaggaacgcctgggtcgctcaatcagctccagagctgtgttgggtcgggcatcgtacgtgggattgtcatccatctgctggtcaaatgatctacgctcgttgagtatgatgttttgaatggcacacgatttgcccgtctcgggatcgggctcatccgtggccggcggaagtcctgttttgggtctctgctgattcctctggcgctgcctctgtcgctgattgcagttgagtatcatcacagatccattggacagacccacggccacatagttctcattggagagcacacacaacgaggtgggaaacaggaaacgactttcgttcacggcgatcctcgcgaagcgttccgtcttcaaactacgcgtgcagcagagcacaaagtttcggttggtgcacacatagatgagctcactgcccgtatcgatgctggtgaagcgcaggccctgcaatccctgtccctggagtgccgtggtcagcgtttgcgtgtcattcagctcacgcagcacatcatcgctgtagatgttgccctggaacagggacttggtcttctcgtacgcactctgatggctcttcaggaggcgtcgctccagatagctcctcagatcacagctgccactctgcagtagcttcacacgcgcccacggcgaactgaactcgttgctgttggtggacgaggcgccctccaccagggtccacatggtcagcaggccggagtcattcagcgaggcgtactgtcaaaggattgcatatataattaattatatgtattcatatagatctttacatagaatttataaatgaatactacaataaaacctacctgaacttccttgtacgtcgtctgcaaaccactagtcgcagctactcctccagcattcaagtgtgatctaaagctgcgcacatccaccacagcgcccagatccatggcatttacctccttgtcctgttgctccggcatgggaaccaccgattgtgtggctgcaaaatgggttaggtggccatccaacttggagcagtagctgtgcgtctcgcgcaaatcccacatagccacactaccatctctcagtccggccaccacgatatcctgggcctgcgcagatagtgccacacggctgacttccgcccaggtggagagcaggcgcaacggctggctgggattggccagtgaccacaccatcagaaggctggcaaagtcctccttatatacattgctgtccgcaggacactcgtgcacggtgaccaccagttgtccatttccggcacttccaaagattcgacgcacaggcagtgcgttcagcagtcccgtctgaagtggtacatttcgaggactattcccctggccgtgggccgtggttttgccctccaaaaccagtcccataagtctgccggccctgtgaagaaacgaattcagtcgctccagatccgtgctcttggccaatctcttttgctgcagttgctgggagcgtgcctgctccaggcgatgcagttgctccaatcgagaaatgctagcttcgtattcatctgcaggttgcttgctccatgtttcatccaactccgcatcgacactgcagctgagaacgaattgcccaccatagtggggtggatgttgggtccagctgctacgactgtgcacctccagcgtctggcactcgccgtccatgtgtggtgactgcgtctgtgtggccacttgactggcattcagcttcccatagctctgcatgaatccctcgtagctgaggggcttcatctcgaacaggtggtagttcagttgatcgaaacgcaatttggccattagctcttcgccgcgacgactgatcacgggatgggaaacgaatcccgagtagccaccatagtacacgttagcctctccactccggggcttctccacgccagtggtgctaatgcccgagtccagttgctctgagttggccatcgagttggtatcaaagctatcatactgattctgcgtggacagactgctcaagggattcctgcgcaaatgcatgtcataatgaccggagtccaatttccgctcttgatccttgtcgcgttggatcacagtgatgggattttgggtgggctccgaatcctcttcctcccgctcctcctccacttccgcctcggaggatgagggctcctgcgcttcatcggattccacctcgtcgggcgtgctggcatcggtttcgaaatccgattcataggattcgaagtcatcggagtagtgatcggattccggttctggctttttggcttcatcgaatttgacttcaaaggccactggctgtttcacaggctctgattccttggcctccacttcgcttctttgcttggcggattcacgcttaaggataaccacttcctcgggatccaaggtgcgtgtataagttctggatcttgccggaacaatacgagcatctcccttggaaggagactgtggcttgtgctccttttgagtctgtgcaacaggggaatattcttttgatgaaggcgtgggcgattccttctcctgctccgcctgtcctctgcgcttttgcggtggcgaggcgaccgtaacactgtgatacgtgtccagaactgcattgggcttcgatttggccacgagcttcgtggtcttggtggtcttggactgcaggggtgggtttgtggtcgtggttgtgtgtctggtggtggcacgcaatgcacctggggacggagtggtcctcttgctcaaggactccctttccttgtttttccccgtggctaatggctttttgctggcggtcgtaggttgcgctgctgttgtggttttcctcgcaattttttcaccttccaagctatccggttgtttggccagtgacctccgctccttcgattcccttgtggtggccggtccacttgttgctggtgatttagtgaccttccttggcacttccgttttgacctgcaattcgaaaagatttttgaaatcataacgtcttgtcggggtgctcagcactatttcttagcattttacaacactgacccaatcttaacatattgtttttttttttgtgtggcgatcggttcgtttattagttttaattgaatgctattccatatgtgctgcgctattaaaatgctaatgtgtgtgctattgggcaataaggctttaattgccattaactcgaaaactaagctgctaatctaactgtgcgacaggtgtaaatgttaaaaagttcgttggtttggtttttgtgagcgagtgaaatgcaaatttgctgtgcaaataagtgaaatcgctgttggctgccaatcaatggaaaggtgtactatatatttgtgcttttgatatatatgtatatattcttcgtttcaagtgcctttctttgggcttacgtttttgctgctggttcgccccgcattttttgacattttagaaggaataaatgctgtttaaagtgcttaattaagctgcgaattaatagaagtaaatgccgtatgccacgtaaatttaatcaatcgtaatgcagctcagttgtgacattttttcctgtttccctggcaaccaaatccttgtacatagcaacaacaaagaggccagcaataacacaatcagctgatccgacagtgctgaaaagggctggcatgtttaaatgcaactggtaggtattattaaaaaatgtttcattaaatttagttatttgtttgcaacgtttgcagtgttatgctttaattaggagcatagagctctgagcttattaaatgcattttaaacttcaacaacttttaattagctaatgttatcgattgcccatccgatatttttctatcgacactagccgctctttttgaaattcaaaaagtccgtttgggtgataaagctcgttttgaagccattgttgttcttaacttaagtttagcgtaatatcacaataaataagattagtgttgagctcgggtctagccaaacggctgacccactacaaataataagcagacaagcaatatccataagttatgactggatttcatggctccactctcgtcgaaattcctgtagtactgggtattggcataccgatcgtagatgtgctccatcacccgcttggcattgtcgcggtgcagctcctggaggcccagtaggccatcggtgtcgtcacggaacaacacattgttccttttatcgaagatgccgtatagggtaaatggacgcgtctcactcttgtactttctaccaaacaactgatccatatcgcgcaaagagttatatatctcattgcgtcgcgtcagcgaagagttgtgcgtcatcaggtggccacgggtggtccaatgcaggtagcagtactcgaagttggagcgcttctcaatgccaccgtatgggcacaacacccggaaatccttgtgatttccaggagtcaaccaatttgaggtg

SEQ ID NO: 39746 - DNA, 3156 bp, DROSOPHILA
atgtcaaaaaatgcggggcgaaccagcagcaaaaacgtcaaaacggaagtgccaaggaaggtcactaaatcaccagcaacaagtggaccggccaccacaagggaatcgaaggagcggaggtcactggccaaacaaccggatagcttggaaggtgaaaaaattgcgaggaaaaccacaacagcagcgcaacctacgaccgccagcaaaaagccattagccacggggaaaaacaaggaaagggagtccttgagcaagaggaccactccgtccccaggtgcattgcgtgccaccaccagacacacaaccacgaccacaaacccacccctgcagtccaagaccaccaagaccacgaagctcgtggccaaatcgaagcccaatgcagttctggacacgtatcacagtgttacggtcgcctcgccaccgcaaaagcgcagaggacaggcggagcaggagaaggaatcgcccacgccttcatcaaaagaatattcccctgttgcacagactcaaaaggagcacaagccacagtctccttccaagggagatgctcgtattgttccggcaagatccagaacttatacacgcaccttggatcccgaggaagtggttatccttaagcgtgaatccgccaagcaaagaagcgaagtggaggccaaggaatcagagcctgtgaaacagccagtggcctttgaagtcaaattcgatgaagccaaaaagccagaaccggaatccgatcactactccgatgacttcgaatcctatgaatcggatttcgaaaccgatgccagcacgcccgacgaggtggaatccgatgaagcgcaggagccctcatcctccgaggcggaagtggaggaggagcgggaggaagaggattcggagcccacccaaaatcccatcactgtgatccaacgcgacaaggatcaagagcggaaattggactccggtcattatgacatgcatttgcgcaggaatcccttgagcagtctgtccacgcagaatcagtatgatagctttgataccaactcgatggccaactcagagcaactggactcgggcattagcaccactggcgtggagaagccccggagtggagaggctaacgtgtactatggtggctactcgggattcgtttcccatcccgtgatcagtcgtcgcggcgaagagctaatggccaaattgcgtttcgatcaactgaactaccacctgttcgagatgaagcccctcagctacgagggattcatgcagagctatgggaagctgaatgccagtcaagtggccacacagacgcagtcaccacacatggacggcgagtgccagacgctggaggtgcacagtcgtagcagctggacccaacatccaccccactatggtgggcaattcgttctcagctgcagtgtcgatgcggagttggatgaaacatggagcaagcaacctgcagatgaatacgaagctagcatttctcgattggagcaactgcatcgcctggagcaggcacgctcccagcaactgcagcaaaagagattggccaagagcacggatctggagcgactgaattcgtttcttcacagggccggcagacttatgggactggttttggagggcaaaaccacggcccacggccaggggaatagtcctcgaaatgtaccacttcagacgggactgctgaacgcactgcctgtgcgtcgaatctttggaagtgccggaaatggacaactggtggtcaccgtgcacgagtgtcctgcggacagcaatgtatataaggaggactttgccagccttctgatggtgtggtcactggccaatcccagccagccgttgcgcctgctctccacctgggcggaagtcagccgtgtggcactatctgcgcaggcccaggatatcgtggtggccggactgagagatggtagtgtggctatgtgggatttgcgcgagacgcacagctactgctccaagttggatggccacctaacccattttgcagccacacaatcggtggttcccatgccggagcaacaggacaaggaggtaaatgccatggatctgggcgctgtggtggatgtgcgcagctttagatcacacttgaatgctggaggagtagctgcgactagtggtttgcagacgacgtacaaggaagttcagtacgcctcgctgaatgactccggcctgctgaccatgtggaccctggtggagggcgcctcgtccaccaacagcaacgagttcagttcgccgtgggcgcgtgtgaagctactgcagagtggcagctgtgatctgaggagctatctggagcgacgcctcctgaagagccatcagagtgcgtacgagaagaccaagtccctgttccagggcaacatctacagcgatgatgtgctgcgtgagctgaatgacacgcaaacgctgaccacggcactccagggacagggattgcagggcctgcgcttcaccagcatcgatacgggcagtgagctcatctatgtgtgcaccaaccgaaactttgtgctctgctgcacgcgtagtttgaagacggaacgcttcgcgaggatcgccgtgaacgaaagtcgtttcctgtttcccacctcgttgtgtgtgctctccaatgagaactatgtggccgtgggtctgtccaatggatctgtgatgatactcaactgcaatcagcgacagaggcagcgccagaggaatcagcagagacccaaaacaggacttccgccggccacggatgagcccgatcccgagacgggcaaatcgtgtgccattcaaaacatcatactcaacgagcgtagatcatttgaccagcagatggatgacaatcccacgtacgatgcccgacccaacacagctctggagctgattgagcgacccaggcgttcctacgaaatgagggtctttgaccagcagctgctcctaagtggcagcggtctgcgccagcatctcgtccaggccctgatcctctccagcgacggctggcagctttccgccctcaccaatggcactgtgcgtcactacgatttctatcgcgacagagagttacccgtggaggagctcatggacacacgcctcaaggtgacggacattgccggtgctcgaagttgtggacaggaacaggttctgctcatcctggactcgactggaaaggtgcagtcgcgcactctggactactag

SEQ ID NO: 39747 - protein, 1051 aa, DROSOPHILA
MSKNAGRTSSKNVKTEVPRKVTKSPATSGPATTRESKERRSLAKQPDSLEGEKIARKTTTAAQPTTASKKPLATGKNKERESLSKRTTPSPGALRATTRHTTTTTNPPLQSKTTKTTKLVAKSKPNAVLDTYHSVTVASPPQKRRGQAEQEKESPTPSSKEYSPVAQTQKEHKPQSPSKGDARIVPARSRTYTRTLDPEEVVILKRESAKQRSEVEAKESEPVKQPVAFEVKFDEAKKPEPESDHYSDDFESYESDFETDASTPDEVESDEAQEPSSSEAEVEEEREEEDSEPTQNPITVIQRDKDQERKLDSGHYDMHLRRNPLSSLSTQNQYDSFDTNSMANSEQLDSGISTTGVEKPRSGEANVYYGGYSGFVSHPVISRRGEELMAKLRFDQLNYHLFEMKPLSYEGFMQSYGKLNASQVATQTQSPHMDGECQTLEVHSRSSWTQHPPHYGGQFVLSCSVDAELDETWSKQPADEYEASISRLEQLHRLEQARSQQLQQKRLAKSTDLERLNSFLHRAGRLMGLVLEGKTTAHGQGNSPRNVPLQTGLLNALPVRRIFGSAGNGQLVVTVHECPADSNVYKEDFASLLMVWSLANPSQPLRLLSTWAEVSRVALSAQAQDIVVAGLRDGSVAMWDLRETHSYCSKLDGHLTHFAATQSVVPMPEQQDKEVNAMDLGAVVDVRSFRSHLNAGGVAATSGLQTTYKEVQYASLNDSGLLTMWTLVEGASSTNSNEFSSPWARVKLLQSGSCDLRSYLERRLLKSHQSAYEKTKSLFQGNIYSDDVLRELNDTQTLTTALQGQGLQGLRFTSIDTGSELIYVCTNRNFVLCCTRSLKTERFARIAVNESRFLFPTSLCVLSNENYVAVGLSNGSVMILNCNQRQRQRQRNQQRPKTGLPPATDEPDPETGKSCAIQNIILNERRSFDQQMDDNPTYDARPNTALELIERPRRSYEMRVFDQQLLLSGSGLRQHLVQALILSSDGWQLSALTNGTVRHYDFYRDRELPVEELMDTRLKVTDIAGARSCGQEQVLLILDSTGKVQSRTLDY

SEQ ID NO: 39748 - DNA, 4332 bp, DROSOPHILA
ttattgtaaggcatatcctcgctctccgagttatcatacttcgagggccgtttgggtcttcttgaagattctcttccattgtactccattggagcatttcgatttcgaacggtagcgttctcccttctaggataggcatcatatggattattggcatcatattcatccgattcaaaatcgtcacaataacaatcctctaaagtatttccatggtttctgtatttgtattcagttcggtaatcttcacgaggtccttcagcatatctagaaggtgaatttctgtgctctcgtttggagtacttgtttggctttcctatagaagtacgatattcaggataattatcactgtagcgattgttatatcttctctgtccatattcattgtaatctgaatcatagtcaggatcttctcttcttggtttcctatacttatcgctttctcttctatagctttttgcggtatcttcataatcatcgttttcccgcgatcgccttcttggtgaggattcactcctatatctccttgctattttttcctcctcgtcattctctttagaataagatcgatcgctatgttttctcgacctggccatattaatttccaaggaatcggcatatggacaagtgtcattattgcatggattatcattatctcttcttttggaacgcggattcgttccattgccatgtctagagtactcattttccccactatttcttgttcgacgttcggattggtatttattttgcctagatgtaaagactccaaatggacacgtttcgtcattgcagatttcatcggatcttcttttggatcttttagtttcttcatttgattttctctttgtcctaaaattatcctcccggccatgactactggatctttctctgggagcctgctgctcttcttcattgtaagtatttctcaaaggactgctcctcctagacttggaggttcgttcattattctcctcgtagtcgcgatttcttgagttccgagctactccttcttctcggtgttttggactaggacattttaaatggggacattccttaggatcacgacgatcatacgcgggacatgccattaactgggagtcatcagtttgaagttggaaaactttttgatttttcgcttcatcggcattgtcttttcttcgtcgtgggggaggtgaatcttcataattggaattatggttattaccaacttcatcatctttacgagatcgcctttttgaaggacgctcctcgttttgatggcgtttattaactgggcaattatcatcctcacatatatatttcttctggtcaggacgatctggaccgtccctgcgagatcgttcctcattttgaatccttccttggttgtaattggaactttcggatccgtaggatcttcttcctaagttggatcgttcaccttgatcattcgatttttgcacggtctttgattgaaaatcctctggcatcgatttagtttgctcagttgggataagattctgtccagattgctcatgcttttctaatgcactagcttttgaagaatatgtcttcattgggtcctgaggtggcggtgctgtggcattgccttttttggctggctgaagcggccgagttgccttttcctgattccaagactttgaaggcggtgccatgggcatctgggatgggttagtagaggcatctggggactgtgcctgtacccacacatctgtgggcgcatcctccgcattgatgcaatacacatgctgtggctccggatacatagatcgtccgtagtcattcaggtaaaccgtttcatcatatggagcgtctggtggagctgatcgagaatagttcctggcattctgatcgacatgatgcggttggtagtagttaccgtgggcgggaggcacagtttgattgcagtaaatgcactggcatccatggatattgcagcgctgaacgtcttgatttacttggttataagtgcagtaacaacagttcggaactggatggctggtgttatagtaagtttgatccgaaatcggttgagtgttgctgtgtcgatcggtggtaggattgtttgcattgttcgacaaagtccgatccctatacttcttctgcaacagcattacgtttaactgatcctcgcctgactggcggcgattcttcgtacagccgcagctttgattccgaacggagtctccatcgtcggagtaactgccgggttgattctgttgcttggccaactggtctagaagtctcccgcacacggcattattatttcgcttccagctgtcgcagcacgacttctgattgtcctcgccgattactttacggaacctgggcttccactctccgcgtttttgggaacatagtctgggacctggccatctatcgctgcgtataccattgccgacggactcgtaaccatcccagttgtcagcaccgacgtacacatcattttgttgcgtttgcgatgaacgcttttctgggttgtctttcgtgggacatgaacatggtttcccagttcgatactgtttgctatcacttttttggaatttatttgactgatcctgttcctgataccgattagacatccttgggttggtactgccgctttctccgccttctaaagagctcttacttccgaattgaggacgactgctttgacctcttagctcgcacgcttcacaaggatcttcgtcttcctctggcttgcaacgaacacagtacgcagtgggataccaccgatcattgccggacgtagatctttcatggtgcacacctaagaactcttcatttggtggctcaggctctagaatcatcttgtagaaggtgtacccgcacctggtttcactgcagctgggacttaaaaaagctagaggcgatatgaatgtgtcctccgaaaaattgggtgggaaatgtccttccttaatgggacagttagcttcctcctgtgtaaaaatagaagataatggttcactattcaatatccagtgcaaaaaccatccactcacctccaagtttcccaagaaatgcaagtcctcgaagtaggagtaccttggactataactataaccctcaatttgactatttcggatggcggccaattccttggagtagtagtgccgcagaccgagcacctgcagctccacctggtcaggagtcaggccgcagttcatccgccgggtgatttgtcgccaggcgtcatccttcgcagaaccactatggaaaccaggtgactttggattccagaggcactcgttcgatcgataaagtcggatgagcttctgcgtcttcttcaatcgctccaaattcaaatacgacgtaatatccttctgtgccatcgtgcccctctgttctccacaatcctttccagcgactcggtgatcaatcttccatagcgttttcctattgaacctacagaggttgtatgcctagtttggagctatatattgcgcccaagccgaaatatttggacaggaaaaacaaaagtgacaataaacaagcaattttgaataatttttgaatgatttttaaacggtatcgcttaattaggaatattatatgccgttaccattttcaagatctgcagggtgtctcatacattcgaagcttttgagagtattaattcagtattattgtgcaattaaatggcgattggtatttagctgggcgagcagaacggtcacactggcgcacagtagcgaaaataatagtcgaataataaaatagttttgagtgcaactaattccgacctactaacgtatgcgagtgcatttagcggctgcacttaatcattccgggcaaaaaagtgcaaaacagtacgacgcggagcagtcagaatcgaggttgcgctccagcgttatcgccatttgaccaattcaacttttgtgtctggtataaccacaaaattttcactgcatcttcttatttgagccgcccccaacccaattttcgcgagtgtgtcggaatcagcagagaatcggaacaaaaggggccaaacggagtaccagaatcggcacaagcaaacagtgaacagcagatagtgcggacgatagcgagtccgttgattatccacgtaaacagtgagctgcatgcgcagaggtcgcgcccagagctgcagaaatccaacaatctccgccagaaagatctatctccgccctgtaagcaatgtccgcggaacgagagattcccgccgaggacagcatcaaagtggtctgccgattccgaccgctgaacgacagcgaagagaaggccggctccaagttcgtggtcaagttccccaacaatgtggaggagaactgcatatccatagcggtatgtgttccagatctatagttttcg

SEQ ID NO: 39749 - DNA, 2091 bp, DROSOPHILA
atggcacagaaggatattacgtcgtatttgaatttggagcgattgaagaagacgcagaagctcatccgactttatcgatcgaacgagtgcctctggaatccaaagtcacctggtttccatagtggttctgcgaaggatgacgcctggcgacaaatcacccggcggatgaactgcggcctgactcctgaccaggtggagctgcaggtgctcggtctgcggcactactactccaaggaattggccgccatccgaaatagtcaaattgagggttatagttatagtccaaggtactcctacttcgaggacttgcatttcttgggaaacttggaggaggaagctaactgtcccattaaggaaggacatttcccacccaatttttcggaggacacattcatatcgcctctagcttttttaagtcccagctgcagtgaaaccaggtgcgggtacaccttctacaagatgattctagagcctgagccaccaaatgaagagttcttaggtgtgcaccatgaaagatctacgtccggcaatgatcggtggtatcccactgcgtactgtgttcgttgcaagccagaggaagacgaagatccttgtgaagcgtgcgagctaagaggtcaaagcagtcgtcctcaattcggaagtaagagctctttagaaggcggagaaagcggcagtaccaacccaaggatgtctaatcggtatcaggaacaggatcagtcaaataaattccaaaaaagtgatagcaaacagtatcgaactgggaaaccatgttcatgtcccacgaaagacaacccagaaaagcgttcatcgcaaacgcaacaaaatgatgtgtacgtcggtgctgacaactgggatggttacgagtccgtcggcaatggtatacgcagcgatagatggccaggtcccagactatgttcccaaaaacgcggagagtggaagcccaggttccgtaaagtaatcggcgaggacaatcagaagtcgtgctgcgacagctggaagcgaaataataatgccgtgtgcgggagacttctagaccagttggccaagcaacagaatcaacccggcagttactccgacgatggagactccgttcggaatcaaagctgcggctgtacgaagaatcgccgccagtcaggcgaggatcagttaaacgtaatgctgttgcagaagaagtatagggatcggactttgtcgaacaatgcaaacaatcctaccaccgatcgacacagcaacactcaaccgatttcggatcaaacttactataacaccagccatccagttccgaactgttgttactgcacttataaccaagtaaatcaagacgttcagcgctgcaatatccatggatgccagtgcatttactgcaatcaaactgtgcctcccgcccacggtaactactaccaaccgcatcatgtcgatcagaatgccaggaactattctcgatcagctccaccagacgctccatatgatgaaacggtttacctgaatgactacggacgatctatgtatccggagccacagcatgtgtattgcatcaatgcggaggatgcgcccacagatgtgtgggtacaggcacagtccccagatgcctctactaacccatcccagatgcccatggcaccgccttcaaagtcttggaatcaggaaaaggcaactcggccgcttcagccagccaaaaaaggcaatgccacagcaccgccacctcaggacccaatgaagacatattcttcaaaagctagtgcattagaaaagcatgagcaatctggacagaatcttatcccaactgagcaaactaaatcgatgccagaggattttcaatcaaagaccgtgcaaaaatcgaatgatcaaggtgaacgatccaacttaggaagaagatcctacggatccgaaagttccaattacaaccaaggaaggattcaaaatgaggaacgatctcgcagggacggtccagatcgtcctgaccagaagaaatatatatgtgaggatgataattgcccagttaataaacgccatcaaaacgaggagcgtccttcaaaaaggcgatctcgtaaagatgatgaagttgtccaaaacaccgagaagaaggagtag

SEQ ID NO: 39750 - protein, 696 aa, DROSOPHILA
MAQKDITSYLNLERLKKTQKLIRLYRSNECLWNPKSPGFHSGSAKDDAWRQITRRMNCGLTPDQVELQVLGLRHYYSKELAAIRNSQIEGYSYSPRYSYFEDLHFLGNLEEEANCPIKEGHFPPNFSEDTFISPLAFLSPSCSETRCGYTFYKMILEPEPPNEEFLGVHHERSTSGNDRWYPTAYCVRCKPEEDEDPCEACELRGQSSRPQFGSKSSLEGGESGSTNPRMSNRYQEQDQSNKFQKSDSKQYRTGKPCSCPTKDNPEKRSSQTQQNDVYVGADNWDGYESVGNGIRSDRWPGPRLCSQKRGEWKPRFRKVIGEDNQKSCCDSWKRNNNAVCGRLLDQLAKQQNQPGSYSDDGDSVRNQSCGCTKNRRQSGEDQLNVMLLQKKYRDRTLSNNANNPTTDRHSNTQPISDQTYYNTSHPVPNCCYCTYNQVNQDVQRCNIHGCQCIYCNQTVPPAHGNYYQPHHVDQNARNYSRSAPPDAPYDETVYLNDYGRSMYPEPQHVYCINAEDAPTDVWVQAQSPDASTNPSQMPMAPPSKSWNQEKATRPLQPAKKGNATAPPPQDPMKTYSSKASALEKHEQSGQNLIPTEQTKSMPEDFQSKTVQKSNDQGERSNLGRRSYGSESSNYNQGRIQNEERSRRDGPDRPDQKKYICEDDNCPVNKRHQNEERPSKRRSRKDDEVVQNTEKKE

SEQ ID NO: 39751 - DNA, 3098 bp, DROSOPHILA
tgggcagtcccaactacaacttgacccagttgccgccagtttctggccaggattacggacagggggctttcttatcgccggaatggcaattcttggatgccgcaggcggaactcaaacggaactaggacccatcatggaggcgcaaggacagcacacccagccgcagaccaaacggcggagtaacagcttcacaggatcggacggtaggaagagcagtccagagcagaccaatctcagtcccacggtccagaaaaggagacgacaggctgccaatgcgcgggaaaggaagcggatgaatggattgaatgcggctttcgagcgcctaagggaagtggtgcccgctccgtccattgaccagaaattgtccaagttcgagactctccagatggcccagtcctacatcctggcgctgtgcgatcttctcaacaacggggacgtggaagtggatgccgctgcatacaccatcttcggcgacagcgatagtggatttggattgagcggaggatccttgtcatagatggatgatactagactaaagttatgtgattttcttcttactgtagattaagttaaatatgtaatgaaataaattgaaatgtttaattgaatgctaaaaataatttcaatttcaaaggcattattcatggaacgcatcgcttgattgtgaaccaagtgttcaatccaaaatgagctactcatctaaccctttctaccaattataaccagcccactactattcacagatccccagattcaattggccatcagatcgtttggctacgcctcaatgatttcaaaaacgatcataaattaattactcaacagttcattgataggcgtacttcaagttttggtctaaccccgaacgattccgaaactgcgaagccaccacagtgggcggtgtagcgtgacacccctgaactcctggccaaaactcctctcattgaataaaaaaggcagctgagtccttcggcttcggttgggtgctgtttttttttttttatgacgagagggcgagtttgtgtgaggacataacagctatggattgatcaccgatgtccttttgggtttcgtaggtggcgtgggtggcacgggcttcacaacggtatcttcgttgggcactgtgatgtgctgcacctccacttcgcccttgctgaaggagtttttcgatggccgaaagccaggatccggcggatgcaggacaataacttctcgattgtgatcgctgaagctcaagtttcgaaagggattgctggtgagcagcagggttctgttctccttcagaatgggagcattagctttgtgggatggacgaagtactggtctccttggccttgaaatcggtctggtcataagaatgcgccgcatccttctgggtggatataatgcttctctttctctggcatctggcttttgaagcacggtgttcctgtggagatgctctttgatgatgcccagcgctgtgctggccagcactggtggaatcctaaaggagcccagtatggaaaggccaccactcgcctgggattgcagaggtggctgggatcgggtcgcggtcgccgaatcgtcccaggacatgctctgaaagccggagcactgccttgggcagtgtagctgcttcacagactcctgtcctggggccttccggtggccatcgggtgttccaatcggcttcttgggcaccacaagcaggtactgatggttgttaccttcatcctgtaacttgcaaataaaataggcggcagaatttagatcaaagggcaacttgctgttggcagctgcatgagtttccattgttctcttggcggcgttctgggaaggacttctagtcgtcgttcgtctcttgaccggctctcctggctgaatcttcgtagctcctgtttggcgaacggggctggtggatctcgattgcactctgggcgatattccagttttggcgcggatattcttcttggcggatgacgactggttttcactggtggttactagctttgtcttgccctccttttgttccctcaatctgttagaggcatctaatgatttgggtaccataaccgttggttctgcagttttcttggcttttccaaatgactgcatcttatgttctttgtcttccactgatgtgcttagatttatgcatatactgccagcctgatttcgtttctccggcacagttgacttgggatctttcggatcactttccacgtcgcaaatacaatcatcgtcagagactgggctcacgatactgttatgattagcgttcctgttgtcgttcttggaatattcacctacgtcgtgcgttttatttttaatgtctatatcatatgcattattaggattttgtatttcttttatatccctatttgaaggacgagtttccggtgccctgtcactattccttgattcatttcttcgggattcggtagtttcggatcttctggatctatcttgttttccattgttggcaagacctgatgacctgcgatcatttctactcgaccgagagttcctatttgctgttgcgtgggggatttcttcatcgctgcagaagcagtcatcctctgctgaatcgtatagatcagcttctctggaataggatggattccttttcgttgtgatattgtctgcattacgatttcgattagtatctatgcgctctgacttattgtaaggcatatcctcgctctccgagttatcatacttcgagggccgtttgggtcttcttgaagattctcttccattgtactccattggagcatttcgatttcgaacggtagcgttctcccttctaggataggcatcatatggattattggcatcatattcatccgattcaaaatcgtcacaataacaatcctctaaagtatttccatggtttctgtatttgtattcagttcggtaatcttcacgaggtccttcagcatatctagaaggtgaatttctgtgctctcgtttggagtacttgtttggctttcctatagaagtacgatattcaggataattatcactgtagcgattgttatatcttctctgtccatattcattgtaatctgaatcatagtcaggatcttctcttcttggtttcctatacttatcg

SEQ ID NO: 39752 - DNA, 1098 bp, DROSOPHILA
atgcagtcatttggaaaagccaagaaaactgcagaaccaacggttatggtacccaaatcattagatgcctctaacagattgagggaacaaaaggagggcaagacaaagctagtaaccaccagtgaaaaccagtcgtcatccgccaagaagaatatccgcgccaaaactggaatatcgcccagagtgcaatcgagatccaccagccccgttcgccaaacaggagctacgaagattcagccaggagagccggtcaagagacgaacgacgactagaagtccttcccagaacgccgccaagagaacaatggaaactcatgcagctgccaacagcaagttgccctttgatctaaattctgccgcctattttatttgcaagttacaggatgaaggtaacaaccatcagtacctgcttgtggtgcccaagaagccgattggaacacccgatggccaccggaaggccccaggacaggagtctgtgaagcagctacactgcccaaggcagtgctccggctttcagagcatgtcctgggacgattcggcgaccgcgacccgatcccagccacctctgcaatcccaggcgagtggtggcctttccatactgggctcctttaggattccaccagtgctggccagcacagcgctgggcatcatcaaagagcatctccacaggaacaccgtgcttcaaaagccagatgccagagaaagagaagcattatatccacccagaaggatgcggcgcattcttatgaccagaccgatttcaaggccaaggagaccagtacttcgtccatcccacaaagctaatgctcccattctgaaggagaacagaaccctgctgctcaccagcaatccctttcgaaacttgagcttcagcgatcacaatcgagaagttattgtcctgcatccgccggatcctggctttcggccatcgaaaaactccttcagcaagggcgaagtggaggtgcagcacatcacagtgcccaacgaagataccgttgtgaagcccgtgccacccacgccacctacgaaacccaaaaggacatcggtgatcaatccatagctgttatgtcctcacacaaactcgccctctcgtcataaa

SEQ ID NO: 39753 - protein, 352 aa, DROSOPHILA
MQSFGKAKKTAEPTVMVPKSLDASNRLREQKEGKTKLVTTSENQSSSAKKNIRAKTGISPRVQSRSTSPVRQTGATKIQPGEPVKRRTTTRSPSQNAAKRTMETHAAANSKLPFDLNSAAYFICKLQDEGNNHQYLLVVPKKPIGTPDGHRKAPGQESVKQLHCPRQCSGFQSMSWDDSATATRSQPPLQSQASGGLSILGSFRIPPVLASTALGIIKEHLHRNTVLQKPDAREREALYPPRRMRRILMTRPISRPRRPVLRPSHKANAPILKENRTLLLTSNPFRNLSFSDHNREVIVLHPPDPGFRPSKNSFSKGEVEVQHITVPNEDTVVKPVPPTPPTKPKRTSVINP

SEQ ID NO: 39754 - DNA, 2156 bp, DROSOPHILA
ggtgcccgagtatcggaaagtggactttagcatccgtaaccacacctgctcatcctccgagcgcagcctgctctcgctcatcttcatcttccagttttccgaataggtcaccagctccaccaccgtcttgaatgtgacacttttcgatggtttaacgcctttcaggagttttgccttctctttattgctgggatacttcatgtaatcgtattcaaccgactgatccgctacctcatcgatgatatcctttttgaactcgaccttctgagttcctggatgtttgtccagcttcttgggttttaggcgctgttttactgggctgtccatgttcagaggggaatttggtatgattttgttgctcagctatcaaaaatgtatcaaaacatgaattgtacttgctcaaaactcaaattcgaagtgcctgctgcgggtgtgtgtaatataacatgatgtcctcccatttgcacgtacaatttgaatggatttatgttccaagccggaggctgtaaacaactacataaataccgaagcaggactatcctatgaaatggatgggggctactccccaaataaaaaggagcatatttgcaggcgccaaaaacaaaagccccaacacacaattgcccagcatgtgggcatggaaggcccccccagtcgatactttatcatcatgcaaatgggcattgtattactgcccatataatccccttcagggctaataagtaccatgaacggagtacgccgcacaaaaacaaaatccaacaatggaagctgaaggataaacagccagtccctttggccacatccttgccgtgggccatcttgagttatggctcaattccaaagggccagccaacgggaggaaaagacaatcgtttacaagcacatatgagttgtaatttattcgccactagaaaagttgcctttattaaattttagtcgaaacacactcaaacacacaaacgcgcgcatccttttagcagcactcctggtgtcctggtcattgctccagctcgttggtgggtccgtgggtcagcttggctctcatggagccgcagaccatcatgcaggcgaacagggacagctccaggacacggcacatgcagtaggccaccacatccaccaggtgctccaccactcccaagtacagacacatccgtggctgggtgcttcgctagaccagtgattcccttacttattccagttactttcgcgctcagctgagctatctatcgatgtgtaagctgggtgcactcctatatcctgataagcttaaacctctaatgcttaagttcaccgtgttcacaggcgaccaactcttttcttcaaatgataacactgcgctgctcggctcgtcatatatatttaatcctgttgctgtatcaggacacgaagctccttgtcgtcctcgtctcgtgtttccccacaaaaccgaatgggagccgagcacaagccgtcgagagagagagagatttccatgcgaggagtgtaatgataacacggagacaattatctattatatagtattaaaaatgtttaaaatatattcaaacattaaaaaacacctaaaatataaattttcagtttaaaccataaacttataacggttctgaatgagtgttgagtaaaaaggttatccaaaagtaaaccaaaaatttttgtacatcttttaggatttaacgaatacttatactaatagttagttagacgtagtgtctaatataatcattgtatactcaaaacatgaaagcacgcttttctttaaaataagtgtttatgccaaaaaaaagatagtttcgctcaatgtgcagtgttggtacatgcgcaaactggtcttcaatccagagcaacaggagccagagataaggattaaaagtaaagaatattgagagcaaaggaatatcatatttaagatattcggccagcaaaaaatataaatgactttacaataatcacataaagtggagaagtatttgtcagatttggcacacatttgatgaattttgggaaaacttattttttagttaatgaaataaatgaaatgcttcctttcaaaattaattttattcaacatatttacgaagcatgttttacactgaataattggcgattcgctttatgaaaagaagacatatttggtagtgaaacaaaacata

SEQ ID NO: 39755 - DNA, 156 bp, DROSOPHILA
atgtgtctgtacttgggagtggtggagcacctggtggatgtggtggcctactgcatgtgccgtgtcctggagctgtccctgttcgcctgcatgatggtctgcggctccatgagagccaagctgacccacggacccaccaacgagctggagcaatga

SEQ ID NO: 39756 - protein, 51 aa, DROSOPHILA
MCLYLGVVEHLVDVVAYCMCRVLELSLFACMMVCGSMRAKLTHGPTNELEQ

SEQ ID NO: 39757 - DNA, 2339 bp, DROSOPHILA
gaatattcacccgtggagggagtggtggaggccctgtccgtcgtctcccaaaaaggcaatgacaagtatctgcggtacgcctttaaggcggctgcaaaggcgggccggaaacgggtgacgctgatcaacaaggccaaggagtggcccattagcgatggctcactggtggaagccgcacagcgcttgcactgccactacaaggattgcctggagctggagctcatggaggtggaggaggccatcagccggctgatgacggagcccacctacttcgattgcctcttcgccagcgaacgctatgccacattcctatccgccatctgcagtggagtctgtggcggggctaatctcttcagtgcggtggagatcggagatcaccatgccgttttcaaaccgctccagacgaaactatcgctgaccaattatgccaatctaagtgcatacggcatcgtgtccaccattgtggatctcttccagcatctgggccacgataagtgcgccgatgcactgtggtgcgagctgaagcgcaccatggacgaaggcattcgcaccaaggagttcggtggccaggataccggcgagtatgtcatttgcaacatcatcaaccagctgcgatgccgagcattgggtaaataaagatcctgccataaaatatatgatattggggaaaaaaaactctcattaaattgtctgtgaccattatttttccaaaataaaaaccaactatttttagtttttctcgaaatatttttttatcaacacataacaatttattagcttacaacgaacaataattttaaggaaagttgtcagtagttgcgatatttttgggagctcttcagctaaagtttaagattaaaagaatgattagattgtaatataagaaactgaaaataagaataagtctgatgcattggaaaacgtatcaaaaagtagtagtagtattttatttaaattgttctagtaaaactaaaatttttaataggcttgtccaaatgcatcagaaatacgtggtgcccgagtatcggaaagtggactttagcatccgtaaccacacctgctcatcctccgagcgcagcctgctctcgctcatcttcatcttccagttttccgaataggtcaccagctccaccaccgtcttgaatgtgacacttttcgatggtttaacgcctttcaggagttttgccttctctttattgctgggatacttcatgtaatcgtattcaaccgactgatccgctacctcatcgatgatatcctttttgaactcgaccttctgagttcctggatgtttgtccagcttcttgggttttaggcgctgttttactgggctgtccatgttcagaggggaatttggtatgattttgttgctcagctatcaaaaatgtatcaaaacatgaattgtacttgctcaaaactcaaattcgaagtgcctgctgcgggtgtgtgtaatataacatgatgtcctcccatttgcacgtacaatttgaatggatttatgttccaagccggaggctgtaaacaactacataaataccgaagcaggactatcctatgaaatggatgggggctactccccaaataaaaaggagcatatttgcaggcgccaaaaacaaaagccccaacacacaattgcccagcatgtgggcatggaaggcccccccagtcgatactttatcatcatgcaaatgggcattgtattactgcccatataatccccttcagggctaataagtaccatgaacggagtacgccgcacaaaaacaaaatccaacaatggaagctgaaggataaacagccagtccctttggccacatccttgccgtgggccatcttgagttatggctcaattccaaagggccagccaacgggaggaaaagacaatcgtttacaagcacatatgagttgtaatttattcgccactagaaaagttgcctttattaaattttagtcgaaacacactcaaacacacaaacgcgcgcatccttttagcagcactcctggtgtcctggtcattgctccagctcgttggtgggtccgtgggtcagcttggctctcatggagccgcagaccatcatgcaggcgaacagggacagctccaggacacggcacatgcagtaggccaccacatccaccaggtgctccaccactcccaagtacagacacatccgtggctgggtgcttcgctagaccagtgattcccttacttattccagttactttcgcgctcagctgagctatctatcgatgtgtaagctgggtgcactcctatatcctgataagcttaaacctctaatgcttaagttcaccgtgttcacaggcgaccaactcttttcttc

SEQ ID NO: 39758 - DNA, 339 bp, DROSOPHILA
atggacagcccagtaaaacagcgcctaaaacccaagaagctggacaaacatccaggaactcagaaggtcgagttcaaaaaggatatcatcgatgaggtagcggatcagtcggttgaatacgattacatgaagtatcccagcaataaagagaaggcaaaactcctgaaaggcgttaaaccatcgaaaagtgtcacattcaagacggtggtggagctggtgacctattcggaaaactggaagatgaagatgagcgagagcaggctgcgctcggaggatgagcaggtgtggttacggatgctaaagtccactttccgatactcgggcaccacgtatttctga

SEQ ID NO: 39759 - protein, 112 aa, DROSOPHILA
MDSPVKQRLKPKKLDKHPGTQKVEFKKDIIDEVADQSVEYDYMKYPSNKEKAKLLKGVKPSKSVTFKTVVELVTYSENWKMKMSESRLRSEDEQVWLRMLKSTFRYSGTTYF

SEQ ID NO: 39760 - DNA, 3871 bp, DROSOPHILA
cagtttccatgcgaactgcatgcctttcggcattatttgcttgcctcagtctctgaccgcagctcttggcgtccatatactcaacttgatctctgggaaatcgtcacttgtgggtggattttaatcgcgtgaacctaattgctcgacagataatcaatatacttaattaacactatatgcactatacacgtttcgtgcaatttcattgtattcaaagcatttgctcatcacaacttaacgtagtcaagtgaagcatttctatggcttcccggttataacttgagttagcatcattcacgcaccttgggttttttttttcttctcgtaactcccctgttatttctagggatttctaaattgtgtttgattaatgatcaatctacgaaagttatttcggctttggcaaaagagcaatttttttctgtgtcaagttaacaagtgatttggtaccgcaaaccggtttttatctacaaagtataaaaaaaatatcgcaagttatatgaaaattactaattgagttggttggtacaagtggggggggggggggaatcttggacatgcctcaagggcatatttattatggcaggccctaaaatctttatcgcacatacggtcttaattttccaacaaaatctaacgactttggtgcgaaaagataagattcgttgttccggagtgttatgctccctccctttggctatctcaatagaacttttatgcagacgattacagactgctatatagtctggactagcatcttatcgcgatgtgattagatatagtttagcattctctgatttacatccatatcgctgtgactatttaaacactctatccaccagacgacagattccctaagaacgtcgaacggcgaagtcgaagacgtgcgaaaaattatgatcttatctgggtaggaaccacatctcacccggcataaccagaggattgcatggatatatccgaactgtgatacactagccataattttacagactgcacaatggtgcgattaaacaggcgcctgctgcccatcaaggcacatttcttctttttcatggcgggtgagtgtaaagttataacttaacaatccaaaattaaagccgatttcgcacttcgtgagattctttcgtatcaaaatgttcttatcgctgacattatcgaatatatgatgtgagaatctgctgcaattatagaaagatttcttggaaattattgtagtttataaactcatgtgcacattgtcaacttttagccatgggacccatattgccacaattgtcggtgatcggcaagcagatcggtgttccaccggatgttatgggctatattacggccgccttgcccctactttatgttttagccaaacccttggtgggtttcctagccgattatttcacggtgagcttgatatgcctagtaactattaatataaatactaaactataatctttgttgcagagcctgcgcaagttcatcttcatctcccttatcctcatcatgacactggccttcgccggcttctatttcctgcccgacaactcacatttcattccattggacgagggaagtgcccaatggaatgtaacgttattgacgaatccaaacgattgcaataccattatccaatcctccaacgcattttgtcaaaccactcatcaggcaaaatgcattcaggaagaaaaggaagtaggcgaattctccgctctaattgttgccaacgagtcgggcctcaatctcaaccagaatctgcttcatggcaacgagagttatcacatctgtctcacgcaaccagcagccatcgattggaacagtgcatcctgcgaggtgcgacacgtaaatagctgcatctatggtgctggcaagttctggctgttcgtatgcctgctctgcattggaatcgttggcttcaacgtgacaaactccatatccgatgcctgttgctttgaccttctgggcgatgaggagcaggaaaagtacggagcacaacgagtgtggggcaccattggttttggagccactgccatgctagccggaatcgtagtgaactggtggaccacggatgcggtcaaaagtctgacgcctgccttgatcatcatgtgcgtgttcagtttgctcgatctgttcagtgtgtccaagctgaagctgccgaaactgggtggttccgagtccatctggagcgatgtttggcaattggtgcgcaagccacccattctggtctttctgttcttcgccacaatggctggcatcattgactccttcatcatatactttatgttctggcacttggagcaggtggccgaggccactggttacatgcatcagatcaagttgatcgaaggtctagtggtggccgccgagtgtctggccggcgaggtgccctttttcttctacagcggaaagattatcaaaaaactgggctatgttcattgcatgagcatgtgctttttcttctacgctgtgcgactgtcgctgatcgcctggattcccaatccctggtatctggtgggcgtggagctctttttccagggcattacctatgctctgtgctatacgtgcattgtggcctacgcctcggcggtggctcctccgggaacatcggccaccgttcaaggattgatggccggcatggacgatggacttggcttctccatcggatccctaatcggcggacttatgttcaaaagcctgggcggacgagagagcttcaaatactttgccatagccgccatttgcacatgcgtagcacacatcgttatacgtcccacatccaggaagaggcaattcctgccgagacagggatatgtgccgccaacggaacaggagatcaagcagccgcccgctcaggaaatggaggagattcgtttgggataaacatagtatcaacacatgccatttttattgcatatttttgtactaattttttacgttaaacaaaaacaaagaaagaacgacaagttgtccaaaagttgaatgactttgctctctcggggtttttgttcgattgttggcgcacacgcgatctcaagtgctccggcccctccagctgtcaacatggttatataatacctgagcatcgcacaaaagaacccattgaaagtgaatctggggccaggcagatgcctcgcttaaatggcgagcgattcccactccatatattaacgaaactggcccgatcggcctgtttcaatgatcgagaattgaaagtctgacactcatctgcatgtttgggatttaagttaagttagagaattgtagttttagttctacaccctaaaataaccatatatctactgatttctcagagcaatagcctttccgaaatagctccaacaaaataaaagaattggagatggttatgacttccaatctttgtcgcctagtgttgataatttatgctcgagtgtgggccacacttcagagctgtccaaatgagtgcttgtaaaaattagattgggccaagttgtgctccgaatctcgcagcaaactggatggctatataagccacgagttaccattagaagcctgcattgtttctggaagatgtggcccatttggctgctggtgctcttaacgctatcactggccactggccgccaggtgggcagatgcagtttggcccggcagctgtatcgatacggaatggcttacaacgagctacccgattggctgtgcctcgtggagggcgagagctcgttcaacacaaaagccatcaatccctcgaacgttgatggatccgtggactggggtctcttccagatcaacgatcgttactggtgcaagccggcggatggtcgtccatccaacgatctgtgtcgcttgccctgccgcctgctgttgagcgacgatatccggtattccattgcctgtgcga

SEQ ID NO: 39761 - DNA, 1525 bp, DROSOPHILA
atggtgcgattaaacaggcgcctgctgcccatcaaggcacatttcttctttttcatggcggatgggacccatattgccacaattgtcggtgatcggcaagcagatcggtgttccaccggatgttatgggctatattacggccgccttgcccctactttatgttttagccaaacccttggtgggtttcctagccgattatttcacgagcctgcgcaagttcatcttcatctcccttatcctcatcatgacactggccttcgccggcttctatttcctgcccgacaactcacatttcattccattggacgagggaagtgcccaatggaatgtaacgttattgacgaatccaaacgattgcaataccattatccaatcctccaacgcattttgtcaaaccactcatcaggcaaaatgcattcaggaagaaaaggaagtaggcgaattctccgctctaattgttgccaacgagtcgggcctcaatctcaaccagaatctgcttcatggcaacgagagttatcacatctgtctcacgcaaccagcagccatcgattggaacagtgcatcctgcgaggtgcgacacgtaaatagctgcatctatggtgctggcaagttctggctgttcgtatgcctgctctgcattggaatcgttggcttcaacgtgacaaactccatatccgatgcctgttgctttgaccttctgggcgatgaggagcaggaaaagtacggagcacaacgagtgtggggcaccattggttttggagccactgccatgctagccggaatcgtagtgaactggtggaccacggatgcggtcaaaagtctgacgcctgccttgatcatcatgtgcgtgttcagtttgctcgatctgttcagtgtgtccaagctgaagctgccgaaactgggtggttccgagtccatctggagcgatgtttggcaattggtgcgcaagccacccattctggtctttctgttcttcgccacaatggctggcatcattgactccttcatcatatactttatgttctggcacttggagcaggtggccgaggccactggttacatgcatcagatcaagttgatcgaaggtctagtggtggccgccgagtgtctggccggcgaggtgccctttttcttctacagcggaaagattatcaaaaaactgggctatctctttttccagggcattacctatgctctgtgctatacgtgcattgtggcctacgcctcggcggtggctcctccgggaacatcggccaccgttcaaggattgatggccggcatggacgatggacttggcttctccatcggatccctaatcggcggacttatgttcaaaagcctgggcggacgagagagcttcaaatactttgccatagccgccatttgcacatgcgtagcacacatcgttatacgtcccacatccaggaagaggcaattcctgccgagacagggatatgtgccgccaacggaacaggagatcaagcagccgcccgctcaggaaatggaggagattcgtttgggataa

SEQ ID NO: 39762 - protein, 487 aa, DROSOPHILA
MGPILPQLSVIGKQIGVPPDVMGYITAALPLLYVLAKPLVGFLADYFTSLRKFIFISLILIMTLAFAGFYFLPDNSHFIPLDEGSAQWNVTLLTNPNDCNTIIQSSNAFCQTTHQAKCIQEEKEVGEFSALIVANESGLNLNQNLLHGNESYHICLTQPAAIDWNSASCEVRHVNSCIYGAGKFWLFVCLLCIGIVGFNVTNSISDACCFDLLGDEEQEKYGAQRVWGTIGFGATAMLAGIVVNWWTTDAVKSLTPALIIMCVFSLLDLFSVSKLKLPKLGGSESIWSDVWQLVRKPPILVFLFFATMAGIIDSFIIYFMFWHLEQVAEATGYMHQIKLIEGLVVAAECLAGEVPFFFYSGKIIKKLGYLFFQGITYALCYTCIVAYASAVAPPGTSATVQGLMAGMDDGLGFSIGSLIGGLMFKSLGGRESFKYFAIAAICTCVAHIVIRPTSRKRQFLPRQGYVPPTEQEIKQPPAQEMEEIRLG

SEQ ID NO: 39763 - DNA, 4312 bp, DROSOPHILA
tcagtgaggagcggctctcgaagattagcaagatgacgggtctgtccgagtcccagatggccgaaaaggcagagaaatgtgagagttttgggcgagtttctatgattgtctcctcgtaaaatttcaatcgatagatatggccaaaaagaagaattatggtcgcagtggtggatctgtcgccggtgaccctgctgccgtcagtgaagccgcctcctacaaaaccgagaagcccagctccccatgtccatgttcacgtccattggagaactcgacgtcgcatcggaggaaatgctatcgcgcctccatcgaacgctgggcaccggcggaggggcgcatcttttgtccgtgctgcgcgaccagcaggcggccgcttatcaaggctgccactgagatctcgaacaacggctgctgtgccgcctgggtggtctcctgctggcctctgtgcttcctgccctgcctcatgtccgcggacaacaatgagtacctgtactgcgccaattgccgcgcctttctgggcatctacaatcgcgagaaaagctgtgtgcagcccagcaaggagtttgtgtcctgcagcaagtcggtcacggccccgctcaagtgtccaactgaaaacctgtgaaaggactttgagtgggcgtagtacttattaaattggttgtgtatacatctggctatgttttttttttttaataaaaaacaagttgttcgataatatctacttcttagtatgagtggtttttatataaaattaaactaaaaagccaaacttttctattgggaacatctaaaaagtcgatgaaattattgaacagccgccaaattcaaaccaattagccaagacaccaaccataacaagatgcatcgttatcgaccgcgcattttgttaatcgaagctttcaacgccgcaacatcgggcaacgcttgccttgccttctcttcctcttgcttttgcgccgaatattttctttaaactgttttcgtattaaattgtttgtttaaaatgaatctggaggacatttcgatgattatgaagctgttcgatagcaacatgcacaagctacaggggaatctacgttcctatcaaaccgaaatgcatcaaattcacaaggagctcacagaaaaattgtcgcatgcagatctgctgtacaggagtctcattccgctgcacgatcacttggtggccagtctgagcgaagttaatgcacacgtaatgaaactgaatgtgcaactacacatcaaccgccagtctgtcagattgggagactacgaatattacgagaaatccatcgacaatccatattcgtcgattcgctcaggtttacaagcgatcgaaaaaccgggttgtgctgaagctatatgtcagtcctcgaagccggccttcgtggaatgtctgccctcctccacttcggaggaagtgcccgtcgtggctgtgcaggaagcctcttcgacaaaccagctcgacgcaatatcagtggtcaatgaaaacctctcagaagagagagacgctactccgcagcctttagcagtttccaagaacatggaggagactatgccctcgaatcctttccacgaacagcttgagggatctctagaagagatcccagtgggctccaagattgtcgtggaaactgaaaaggccaacaatccagtacgttccgaagcttccgctccagcaacttctgacaatcagtcccttctggctgcaaaacagggaactcaaacaattggcacaggtatctgcaacaagatctccaagagcaccatcaacatgcccaacaactggcagcttgagaatcctactgaggtaactgctgcatcgatcgaaaaggttaacaagctcccaaaaagtcccagaaaccgattcctattgcctcccaagggaggcactgagacgaccagacgtgatatctacaatcaaatcttaaaggacatggctgcatttccagagaatactatagttactgccgttttagcgagcgtggacgtaacggataattgcgcctatgtggctaaatgggatgaaagttctgataggattaagaaggtgctccagcgacaactgccattgcaggagttggaccagttgcccgactacggcgacatttttgcagttctcgacagtattaacaacatcattactcggatcaccatcaactcaagttctgcgggcggaggatatgatgcgtatcttatcgactttggcgagcatattcattttgacggcaacgaaacaatatttaaactaccggacgacatcaaacggttgccggcacaggccattagatgcgatttaatcaactgtgatatcgccaatatgcattgctttgttaatacgtatattaagattcgagtgcacgaaaacaataattctacactagtggccgaaccggtcattgataggttaagcagacctacaaaaacgaacaccactaaatatccagctggaataaccgaggatgacatggccatgctgaatgaaatcgatgagagcaccagtgatcctctgaaagcagttcttggctttcgtcccaaggacgagcaacgcatttgccggcactacgatcccaagctgaatggctgttttaagggtaagttacagaaaattaattgaaaaattggtttacaaagtaaaggttttaatacgtggcttatttgtaaggtaacaattgtcgttttgctcatgagccctttgctccgaatggcgccaccaaagatgtggagctagctagagctcttcctgagacaatctttgatacaacagtgcattttgaaatcggcagcattgtcggcatcctgatcacctttattaatggccccaccgaggtttatggccagtttttggacggatctccgccgttggtgtgggacaaaaaggatgtgccagagaacaaacggaccttcaagtcgaaaccgcgtcttcttgacattgtacttgctctctacagtgatggttgcttctatcgcgcccagataatcgatgaattccccagtgagtacatgatcttctatgtggattacggcaacacggagttcgtgcccctaagctgcttggctccatgtgaaaacgtggacagctttaagccccaccgcgtctttagttttcacattgagggaattgtaaggtcaaaaaatctgacacaccaaaagacaatcgaatgcatcgagtatctcaagagtaagctgctaaacacggagatgaatgtacatctggtacagcgcctaccggatggcttcctaattcgcttcctggacgattggaaatatatacctgaacagctattgcaacgcaactacgctcaggttagccaataagtcgggataagtcgtcggaataatgttaatcaaatttaaagtagacatagtttacataacaatagttcctaagctatttgtaagcttttcatttctgaccatgttacaatttaaccacttacattatcatgacaatgcttacatttctttcgaaggactctttttgtttttgaattatcactacttcggagcgatcccaataaactgactatgttcgaacatgttatccagatgtcatgtggcttgattaatgtcctatcttggggctggttcaattatgagcgcggaacagccattggcaaatgacaaacacaaaactgtctcgaaactaaaacaataaaaataattgcctttaatgtgcaaaagcaaaaaatcaagggacaccgttttggacgtggaagcgcggatctgtctgtcgggtggggtgctaatagattatgccgcaacgattagagaggcaataaataccacctggccgggatcccatgcgtgtttggttcgcgggcacatattcggactgcgatgacgacaggtcctccttgtgtcctccgctgtcctggtgttgacaatctaaacggttcggccaaaagggtaatgggcctggccaagggtcacattggggcacagttcgtcggggatgtactccagatcacaaacagggatagttggcctattcacaatggtaatacttaaatcagtttcggaagcatttcccctataaacacctgcgacattccaacccctgagaataattagcctggttaagtgtcaaaaggatggcagaccccgcgacatgtgttcccaacataatgatgattatgaccacccgtactcaactaactaccccgaaacttggatttgtaggaattttactagacgattacaatttggaagaagtgtggagagtgtgtgtggcgcgttactctgctgatctgcaaggaaatgaactcaataaacgaaatggttaacacaacaaaaagtgaaatcatttagtagttgg

SEQ ID NO: 39764 - DNA, 1998 bp, DROSOPHILA
atgaatctggaggacatttcgatgattatgaagctgttcgatagcaacatgcacaagctacaggggaatctacgttcctatcaaaccgaaatgcatcaaattcacaaggagctcacagaaaaattgtcgcatgcagatctgctgtacaggagtctcattccgctgcacgatcacttggtggccagtctgagcgaagttaatgcacacgtaatgaaactgaatgtgcaactacacatcaaccgccagtctgtcagattgggagactacgaatattacgagaaatccatcgacaatccatattcgtcgattcgctcaggtttacaagcgatcgaaaaaccgggttgtgctgaagctatatgtcagtcctcgaagccggccttcgtggaatgtctgccctcctccacttcggaggaagtgcccgtcgtggctgtgcaggaagcctcttcgacaaaccagctcgacgcaatatcagtggtcaatgaaaacctctcagaagagagagacgctactccgcagcctttagcagtttccaagaacatggaggagactatgccctcgaatcctttccacgaacagcttgagggatctctagaagagatcccagtgggctccaagattgtcgtggaaactgaaaaggccaacaatccagtacgttccgaagcttccgctccagcaacttctgacaatcagtcccttctggctgcaaaacagggaactcaaacaattggcacaggtatctgcaacaagatctccaagagcaccatcaacatgcccaacaactggcagcttgagaatcctactgaggtaactgctgcatcgatcgaaaaggttaacaagctcccaaaaagtcccagaaaccgattcctattgcctcccaagggaggcactgagacgaccagacgtgatatctacaatcaaatcttaaaggacatggctgcatttccagagaatactatagttactgccgttttagcgagcgtggacgtaacggataattgcgcctatgtggctaaatgggatgaaagttctgataggattaagaaggtgctccagcgacaactgccattgcaggagttggaccagttgcccgactacggcgacatttttgcagttctcgacagtattaacaacatcattactcggatcaccatcaactcaagttctgcgggcggaggatatgatgcgtatcttatcgactttggcgagcatattcattttgacggcaacgaaacaatatttaaactaccggacgacatcaaacggttgccggcacaggccattagatgcgatttaatcaactctggaataaccgaggatgacatggccatgctgaatgaaatcgatgagagcaccagtgatcctctgaaagcagttcttggctttcgtcccaaggacgagcaacgcatttgccggcactacgatcccaagctgaatggctgttttaaggtgcattttgaaatcggcagcattgtcggcatcctgatcacctttattaatggccccaccgaggtttatggccagtttttggacggatctccgccgttggtgtgggacaaaaaggatgtgccagagaacaaacggaccttcaagtcgaaaccgcgtcttcttgacattgtacttgctctctacagtgatggttgcttctatcgcgcccagataatcgatgaattccccagtgagtacatgatcttctatgtggattacggcaacacggagttcgtgcccctaagctgcttggctccatgtgaaaacgtggacagctttaagccccaccgcgtctttagttttcacattgagggaattgtaaggtcaaaaaatctgacacaccaaaagacaatcgaatgcatcgagtatctcaagagtaagctgctaaacacggagatgaatgtacatctggtacagcgcctaccggatggcttcctaattcgcttcctggacgattggaaatatatacctgaacagctattgcaacgcaactacgctcaggttagccaataa

SEQ ID NO: 39765 - protein, 665 aa, DROSOPHILA
MNLEDISMIMKLFDSNMHKLQGNLRSYQTEMHQIHKELTEKLSHADLLYRSLIPLHDHLVASLSEVNAHVMKLNVQLHINRQSVRLGDYEYYEKSIDNPYSSIRSGLQAIEKPGCAEAICQSSKPAFVECLPSSTSEEVPVVAVQEASSTNQLDAISVVNENLSEERDATPQPLAVSKNMEETMPSNPFHEQLEGSLEEIPVGSKIVVETEKANNPVRSEASAPATSDNQSLLAAKQGTQTIGTGICNKISKSTINMPNNWQLENPTEVTAASIEKVNKLPKSPRNRFLLPPKGGTETTRRDIYNQILKDMAAFPENTIVTAVLASVDVTDNCAYVAKWDESSDRIKKVLQRQLPLQELDQLPDYGDIFAVLDSINNIITRITINSSSAGGGYDAYLIDFGEHIHFDGNETIFKLPDDIKRLPAQAIRCDLINSGITEDDMAMLNEIDESTSDPLKAVLGFRPKDEQRICRHYDPKLNGCFKVHFEIGSIVGILITFINGPTEVYGQFLDGSPPLVWDKKDVPENKRTFKSKPRLLDIVLALYSDGCFYRAQIIDEFPSEYMIFYVDYGNTEFVPLSCLAPCENVDSFKPHRVFSFHIEGIVRSKNLTHQKTIECIEYLKSKLLNTEMNVHLVQRLPDGFLIRFLDDWKYIPEQLLQRNYAQVSQ

SEQ ID NO: 39766 - DNA, 2752 bp, DROSOPHILA
gctaaaaaaataggtaaaaatggggtagcaaaggtgttacgtggctgattttacacagagaagtgtgcagcaatacttttaaatgctacatattgctaagcatattttaataaattttattttgttagaaataatttgaaattgacaatattaaatgcttatttgatttgattttatatattaaaatatttagttcccccgctttttaagctttccactgtgtattggggcacacggcggcatgtggagtcctgtgtagccacgtggaaccccaaaacggtcgcatcatgccgtaagtgcagtaaaaaatcaattttgacaaaatgttgaaaaacacactcaaagtctttaaaaaaaaaaaaagcgaaataagtgtaggcgaagtttggcccctgatgaaaatcatttgggcgttgggataaggaggcgtggcacgtgaacggaaccgattgttaagatgaaggggtcggcggggggtgtcgaaaaatgactgacaataaaatgttgacgcagccaaggagcattatggatacagggtgctcgaaggcgaatggattaagtcgacaagtccacggatgggtggctcaagttgccccacttcaagtattccatttcacaatagcactgagtatacctgctattctctgttggtctttattgaaggcgggagaacccatataccatatatgtacatacttggcttaagctgattgatgccgagggttttttttttcaattcacacatctgcataaaataaatcctaatgcgtgtgtgcgccaatgcttatgttggttttaagtttatggaaaacgagtgagtgagcagtttcccttcaaggattgtggcatcaaaaaataatgataacagtaacaaaacccattcgtcgtctaaagtatttcacttttgtaaaagtatctctagagttatatagcgaatggggccatgtcccagacaaatccgaaaccaagtgatacgcaatcactgcgctgtttgcactgcatgaaggtgatccgttgctcccgctacgacaccagtgaactggtgcgacacatccaacaggatcatccggagatatacgcagtgaccacggataaaatcaagaatctgcacaagctggccgcggatcacggcatcagtgaggagcggctctcgaagattagcaagatgacgggtctgtccgagtcccagatggccgaaaaggcagagaaatgtgagagttttgggcgagtttctatgattgtctcctcgtaaaatttcaatcgatagatatggccaaaaagaagaattatggtcgcagtggtggatctgtcgccggtgaccctgctgccgtcagtgaagccgcctcctacaaaaccgagaagcccagctccccatgtccatgttcacgtccattggagaactcgacgtcgcatcggaggaaatgctatcgcgcctccatcgaacgctgggcaccggcggaggggcgcatcttttgtccgtgctgcgcgaccagcaggcggccgcttatcaaggctgccactgagatctcgaacaacggctgctgtgccgcctgggtggtctcctgctggcctctgtgcttcctgccctgcctcatgtccgcggacaacaatgagtacctgtactgcgccaattgccgcgcctttctgggcatctacaatcgcgagaaaagctgtgtgcagcccagcaaggagtttgtgtcctgcagcaagtcggtcacggccccgctcaagtgtccaactgaaaacctgtgaaaggactttgagtgggcgtagtacttattaaattggttgtgtatacatctggctatgttttttttttttaataaaaaacaagttgttcgataatatctacttcttagtatgagtggtttttatataaaattaaactaaaaagccaaacttttctattgggaacatctaaaaagtcgatgaaattattgaacagccgccaaattcaaaccaattagccaagacaccaaccataacaagatgcatcgttatcgaccgcgcattttgttaatcgaagctttcaacgccgcaacatcgggcaacgcttgccttgccttctcttcctcttgcttttgcgccgaatattttctttaaactgttttcgtattaaattgtttgtttaaaatgaatctggaggacatttcgatgattatgaagctgttcgatagcaacatgcacaagctacaggggaatctacgttcctatcaaaccgaaatgcatcaaattcacaaggagctcacagaaaaattgtcgcatgcagatctgctgtacaggagtctcattccgctgcacgatcacttggtggccagtctgagcgaagttaatgcacacgtaatgaaactgaatgtgcaactacacatcaaccgccagtctgtcagattgggagactacgaatattacgagaaatccatcgacaatccatattcgtcgattcgctcaggtttacaagcgatcgaaaaaccgggttgtgctgaagctatatgtcagtcctcgaagccggccttcgtggaatgtctgccctcctccacttcggaggaagtgcccgtcgtggctgtgcaggaagcctcttcgacaaaccagctcgacgcaatatcagtggtcaatgaaaacctctcagaagagagagacgctactccgcagcctttagcagtttccaagaacatggaggagactatgccctcgaatcctttccacgaacagcttgagggatctctagaagagatcccagtgggctccaagattg

SEQ ID NO: 39767 - DNA, 696 bp, DROSOPHILA
atgaaggtgatccgttgctcccgctacgacaccagtgaactggtgcgacacatccaacaggatcatccggagatatacgcagtgaccacggataaaatcaagaatctgcacaagctggccgcggatcacggcatcagtgaggagcggctctcgaagattagcaagatgacgggtctgtccgagtcccagatggccgaaaaggcagagaaatatatggccaaaaagaagaattatggtcgcagtggtggatctgtcgccggtgaccctgctgccgtcagtgaagccgcctcctacaaaaccgagaagcccagctccccatgtccatgttcacgtccattggagaactcgacgtcgcatcggaggaaatgctatcgcgcctccatcgaacgctgggcaccggcggaggggcgcatcttttgtccgtgctgcgcgaccagcaggcggccgcttatcaaggctgccactgagatctcgaacaacggctgctgtgccgcctgggtggtctcctgctggcctctgtgcttcctgccctgcctcatgtccgcggacaacaatgagtacctgtactgcgccaattgccgcgcctttctgggcatctacaatcgcgagaaaagctgtgtgcagcccagcaaggagtttgtgtcctgcagcaagtcggtcacggccccgctcaagtgtccaactgaaaacctgtga

SEQ ID NO: 39768 - protein, 231 aa, DROSOPHILA
MKVIRCSRYDTSELVRHIQQDHPEIYAVTTDKIKNLHKLAADHGISEERLSKISKMTGLSESQMAEKAEKYMAKKKNYGRSGGSVAGDPAAVSEAASYKTEKPSSPCPCSRPLENSTSHRRKCYRASIERWAPAEGRIFCPCCATSRRPLIKAATEISNNGCCAAWVVSCWPLCFLPCLMSADNNEYLYCANCRAFLGIYNREKSCVQPSKEFVSCSKSVTAPLKCPTENL

SEQ ID NO: 39769 - DNA, 3114 bp, DROSOPHILA
gaactggttttaatttcagtacatttaggtagtttccaaaagctgtttgtgtaaacgtcatgaacataattaaacaagggtttccccaatttattcccaacttgcatgtgaactgaaagtattttgccatttctcactttacgcaactaattcaaaaagttgcccatattgaatgggggtttaccaaaggttcgaaagttctccagaataaaaaaaaaaaaccaaaagcacacgtttcccttgagtatttaaaatgtgtaaaacaagtagttgcttaagcattgcccatcagcatttacggcacctctctgattacctgcggataaagttttatgcatcaaccagtttgccaggcaaccctatatccttgccgcttaccaaatccttgctctgcaacttttgcacataagctacgagcaggagacgtccattgaaaaattttctgttgcctatctcgaggggcaatggtgaaattgggaaccacagggctgtgtgtttcgtaagccaacaattttgcatttaattgcttaattactgcagcacggcagacatcccagaggcacagcccccgaagcccaggatccgactccttatgctcctcctcctcctcctcttcatcctcctcctcattctcttggccactaagcggctggcatttatgttaacgtctctccaagtgttttatggccgtgcagaaagaaacatttatgactgctccggtccccggaggtgctgccttgggcctttttccagctggagtgggcgtggccagaccacaattgccgccaagtgggcgtttaggcaccggggccacaaatacaacttaaattctcggccggatatgagtgcaaaagttgaactccttctcctttgtcctccttgcagaatcatccactcccttcgcgtccgctgctcgttatggtgatggtagtgatgggctcgtgccttgcgtagctgcattcccatccataccaagtccagacgtcgctccaagccagctatgtggacgtacatgatggctgccgcccgcggtgatcgggtcaacacgatgatgtccaaccggcgacgccccgaaaccgagtccccaaaatatggctacaagtaagtgggattccatttccaaggaactgttctgggaattttatatatttatggaagccatgttacctaaaaattgtataccttactttaaaacttactttattgtatttgatacattctaagaacttatagcattagcatactattagattctattcaaagatacttctgggaactacaatactttgtttcgatacttagtacgttttcagttattcccctagttgaatgcatttagatgttactattgttaaacgattaacaattaattttactcgacacttatccctattagcctctccaaccgtcccatgtaccgcaccacccgattggtgggacccgcctcctcggcgcccgcccagttgcagctgccctgcggctcgcatcaggcgacgttgggcgtggcacctccgccgctggaggagattagtggcggtctgttcgcacccttcgcgcccacggccacaataacggtggagcaggcggccacctcgattccgatggcagtggatggcgaggtgcaccacctgcactatccgcgtcgcagttggcagcggaaatatcgccaggggattcatcgccagccaggcggaggagccgagcaggatgaggacgaggaggaggacgacgacgacgtcgacgaggatgacgatgatgagttcggtgcttccgtttgcgaggataacccggaggaggccattgcacgcgctgaccacgacacgcagcaaaaacagcactatcagccaaatgccagcgattccagttatgtggaaaatggcaggaagctgatacaggtgagttgctaaacggtggccagctaaacttatcagcagatgagttcatttagttcagcgaagtccgtttagtttttagtactgtgaaaataaggaaagtaaggaaaaagtgaattactcgtgaatattaaaatattaattacaaatataataacgcgatagtggcgctactgcaaatcaatttgcctgcgcggccaacgtggcgtatgcgtaatttgatacacatttagatacgttcgccgataaactatggccaataactgatacattatgctctgtccatgctgtctcgtctcgtccctggccacatttcaattatgtggaaatgaaattaagtaattgctctaattgattgacgcccccgtcctctgaaggcggaattggcccagtttttttttccgagctgcgggccatggaaacttcgcattgtctgcatagctccccgcagacttggccattccaagccattccattccgctccagacaaatgcaaatgaactgggcggaccttcataaacttgaccttgccgtaaatcgtgttttaattacttcctctattgtcacgtagccgtgccatcgccccaataaacccttgggcccccaccaactgaatgaatgccatttttggctgcccgcagaaatttttattagcacgtgtcaatcgacttgaaatacgcacaacaaaaaacgaagggaggcaaaaaaacaaaaaggctgtgagtgtgctttatatggagttggggtattcattttgtggtctaaacagagttttggggtgataagatttgtgtggtttaatttagcgaagttcattgttctttttaatgatttcaaagcattttttagcatttttaaagaattttaaatttaattaagtgctctctgcgttgggattgaatatttaataaggcaaaacaaattttagttgacataatgctggctcaaaatgaaggcattatctcaatcaagctgtcacaactgataaatattattagatcaactttatgcaaattcctaataggcatttccattttccactttgaaatgcaaagcttttgaaacaacaagcagctgaattggtgtcctttgacttccgtatctttaatctccaactggccgcatctcgcctttcaaatccactctctctctcttaagtttcactgcacttctcgcgtcctctgcaatcctcatcctcatcctcatccagcaagtcggagat

SEQ ID NO: 39770 - DNA, 657 bp, DROSOPHILA
atgtggacgtacatgatggctgccgcccgcggtgatcgggtcaacacgatgatgtccaaccggcgacgccccgaaaccgagtccccaaaatatggctacaacctctccaaccgtcccatgtaccgcaccacccgattggtgggacccgcctcctcggcgcccgcccagttgcagctgccctgcggctcgcatcaggcgacgttgggcgtggcacctccgccgctggaggagattagtggcggtctgttcgcacccttcgcgcccacggccacaataacggtggagcaggcggccacctcgattccgatggcagtggatggcgaggtgcaccacctgcactatccgcgtcgcagttggcagcggaaatatcgccaggggattcatcgccagccaggcggaggagccgagcaggatgaggacgaggaggaggacgacgacgacgtcgacgaggatgacgatgatgagttcggtgcttccgtttgcgaggataacccggaggaggccattgcacgcgctgaccacgacacgcagcaaaaacagcactatcagccaaatgccagcgattccagttatgtggaaaatggcaggaagctgatacagtggcgctactgcaaatcaatttgcctgcgcggccaacgtggcgtatgcgtaatttga

SEQ ID NO: 39771 - protein, 218 aa, DROSOPHILA
MWTYMMAAARGDRVNTMMSNRRRPETESPKYGYNLSNRPMYRTTRLVGPASSAPAQLQLPCGSHQATLGVAPPPLEEISGGLFAPFAPTATITVEQAATSIPMAVDGEVHHLHYPRRSWQRKYRQGIHRQPGGGAEQDEDEEEDDDDVDEDDDDEFGASVCEDNPEEAIARADHDTQQKQHYQPNASDSSYVENGRKLIQWRYCKSICLRGQRGVCVI

SEQ ID NO: 39772 - DNA, 2711 bp, DROSOPHILA
cctttccgaaggcgagctaattgttttggcaccgtcgcaacatcatcagcagcgatctctgaggagcaggaggataccaaggaagcaactccaccttcgccagcaaaccaacccacacttacgttagccgacccttgaggtgctcgatccagcgatcttgcaggagatagccattccgctcgagatcaaacagctggaagagcttctgctggaattcctgtaagcaagaccgaaaaacaagttgtaaaccgctgggatttatgcgtctcccgtttctgggcaagtgttaattaatttacgttcgtattgtttgtagaagcatttgtttatgccccgcaaccaaagatttatatatgtgcacggagcacagtgtttaccccagtggctgacccacgtaatgagcataatcaagagtgttctggtcccacgactgggaactatggggtgattcgaactatgggaatcgaactatgcggtagtgatgaagacgaatggcataaattagacgcttattaatatcttaatggcattcgagctcacgatccatgagcgcccagcattgtctgcaaatcgaagcgcagcgctgggtcttttgcatttggtcacagttgttgtggcgatctcccatcttccatcccccggcgatgatgaaaaatgtgcatatttaacggatgagccctgactggttaaacggctttcggggagcccataaaaacaaaatgctcgtggtcgatcgtacggagccgaaaccaaataaacaccagctcagcaaaagctgagcccatcaagcaacccaaaaacgggttttgcgatcgaccagcgatcgggtaaaggaccacagaataagtggcacaaggtcagggcgctccagagcgtcactttccgagacccatattcattaccattcccataaacttgcatccattcgatgatgtaattaatggcgaagcacaagaaactaagttgccccaaatgtttcatcaacagaacgtaaatttaattaaaaatggtaaaaggaagcagaaagtggcaccactataacatttagggacggactcacctcgtccaggaatagcttgcggaaggcctccctggtgtgtttgccttcgccctcgtcgaaaagtgcactgcactcggatatgagtagccagcgttgcttctcccggcgcgcctccagctccatggagctgcagttcttatctaaattgaggttgtatcgttccatgtacaaatttgattgccgctgattcggattcgcatttccatttccatttgcactgccaatcgcttcctgcctgttaacgcttccaattagaatacttggcgaactggccacgattgggccagcatttgccgccggttcatcagcacttgcatccagtgcatccaaatcgagtacggccgcttcgctggtatcgctgctatctctgatatcagctcgctctggctgcacttcctccgttttttcctcggcggaatcgcgtgctccatgcaaacgctccagatactgggcagcctgctggagcacgtgactcacaaccgtgggcgctgactgctggttgatgggttgctgggcaggagtttgcgactggggcagctcatccgagaaggatacttttttgggtgaacgtgagggcgtggcgggaatctccagggaacgactggacgacactgaaccgcgatggttgttcgactcctggtccgcgttcatgtttttcgagggggggaaactaagttggccaaaggggaatcacctgaatcacgtgacacgcacttttaacacatgccaatgaagtgggctactataaggacacacgattacacaggagcaacacctcgatgagattttggtagtagtagctccgatttagcactcacgtactccacttgccaaaggagaagcagacactttttctatgtgttatcctcagcaaggagtgtattatgcagcagcaacgtcggaaatcagtatagcacttcactttccagctcaccacatgccaaaggtgtgggagtggccactaatgggtgggtgatccttgcgtcggagttcaaaacacggcggcaacacgacgacgcgacacaggtaagaagcaacaccaatcggcggcagcggcgagcagcaactgaaagcgaaagccaggcaggtgaggtgagggcctcggatcggatcggagcgctatggctatggtccgctgtattggtgagcgggactgatcgctcggatcgtactgagccgatcggtggtcgacgctttggaaaacgcgtttgcccaatatcggttcaatatttcaggcttctgccagccagccagccagctagcgagtttttagaatggacatgcaatgtcccagccgatacagtacgcactatgtgcgagtgtgtatctttgcatctgtatctccatcttcgtacgactcataaaatggctgctcagatagatgattgccccgagtgtttgccagtgtgtgtgtgttcgtatgagattgatattctaatttggtttttgcgactcataccgcgagttgtgtgtacttattcgataagggctgcaaataattcaggtgtcgcgatctcgacgtcttcattttttaatttcaatgcccgtgtttcgtaacaatcaaacttgtttatgtgccgcagctgtcgaacgtgtctatttccgaattcccacccagagtgcacggcacataccgtcgcctttgttacga

SEQ ID NO: 39773 - DNA, 711 bp, DROSOPHILA
atgaacgcggaccaggagtcgaacaaccatcgcggttcagtgtcgtccagtcgttccctggagattcccgccacgccctcacgttcacccaaaaaagtatccttctcggatgagctgccccagtcgcaaactcctgcccagcaacccatcaaccagcagtcagcgcccacggttgtgagtcacgtgctccagcaggctgcccagtatctggagcgtttgcatggagcacgcgattccgccgaggaaaaaacggaggaagtgcagccagagcgagctgatatcagagatagcagcgataccagcgaagcggccgtactcgatttggatgcactggatgcaagtgctgatgaaccggcggcaaatgctggcccaatcgtggccagttcgccaagtattctaattggaagcgttaacaggcaggaagcgattggcagtgcaaatggaaatggaaatgcgaatccgaatcagcggcaatcaaatttgtacatggaacgatacaacctcaatttagataagaactgcagctccatggagctggaggcgcgccgggagaagcaacgctggctactcatatccgagtgcagtgcacttttcgacgagggcgaaggcaaacacaccagggaggccttccgcaagctattcctggacgaggtgagtccgtccctaaatgttatagtggtgccactttctgcttccttttaccatttttaa

SEQ ID NO: 39774 - protein, 236 aa, DROSOPHILA
MNADQESNNHRGSVSSSRSLEIPATPSRSPKKVSFSDELPQSQTPAQQPINQQSAPTVVSHVLQQAAQYLERLHGARDSAEEKTEEVQPERADIRDSSDTSEAAVLDLDALDASADEPAANAGPIVASSPSILIGSVNRQEAIGSANGNGNANPNQRQSNLYMERYNLNLDKNCSSMELEARREKQRWLLISECSALFDEGEGKHTREAFRKLFLDEVSPSLNVIVVPLSASFYHF

SEQ ID NO: 39775 - DNA, 3080 bp, DROSOPHILA
caaaatgccagcaatgcgccgttcgttcctcccgccgaccatctgaacatctgaacggacgaccatgtggccatgtgaccatgtgaccatctgaccagcggcggaaaagtccggccatcgaacggcagcttggaattccaggcataacttctagcagcaacgagcagacgagcatatgtaaaaagcggagccagccagcgacacataagtacacacgaacacacattgctggcgggtttccatgacacaaaaaaaaaaagaaaagaaaagaaggaaaagcgtgctacaaaaaaaaaatggaatggaaaatctagcccagccaagtctctaaattgtgtggccctaaaagtgtccggcggcactaatgctcacagaacgtgcacataaagcaaaagtgctggtgaacttaaatttagatagtagaaatatgaaatagtaagctaactttgataactcatttcaatgagacaggctaatacatttaaataatgcgaatttccccttttaatgcacttgtgcttgcattaggtagtgtggtatttctccaagtgcagtgcccactcaacacgcacacacacacaaatctgtctgtgtccttgccacatgcaacgtctgctgaagctgctgctgttgcccaatggccgcaaggaatttcacacaattgctagaaaaattgcagaaaattgaaaatgtgcgagagcgcataaatttttactgcgtcacttgtgaatgctaaattgttgttatttatgtgggcactgaaacaccacgatccgccactttatcccttccattcccttgaaattccaccagagaagatagaatctctgagaagagttaagatacaaatcgatttcatttcacacattacagatgcctgtcactgagttctgttgccgactgcagtggaatatcgaactgaagtcggcaacagagctctgctgcagttcaaggtcacaggatatggatagtaaaagataacgattatcactttttacatttacaaaatacctcgcttgaatacgtagaagccagtgcgagccaacaggcgaaagaaagtgcttccgaaatgggccatcgatgaaacgatcagcaggccaacgcccaaggatatggccttcttgtggtatctttccagccaattgagcagttctcgagctggctccgccatcagtttgatctgtcgctccattgcgtattcattgcagctttggccgtacaatagtagatacgatacctgcatggtgttcgcatccttgatgatcacttgcttcttatcgcggctggtttcattgtcctggaagacgaactctaccacagccacgcaacgcagtatcgatccgcaacgggagccacccacgccagcctggggcttactcctggccagggcttcattgatatcgcaggttagctccagatactttccattgtccagggaattttgggaattcagaagcgcataaaccttctctagcttgcagccatagaagcccaggcgaacggattccttgttctcttgccgcaaactggcatatgcctcccccttctcattgcccttgcctgttcgcacctcaaagatctgggtgggtggctgcttgggcggcgacatgcccaggtgagcgtacagctcctggaactcgcagggtcgcagtgagctcaaggacacgcgatcggcctgatccaccaggatgtccgttagcaaacgaaccacattgggggagcaggcctgatagtcgcagtgcatgagctgctgctgcagcacctccagtctgggtgcatcacccagcgtattaaaaaccaaatctatggtattccagtggctgggaaatggtctcagccgcgttctgtagcgataactccaggcggcggccataaaaatcgtccacagagcctcacagcccagaaaatcgtcctggagacggcgctggacgagatgtaggtccctcaaatgaggtgtcaccggttttaatgacaaacctatcgaattcggcagtagtgccaccaaacgccgccagctgatccttttcgccggcatttgactgggatatcccaccgagttggcgcccgaaagcagagtcatttccactggatttcgatttccctcacgagactgaaatttggaaattgtaattctgcagagttttcgtcaagccgtcgggcatcaatctaagcctccgaaaatctcgacaatcgaatgaagtgtgtcgctcaggtcgcaggtcggatgattgccccggactggttgcaggagattgaatttcgttctcgaatgcactcgaaaaaattacaaggggattttgtatttcactttagctgtaaataatattggaaaaaataaatttatacagctaattttgacaataaagtctattttatggcattcacttcgaagttattccagcttaggaacttcgcttcgatacactgaaataatgagtattttttttcgagtgcatgcatagtaacagttggcaagtgtgatctctggatgggttatggttgggtggctggctggttggtctgtaattgattaatggagcctgatgtcgaatgcctgatgcctgctgtctgccgcttgatggctgacgctcaccttatgtcgggggtgacttaacctggatcgacccgagttgagatgggaacaccaaccaaccacccaccagccaccgaccaacaacccccgctgccgagccaacggcaacccagagatggaatggtcaaagttgcatcatagctacgcagttaattggatactttttcaatacttttatctctggcagcaaccccattggttgggtcggatcctccacctgctgcttgctgcatgcgtaatttattgatatactcgggctaaattatgagtctcctggggggcgcgagaaggatataattttttgtttttcccgctccacctctcgcgtcgcctggaaaagcggaaaagcgcgaggctgcaggtgtgggtctgtgtgaaaatcagttaaccgaaaaagtttgcaactttttgcccgtgctcgctgcctgtgaaatcaaagttggagtttattcaaataaacgccgacattaagagagttgcaactgtt

SEQ ID NO: 39776 - DNA, 1080 bp, DROSOPHILA
atgactctgctttcgggcgccaactcggtgggatatcccagtcaaatgccggcgaaaaggatcagctggcggcgtttggtggcactactgccgaattcgataggtttgtcattaaaaccggtgacacctcatttgagggacctacatctcgtccagcgccgtctccaggacgattttctgggctgtgaggctctgtggacgatttttatggccgccgcctggagttatcgctacagaacgcggctgagaccatttcccagccactggaataccatagatttggtttttaatacgctgggtgatgcacccagactggaggtgctgcagcagcagctcatgcactgcgactatcaggcctgctcccccaatgtggttcgtttgctaacggacatcctggtggatcaggccgatcgcgtgtccttgagctcactgcgaccctgcgagttccaggagctgtacgctcacctgggcatgtcgccgcccaagcagccacccacccagatctttgaggtgcgaacaggcaagggcaatgagaagggggaggcatatgccagtttgcggcaagagaacaaggaatccgttcgcctgggcttctatggctgcaagctagagaaggtttatgcgcttctgaattcccaaaattccctggacaatggaaagtatctggagctaacctgcgatatcaatgaagccctggccaggagtaagccccaggctggcgtgggtggctcccgttgcggatcgatactgcgttgcgtggctgtggtagagttcgtcttccaggacaatgaaaccagccgcgataagaagcaagtgatcatcaaggatgcgaacaccatgcaggtatcgtatctactattgtacggccaaagctgcaatgaatacgcaatggagcgacagatcaaactgatggcggagccagctcgagaactgctcaattggctggaaagataccacaagaaggccatatccttgggcgttggcctgctgatcgtttcatcgatggcccatttcggaagcactttctttcgcctgttggctcgcactggcttctacgtattcaagcgaggtattttgtaa

SEQ ID NO: 39777 - protein, 359 aa, DROSOPHILA
MTLLSGANSVGYPSQMPAKRISWRRLVALLPNSIGLSLKPVTPHLRDLHLVQRRLQDDFLGCEALWTIFMAAAWSYRYRTRLRPFPSHWNTIDLVFNTLGDAPRLEVLQQQLMHCDYQACSPNVVRLLTDILVDQADRVSLSSLRPCEFQELYAHLGMSPPKQPPTQIFEVRTGKGNEKGEAYASLRQENKESVRLGFYGCKLEKVYALLNSQNSLDNGKYLELTCDINEALARSKPQAGVGGSRCGSILRCVAVVEFVFQDNETSRDKKQVIIKDANTMQVSYLLLYGQSCNEYAMERQIKLMAEPARELLNWLERYHKKAISLGVGLLIVSSMAHFGSTFFRLLARTGFYVFKRGIL

SEQ ID NO: 39778 - DNA, 2249 bp, DROSOPHILA
ccatggaagaaaatatttgatataactttgttaattgataatttcagcgtaactacatttaaatgagcacttgtacttataaatgaggtaatcatgacataaatatttgattttaagttttgagccggtggaataaaatgcgaatgtatgtgcattgcttactgtgcaaatttaaatgttcctttattgtaaatttgacttcttaatctctttcgataattaattttcacttattttttataaactcaaatgcaacttgttctaaaaaaaatatgtacagccccaaatgcaagcaaaaacaacaaaacgggaatagttatatgttattttcctatttatgtttcgcataaataataagcatttcgttttattaaagcaaaacatttacatatatatatatttttttaatgtagccgcaggagacaaacaaaccaactatatatttgcgtgatttgtactggacatctgagattttaggctctctgcaagaacattaatggtaattaatatcggtttcgatatacaaatattactttccttataaaaattccctttaacttcgtagcagacattattgggacgctttttgcccttctggtcatatgcaaatacctgcacgcgaatgctgtaacggccagtacccaatggtatgccactgccaaaaactaacttcatgttataggattctataaggaatagtgtctgaaaagcaaaacaatattacacaatgcaaatatggccttgataatgccacccacaccgggcaccttgatgcagttgtccttgatctcatccctattcacaacgtgggaggaccaatctgtgtaccaaagctgctttttgtcgtacataactgcacagaaatcccgcaccatcatattcaatgtggtcggttgccaggcacctcgatcgaaaaagagcaggtttccagttaactgcaataacaaaaaaaaaaaaaaaaccaaaaatattaattaggaccataggttttgatattatcctaggcaaaaacctcgatgcgatccgttggctgggcattaaacacggatgtcatgtttcccgacacggaaagtccatccgcggtaattgtggtggtataattggtcaaatcaaatagaccgcttatattaagagttccgggtggaacgtcgctgcagtcggaatagatggattcgtcctcaatctcgaattcgtagctgatttgcaacgacaagtggaccacattcaatatcagtattagctccaacatccaatatgttttccgctccatttttctactgatcttcaaataagcttccatttacgatatgcaaccccttttatggcacatttccattgagttttttttttataaaatagcttgtgatttgaaaaaaaaaacacgatgtttccgggcttataaaagccaaacgtataatttgcagattgattaaatggccatcactacaatcacttttgtggaaaactcattttcaggcatatttattatttaattcttatttttatacaagctgatgttatgatgatgatgaaacgtaatgcactaaactgttgctatagcagttattaaatatattacaagataaccaagaaaactgtagatatttatttttgcggttttacatttcttttatgcgctttaatcaattacttctcacacacacacatatgtgttgtgcaagcaagatacttagttattatataatctttttaattgtaagcaacgctcagctaaaagttctaaatactatataactggctttagacccaaacctttattaacataatcaactattaataaatgattacaccagcagaacaggcagcccctgccgtctcatgtgcggtaatccccgactgacctcaactaccaaccgctgagctttaaacgggttgcagagcttgttagcctggtttacacacttctgcgtggcaaggcgcacatttggtgttttatggctatttgggagtcgaggcggcaagtcgcagcaccagtagataacgccccttgctcaacactttgaaaaagtttaaatataaattaaaaagttttccccttttttttttgtgttgtttttgcagctgcatggctggatgttgttgttctatttggtatgtattttatgttcatgcaaagtgaaaagtttgctggacgacatcgaatccaatggcttgctggttttcgggtgaaatggcaaaggggaagggagcagggagcaggaagagaagggaaaaggagttcaaaccca

SEQ ID NO: 39779 - DNA, 249 bp, DROSOPHILA
atgttggagctaatactgatattgaatgtggtccacttgtcgttgcaaatcagctacgaattcgagattgaggacgaatccatctattccgactgcagcgacgttccacccggaactcttaatataagcggtctatttgatttgaccaattataccaccacaattaccgcggatggactttccgtgtcgggaaacatgacatccgtgtttaatgcccagccaacggatcgcatcgaggtttttgcctag

SEQ ID NO: 39780 - protein, 82 aa, DROSOPHILA
MLELILILNVVHLSLQISYEFEIEDESIYSDCSDVPPGTLNISGLFDLTNYTTTITADGLSVSGNMTSVFNAQPTDRIEVFA

SEQ ID NO: 39781 - DNA, 2798 bp, DROSOPHILA
ctgatttctggcagcagcagcaccaccccagctattaatccacactttggcgagagcaccacccccagtggatgggtaaattagtgggtggttgggtggttagtgggtggatgagactggtgctctcctggttgtgcgtgtgtaatgacaagttcaacaacaactcgacattgtcgactggtgacgaggacgacgtgctccgacatttgtttgcccaagttatgcaaatatttttccagtcaagaagtttttgtttaattgcatattttgactcgcattacgcgtgtcataaagcagggatccggagcttaccacaatgccagaagttgggcggggattagaggcactcgaaagacatgttcctgcattttacagttcaaagaccaaactaaacaatcagttttacgagtatagatcttattctgcccaggcttgccattgaactatagctatcttccttagaaattaatttaaattaaatttatatttaagtctctaagatgatattttaaaaataattcctaacacagacgaaatcatggagaagcctttaatatggttcataaaacataatttatttgctgcgttcgaaactgtgaagctgacctacttcatttaaaaacgaaattaaaccgaatatatatagtatgtatacttctgctttagacagtaaaaatgcatgaagattgtttgcttaattggttaaactaaatgatggctaaatatattaccacctcatttatggtaatccgaataaaacgtttaatttttttttggaggaaagcgttggattcgaatttcattgcctggacaaatttaaaaagtttacatttttgaggcatacctatcgcgtatacgctttctttcttttccagccctgacagtttccgagtatcgagtatcgagtattactttctatctttcaatgacaatgaccggcgactttctcactttcttcgtacgcttcttactggcgaaacacaagagcccacaaaggattatgacaagtgctggcaactggatttccgaggagctggaaccagctactctactgtcgattcaggaggataatggtattgttaccaaggtgtacgtggcgccctgtttgcagccgataaaagaggagaaagttttcctggaggacaacacgcaacgcttccactgtccgctttgctctaatgtgattcgcacggccggtgcctacaaggtccatctgatggcctgccaaagacgcttggcacgcatgatgaaggatgtgccggacgtgtcccagcatcagtgcaacatttgcaagaaaatcttctcctcggtggatgccctgatcggccacaggctcctgcatggaagcccatcaatgaatcgcacctgtgcatcctgccatgtcaagttcgggacggatctggagtatcgcacccatttggagagccatctgataccgtgcgagtccacggatgaatcctacgaaggggcgtacaccatcaccaagaccttcaattgcgtcttttgtcgcacggagttcaaggcctgctttaagcctggccaagtgacccgtcgatacgcgtgcgacgcatgtatcgtaaggctgaaggcccaggaggaggagaaaaagatcttagggaagagaaggcccgaattaatctgtgatcgttgtgggaaaaagtacaaatatgagggtttccttcaccgtcatctgaaaacttgccagatgccggataaatgcaaaagaaagcgtgagattgaaatcaccgaggtcagcgaggtaacatttacagaagttgtgcaaagttttaataattgattatacaaattcgcacattttaattttaaattaaataaatatattttttaattgtaatattttttataattttcaaattatggcgcccatcccaccgatatctatttcgatctgctatcgatgtggtcacacttatcgataaatccaccgtggcgtggtatttttgatttaaagcgttagtcgatttcccgcccagctgcacgtgtatatttttttgcggtccaaagaaaagttcgtaaataaacgaatttgcgtgcatttccagcgaacacgatgagttcagacgagtccagcgacggtttggaggagctgcagagtctgaaggccctctacggccagcaggagcaagagaaaccggcaaagatcaaaagggaacgttatattccaaaggcctcgcaggccaaggagctcaactatgtggaggtgcccatggaaaaggtgctcttcggcgacaggcagcgactgctcaccaatctagccaagtccgtgggacaaaagttgccgaacgatgacgaagacgagcaggaggaaaatcccggccaggcaaagccaggcgacaagcggaaagccgcctggtcggattccgatgacgaggacctgcaggtgggcgatgtcaagaaggccacaaagcacacgggtccactgaaccacctgcgcaaggataaatcgtacaaggagtatcttacggcgcgattccagcgcacgcttaaccaacccaagtgggcggaaaagaaggtcaaaaatgaggacgacgaggacgtatcctccgacgaagaactgctgcggacggttggctttatcgatcgtaaagcccggaacagtgatctgccccagaagactctgaattttaaacgggtcaaagacctgaacagggccacatatgccgagggtaatgccaccagcattcagtttcatccaaccagtactgctgctctagtggcgggcatgaatggcctagccaccatctacgccgtggatgggcaaaagaacgaaaggttgc

SEQ ID NO: 39782 - DNA, 798 bp, DROSOPHILA
atgacaagtgctggcaactggatttccgaggagctggaaccagctactctactgtcgattcaggaggataatggtattgttaccaaggtgtacgtggcgccctgtttgcagccgataaaagaggagaaagttttcctggaggacaacacgcaacgcttccactgtccgctttgctctaatgtgattcgcacggccggtgcctacaaggtccatctgatggcctgccaaagacgcttggcacgcatgatgaaggatgtgccggacgtgtcccagcatcagtgcaacatttgcaagaaaatcttctcctcggtggatgccctgatcggccacaggctcctgcatggaagcccatcaatgaatcgcacctgtgcatcctgccatgtcaagttcgggacggatctggagtatcgcacccatttggagagccatctgataccgtgcgagtccacggatgaatcctacgaaggggcgtacaccatcaccaagaccttcaattgcgtcttttgtcgcacggagttcaaggcctgctttaagcctggccaagtgacccgtcgatacgcgtgcgacgcatgtatcgtaaggctgaaggcccaggaggaggagaaaaagatcttagggaagagaaggcccgaattaatctgtgatcgttgtgggaaaaagtacaaatatgagggtttccttcaccgtcatctgaaaacttgccagatgccggataaatgcaaaagaaagcgtgagattgaaatcaccgaggtcagcgaggtaacatttacagaagttgtgcaaagttttaataattga

SEQ ID NO: 39783 - protein, 265 aa, DROSOPHILA
MTSAGNWISEELEPATLLSIQEDNGIVTKVYVAPCLQPIKEEKVFLEDNTQRFHCPLCSNVIRTAGAYKVHLMACQRRLARMMKDVPDVSQHQCNICKKIFSSVDALIGHRLLHGSPSMNRTCASCHVKFGTDLEYRTHLESHLIPCESTDESYEGAYTITKTFNCVFCRTEFKACFKPGQVTRRYACDACIVRLKAQEEEKKILGKRRPELICDRCGKKYKYEGFLHRHLKTCQMPDKCKRKREIEITEVSEVTFTEVVQSFNN

SEQ ID NO: 39784 - DNA, 2625 bp, DROSOPHILA
ctttccactgacaaatggccataagtgtataattggataagaactcgaaagagaaaggccatatgaatcggacatcgggaatggggtatcctccattgctactatttaagctgccaggcgaactcttttatgcagttcacttccagtcggcggccattcaatcaaattagcgagcagtgcaatcaccgggcgaacaaactaatatctgtggccaaaatgcttcatggctgactacttatcgcttaatcacatcaatggaaccataggctgctatcggcgcatctgcataaaacatttagcaacatcaaatcgttactcgcccatccatccatccatccacacacatcaaagccaatcaaaatggcatttcaataatatcagagccgtacaatcgcgtcaacagggggttttccgggatgggtgggaatggtatggcatggcatggtatgtcatgtcatggtatgggggttctgttgtaatggagcgcgcatatttcggctcgaatctgtgtgggtgagcttatgagtcagtgagcagctgaacgcatatgtgtgtgtgtgaatacatcaatgaatcgttcgccaatattacaagcctgagcacacacagctagaaagagagcgaggtagcggagtagacagagacagaagctggcggaaattgtgtcaaaggatactttcgctttcccccaaaatgtgtccttgtccaaatgtacacacacccatacggttgggcgggtgggcgcgtcataaagatattgacaggcccataaagataaccgtagtggattgtgaatgacatgtcatggaagaaattaggcgatgtttctctgaatgattttgccaagggaaaaatcttatctaataagaaaggatacatataaaggatagcatataaatagtacgactcttagacgatgtacgcaactaactatttaaactggggcttaaagcaagccacgcttggccagttttggttttttggctattacacacacacaaacccgtcgacttcgaaattcaaaatttgaccccggatttgttgactcggtgatccttgaatcgatgatcatgttggaggccaccttgcagccaggatatgtgcctgttggcatcacgccaatcttgaattggacagagccaccaagtctaaagcattgtgatgaggattatctgatcgttgtcctggcattgtccatttgcacccagttcttgctgatgacctatgtggcgttcgcagtcatgcaaccgtgttccatgcgaaggaagcagttgattgagggccagcaaaagaccttcgctagcttcatattccgaaggttactcttccagttggacgaggcattacacccttcggtcgaggcggtgcggttagactcctgcttgaggtctggtgaaaagctaatccaggccattcaactgttccggcgagatgctctcaaggtccttcagccagtgcagaatatctcatccgcaatggccagcgatttgtactatgtgctggacgaggaggagaatgaactgaatttcaacggctatgggagctctcattcaaaggtcgaggtcaccgaggaactattggtgtatttgctatatccggaacgaaaagtgtccgagaagaagtaatacgtcggactggggaacctaaatttttggctctacttgatttgtatttttgtataaactttccgcaaagtccactaaattcacgaattaagtaactgccttattgaatttttttttttagataattttcaatattttaataaagaaaaatcgcctttgtccatgctggttttagtttaaaagtactccaaataaaaatactttttattcaaaatcttcaagctggtgagccccacaaatttgacacactaaaatttagtttcagttcactaggccttcgcatgttcttccagggcattgatccataggtgaagtggacctattccccatcctctttttcgtcgcagttgcagcatttcttcttcttgttgttggtcggatcagatccacgtttcggaggacacgcgtcgaagttgctcgcaggatccgccagtgggaactgcttgttgaatagaggctttggtccgtggccagccggaaaatctgcggtcacatgagccttgcaaggagcacactcggcaccggcaccgccggcaaccaccttgctgtgaccactctgtatacccttgctggcaagtccacgaagtggctgacccgctgctccacagtcgtcctgcggccccatggttcgattggtgcctattgtgtgtgtggaaaggaacgcttcggatgttacgcctccacaatgtgggcatataaaggtgggcggtggtacgactgaagcggctttgctctgactcttacccaccgcgcaactgcagtcatcggcaggtgcaggctgcggcgctttcggctgaggagcacattcagcaatgggtgtctgctgtggcttagctacgggactgcaaccgcagtcctcctgcggaggatccgggcaatcatccctgccacaaccgtcgcatcccgactccctttgtgtcgacttgctctcctgttgatagacgtcatcggggtccttgtcggccactggaaaatagtgtccagttagcgcgtcgtgccg

SEQ ID NO: 39785 - DNA, 625 bp, DROSOPHILA
aacccgtcgacttcgaaattcaaaatttgaccccggatttgttgactcggtgatccttgaatcgatgatcatgttggaggccaccttgcagccaggatatgtgcctgttggcatcacgccaatcttgaattggacagagccaccaagtctaaagcattgtgatgaggattatctgatcgttgtcctggcattgtccatttgcacccagttcttgctgatgacctatgtggcgttcgcagtcatgcaaccgtgttccatgcgaaggaagcagttgattgagggccagcaaaagaccttcgctagcttcatattccgaaggttactcttccagttggacgaggcattacacccttcggtcgaggcggtgcggttagactcctgcttgaggtctggtgaaaagctaatccaggccattcaactgttccggcgagatgctctcaaggtccttcagccagtgcagaatatctcatccgcaatggccagcgatttgtactatgtgctggacgaggaggagaatgaactgaatttcaacggctatgggagctctcattcaaaggtcgaggtcaccgaggaactattggtgtatttgctatatccggaacgaaaagtgtccgagaagaagtaa

SEQ ID NO: 39786 - protein, 186 aa, DROSOPHILA
MIMLEATLQPGYVPVGITPILNWTEPPSLKHCDEDYLIVVLALSICTQFLLMTYVAFAVMQPCSMRRKQLIEGQQKTFASFIFRRLLFQLDEALHPSVEAVRLDSCLRSGEKLIQAIQLFRRDALKVLQPVQNISSAMASDLYYVLDEEENELNFNGYGSSHSKVEVTEELLVYLLYPERKVSEKK

SEQ ID NO: 39787 - DNA, 2700 bp, DROSOPHILA
tgacattatacacttaaagctgcaaatatctttttatacatatctataaatagagggccgccatatgtgttgtaatttatggttaatgtgcaaaaatgattctcattcaaatgtgccatgttcaatttgctgcttccagcttttttggaagtgcgagcataaatttgagcaattaattataatctacattagctttcgctttaataaattgtgtgaccacgcaaatgttctgtggtttactccaatgaagtctggttttcttcggttcgaggtggtgggtgaataggcatggaattctcagaaggctcgtaaatttggcgaatgcataaatcacgcaattgaattctaatttttcgacttctgcagacacaacagaacaatgtattcagcttgtgtgggataggcaattcagactgggataggaaatgcattccgagtctgaatcaatcattatttttaatgcacaaatgggagcaattacagtcagtttgggccagacaaaagaatgtctcacttgatttatcgtggtttggccaacgtttgttgaccatgcatcttgtttatcatgtgcgaagtcgctgctttgaatactggctacagattgtggtttgtgtacttattcccagtgtcggtgaaagcgaaagtgtgcagtggaaaaaataataataatatagtttttattacgataattcatgaataaacatttgccaattaatacaaacacatattgtaagagattaaataagcatgaaagctatctagttttatgagatgagatattatgtaaaagctatacacatatttataagtggaactaattcgacgatatttggcgtttttttcggctgtgtaatagtttgtgcggtccaaatagttgatgagactggtgacagttgacaattagcacctggcacacccccgccgccaaagacattggtaaatattgtacccacgaaagtataaaaggcttggccgctaccaaaactctaagagtctcattatgactttctccacctccgtgtcggttattcttttgatctcagcaattagttgttgggcaacagcatttggcggcttgcgagaggatctcaaggatttcgtagccttggttccacgtcgcagaattggttttattgccgccagatactatatcttcgacccgaagtttcgccaggcagtggagtttgttcgcagcgatgagttcatagccacttggcagcaagttcgtgccactccggatttcgtgaatattattaactatgtgagcgattacggttctggctacgacattaccacactggtggacagcttgccaacacgtttgcgtgcctatcaactgtcgcggactgtaccagtggaactgatgctgcgacgcgacctgaacaccttcctctgggatgttattcatagtttacccaggaccagaatctattccttgatagcacagaaatcgaaacagagcactgaattcgccaaactctacaaggctttgagggataaggagttcaaggagctggtgcagcgtgccagagtaagatttcaaaaggtatctagtcgagtttttataacgctccgctttatcttagctttccagagatcttcaggcgcccataaaaaagttgagtcagaagagcatcaacgtggatgaaatacttcaaatcgtatttgaggtaatcagttggggtcccaagacgtcctagattctattgattcatagttttcaaaagcgaaaggatacattttgtatgttcataaggataataaaaatatttattttagatattacctatcaattatcacttatatcatctacatcatcttatatctagcctgatctttaacttgcatataagctatgtgtgaaatatgtgaacttttatatatacatagtttattgtatttttatattattccttacattttagtctcatactcaaaacttcgtaccattttctgtgtgtaaatagacaatcgcaaaatcatcgtatagacatgacctttgggacttagctgcaatctcttcacctgatgtgcagtcagtacaatgtggaaaatcagcaaaaggggaaatcctccagtcgtcatatgctggcacacacgcacaatatgccatcattagtgcaacaggaatccaggtcgtttcacgatgacaaaaatctgttgaatcttctggttggtggcaatgcatcttgctgacgcaatttgcagagaatgcctcattgatttgggcttttgggcccagttatgtactgatatcggatgcctaaaagtcccactgacaagtcggtgataaatttcaacagaatgaggactttatgctgtcgtgcttggtgcataatttgtcgacatcgacatagtttttatggctggcagttgcaagtttatttgccacaaaatgcggccatataagcgttgccaagtttatttcgaatgaaccaaattgcgcccgccatcgctgtttgctgttgttgccgttgatgttgcagccattgctgctgaatatgcaacaaaagttgttgcactcgcaacgcccacaacacacacacacacatacacacatatggctagctgggaagccaagccaagccaagccgatccggcacggcccacatcattttgcagcagtttttggctgacagagatgcagaggcggcgaatgggaacgaatgcgatgcctcagctggcatttggccccctgcg

SEQ ID NO: 39788 - DNA, 645 bp, DROSOPHILA
atgactttctccacctccgtgtcggttattcttttgatctcagcaattagttgttgggcaacagcatttggcggcttgcgagaggatctcaaggatttcgtagccttggttccacgtcgcagaattggttttattgccgccagatactatatcttcgacccgaagtttcgccaggcagtggagtttgttcgcagcgatgagttcatagccacttggcagcaagttcgtgccactccggatttcgtgaatattattaactatgtgagcgattacggttctggctacgacattaccacactggtggacagcttgccaacacgtttgcgtgcctatcaactgtcgcggactgtaccagtggaactgatgctgcgacgcgacctgaacaccttcctctgggatgttattcatagtttacccaggaccagaatctattccttgatagcacagaaatcgaaacagagcactgaattcgccaaactctacaaggctttgagggataaggagttcaaggagctggtgcagcgtgccagactttccagagatcttcaggcgcccataaaaaagttgagtcagaagagcatcaacgtggatgaaatacttcaaatcgtatttgaggtaatcagttggggtcccaagacgtcctag

SEQ ID NO: 39789 - protein, 214 aa, DROSOPHILA
MTFSTSVSVILLISAISCWATAFGGLREDLKDFVALVPRRRIGFIAARYYIFDPKFRQAVEFVRSDEFIATWQQVRATPDFVNIINYVSDYGSGYDITTLVDSLPTRLRAYQLSRTVPVELMLRRDLNTFLWDVIHSLPRTRIYSLIAQKSKQSTEFAKLYKALRDKEFKELVQRARLSRDLQAPIKKLSQKSINVDEILQIVFEVISWGPKTS

SEQ ID NO: 39790 - DNA, 2465 bp, DROSOPHILA
ctgtccgagataagaacattttgttgttgtgaaaacgccctaattaatgcttaatttaggtgcaattttcccagcatattgaccgtgctgttggtctgtttcgggcatggactccactgctgtgtaggtccacctctgtcccgttctgattcgttggcttggggctcaagtggcgtgtccgtgtcatttacctggcagccactcaagtggcaagaggacaggtgcacggggtacggggcacggggcacgttggactctgcggatcggtacaaagttctgatgcggtttttgctgcaattatataatattgacattagtagcatgttgcccgtcgctttatgtttacgacgaggccagagattgagggctgcttctagctttgagcttaattgcaaaatgcagcagcagatgcggcgtcgtaaggcgaagataaagttgcggcatcatcagcagaaatccaaaatcaatattatcgttaatgactcaattacctgatgtgcgtttcaatttaatagcttaatgtcatataaattaattgcattcaccagacctcgagggctgtgctgctctgtaaaattaaatcatcatctgatggacatttttgcatttctcgttcacaggctctttccaaggattcgtacgttctgatagttattcgtttacacatatccaggcgcttcggaccgtttaactgcagagactgctagaaaacatagacgtaatcttccaagaggacaacgcatatcaggaggaggcaaaacccgtaacaaacgattgcaagcgagaaaaacatatcctgcatcataaatcattgccaggctttgattaatgttgcgtatacgcaatgttgtcggccaacgacttgtactctaactaagtgaaagctcaaatcgctcaaaaaggaaagatattcagaaccggcttccattagcaccttctgggttacaatcaacatctccatcagcagcaccggttgagaccacaaatccagaaaccaaagatggccttcatctggcggcgacgttcgacgacgattgtgaagctggtggccttcgccctggccatttggttttgcattgccttcctggtatacacggatgacacccggcgtagagccgcccaggagggggctggtgccagtggggcaggcagtgctcccggagtgggcggcggagccggaggactgggtgatcccattgccttggctctgagaaacgagcctgctggcgaggactttggcatcaatgggaatgtcatcggcggaggaggacagaagcaggcgcacgatgaggccgacatcccacccactgtgggaaaacataaggctgacctacaggcggaaaggatgcggaagaaggcggccgagcagccaaagaaaaagccacaagaaggtgagtctagctgtttttaaccacaatttttttgcccttggtatttgtttatagtaagagaatactttatgtaagagtttgtcgtacaaaatctaccttgtagatataacagaaacttatacaataagctaggctattctcattttccaaaaaatatttatcgagggatttccagtatatccggcattctccctctgttctgtgctcaacaataagcatttatattgaaatcagttgcacatttatttccgactcagatccctgcgatattccccgctgcacgccaaactattcagctgaatttttccggtcttgttatcgacgccagagattctatttttcctcgtccaaggctcccaccctcgttttgcatctaagagtggagttttttgcacttcatttccacgcaatcgcttgcaactaattcccatcaattcaatgcacacgcaggcgagatcctccacctcttttccacccattttcccccacgctctgagttttccagctcgttttttacggtcacacatcctcaatccttgtttggtagattgcattttgggtcactagcccgtttcgatacaagatgctgaaagaagcgtaccaaacgggggataataacacatattgctttcctgtgttcaccattccccgcttcccaacccgagagctttccccctgtgctgcgaggaaaacttgctgctgtcacacttccttcttttggccaccgcctttgtgcctttaagaaaatttctaacaagttttacaacaatgtcgatgatgccagcggagcacactaacaatccgaacaacccgaatagcccggagaacaacatgcagcacttaacaacttggaattgctgccaaacagcattttcaatgtcagggcgagggaatccagagcgggcgggtgctccgtcgagatagatattcgcattaagcatttggcggggcaaaaaaaaaataatgttacttactaatcaagtcaaggcttaggagctggccctgggattttactcaatggacacttgactggccgcccaggcaaatcaatgaagccagaccaaagccaaccag

SEQ ID NO: 39791 - DNA, 411 bp, DROSOPHILA
atggccttcatctggcggcgacgttcgacgacgattgtgaagctggtggccttcgccctggccatttggttttgcattgccttcctggtatacacggatgacacccggcgtagagccgcccaggagggggctggtgccagtggggcaggcagtgctcccggagtgggcggcggagccggaggactgggtgatcccattgccttggctctgagaaacgagcctgctggcgaggactttggcatcaatgggaatgtcatcggcggaggaggacagaagcaggcgcacgatgaggccgacatcccacccactgtgggaaaacataaggctgacctacaggcggaaaggatgcggaagaaggcggccgagcagccaaagaaaaagccacaagaagtaagagaatactttatgtaa

SEQ ID NO: 39792 - protein, 136 aa, DROSOPHILA
MAFIWRRRSTTIVKLVAFALAIWFCIAFLVYTDDTRRRAAQEGAGASGAGSAPGVGGGAGGLGDPIALALRNEPAGEDFGINGNVIGGGGQKQAHDEADIPPTVGKHKADLQAERMRKKAAEQPKKKPQEVREYFM

SEQ ID NO: 39793 - DNA, 2432 bp, DROSOPHILA
ttttgaaattaaattaattggtgagcagttaaaatgaatttcggaacttttaatctcgatatcataaaagatctaaatactcattgtaattgaattagttggaatggaatttgggaacattcattctaaaattaaacaggataacatgatcgtatatatttaatttatattttaaccttttgcattgcaaggactattctatctcccgtaaaaacaaagcaatttcagcacttatattttagaaaattgctagccaaaaatatttcagcaccctaaccgccgtcaatctatataatttgagttccttcgctgcattttccggcggcataaattagcattaattcataagtcagtagtcaggccaccaattgcaatccaaaaaaaaaaaaaaagaaaatgaagcagaaaggaaaatgtttttcggctggaaaagcgaatttgcatacaaactgcaatgttcgtacaacgccccccgaacaacaaattatgtgtggggggcccacaggggccgtgaaatggtgaatagggtcctagtaggcctcgtaggattccgatggcttcacttgggtttgtggcagtggcgaatggtggattgaatggggggggaatggtgcgacagcctaaacgccggcaatgttcctgaataatgggccaccggcgccaactgacgttggtaggcaattttctaggaatctagatgggtttgcgtcgtgtgtctatggtgaggtgcaactctatacatatacatatgtatgtgtactatatgtaccatataggtgcacatgttgtgcggcaaagggctactgcataatttatttaatcgcgggcaacaaatctaaattgatcgttaggcgtaggcgaacgaacagccagctgaaccaacaaaatgtctaacaaggatattgcatgttctctatatgtattaaactattttttccaccgcttttccattgcagtgccaattagccagagaggtttttcaaaaggcggtcaaaggaatatggcgccccaacaacagaactccacattcatcgatgataatctggacagctgtccatcgctattgaatctacccgaaagtcccattcttccgccgcgacgatgtcaaaatcaagacaccaacaataataataataataataagcaggctgcattcgaggagcgtttggtggatgaatcgccatcggtgggggagccaccattagcaccacccatacctctggccatacccatggcaccagcaccaccacatcggcaagcatgcaaaaataaacacggcagggaaaacggaaacgctggccaggccagtcgtcgccaccgttccatttccctctatggcgttaatagcactgtggtaagtgcctcctcctcctgctcctggtcctccggctcctttggccactcaccaccccactccagtccccgcccctgattttcggttgcgccagcatttccactgaaataaaacaaatcatctaattgggtgggcagtcactggcggtagtcatatgcttatgtggatagggttatacttacatataagcgtgtgtgaaacttcgatagtgcgtctgttactcaagaaattgattgcaaccttgcgttttcgtaagaatcgaaaggagacttaacttaattctttagatattatctaatggttctggtaatgggcttagaactcaaaagggagtcgtttattgaacaggataacatttaatggacttgcttataaataaataagataaaaatgagatttaactcaatattaccatttaattatattggcttagtaggaaaatatatagagcttccaccaaaatataatcaaatctaaataattccttgagcactttcatatctatccaatatagaaagttagtacaggtagatttcaatacagttgattgactattattatgagtattattctttaggagtttaccttaaatttatattaccttactataaagaaattctttgaaaatttcccttgcttctaaaacccataccccatcttacaactcattcctaaaaacctggcaatcctcttaatcgatctacatactcctctgttcttctggcaacccttcaggagcaaggccacaaggaaatacccatctggatggacgacggagaggctcgttacgtatccggagtgacgaacaagacgacgtgcgatgacataatcaaggcgctgattgatgacgaactgcgaaacggcaatggattctactgcggcaataatccgaaaggtaggttaataataataattcccaggcgatcctgtcgtgactgctacttttttttttatacatcacaatttggctttttatttatttatgctccttatttacaatttcttttattttctctcattttgcgtttcgttccgtttcattcaattttcccgttttccgcacgttggaaaaacaaga

SEQ ID NO: 39794 - DNA, 432 bp, DROSOPHILA
atggcgccccaacaacagaactccacattcatcgatgataatctggacagctgtccatcgctattgaatctacccgaaagtcccattcttccgccgcgacgatgtcaaaatcaagacaccaacaataataataataataataagcaggctgcattcgaggagcgtttggtggatgaatcgccatcggtgggggagccaccattagcaccacccatacctctggccatacccatggcaccagcaccaccacatcggcaagcatgcaaaaataaacacggcagggaaaacggaaacgctggccaggccagtcgtcgccaccgttccatttccctctatggcgttaatagcactgtggtaagtgcctcctcctcctgctcctggtcctccggctcctttggccactcaccaccccactccagtccccgcccctga

SEQ ID NO: 39795 - protein, 143 aa, DROSOPHILA
MAPQQQNSTFIDDNLDSCPSLLNLPESPILPPRRCQNQDTNNNNNNNKQAAFEERLVDESPSVGEPPLAPPIPLAIPMAPAPPHRQACKNKHGRENGNAGQASRRHRSISLYGVNSTVVSASSSCSWSSGSFGHSPPHSSPRP

SEQ ID NO: 39796 - DNA, 2825 bp, DROSOPHILA
aaaacaagatggcggccagaggaaaacggcagcagcatcgcgtgactacagcgattacattataacggaaagttggggcggaatagagcggtgctatgatggcaacatggccattttgcccgtttggcgcgcttggagccgtgtacacaatgaggtaatggcaacggtcggtggaccaggggaatcccacctggcgtgcagaaagaaaaggaacaaaataaaacagaaacaccagcgaacggggcccgaaagcacaaaaaaaaaaaccaaaagtctacagtgattgcataataagcgcttttttcctggcgccacacgcaagccaagaaattcatgtcgttctcgaaaacccattccatacgttctctatatccccctttcaaagtcacacccgcgcctattatatatgtacatatgtatatatatatgtacatatatagtaccactcgcatttgacttatgctttggcttttcgtatttatttgtttatgacgcacagagtgaaatcaatttgcttattgatttttatatcaaagttcatgttttcgttttggtctaattatgttgtaaatgttttatgaccccaaccattagcaatgggaataatgttattcgaggaaaaggaactcctaattgttatttgatgatcttatccagttaatggatggaaagggttaaaaacaagcgccaaggtagttttattgttagagatgtattaatgacaatataatcataaagtgggatatttagttttaccttgttttgtataaataaaaaaatagtcaatttgtggcgtaaataagaacaatatacagtgaggagtaaaacatggtcaagaagtcataaacttttaagtttttaacgaacttcaattcattaataaataattatttctcctgtttttttacagctccgcatctccttaaaacatcgtgatagtttcagagatccccttgccatgcaattagtgccccattcacaatcagccacgggattttcgatgtacaagtggctcaagaagctattgcatctgaaaaagggtaaaaagacgccaccaaaacccacaaaaacgcctccaaaagtgccgaacaaattaaaggagaagagagtgcacggccaaaagcaaacgatgaccaatgacttggtgctggttataatgccagaccaactgtataggggtaccgaaaacactgccaaatccaaactttataaactggccgagaatcgcgtcagcaagcagcgtcatcgaagaagaagtcgtcacgagataaccaaagcctcggttgaaacatttagaacagcgattcccagcgaatgcaataacaacaactacaatgttaataactgcataaggaggcgaaaggataagcccttgcgaaatagtgtacgatataagttggcatctcttcatgccgatatgaatgttcgctatgaaaaggaacacgctctaacacgtcagctatcggaaatgtgccgactgtaccgattgcagaacgaacggtacaagggaccggaaatggagctatcggtcgggcagttgcaacaaaatatcgaagcctatgccgaggacattattaaaactgaacacgaacttctcgaattgaaaaatgaaattaaacatgatatatcgctgattaataacttaaagcgtctgacgttggaggaatcggaggcagatgccgcctgtaaaaaaggcgcagcaaaaataacacatcccttacaggaaaatgaaaatacccctcaagttgctaaaaatacgcaggaaatgcagtttgttgataatatttacgagttttgcgataataatgccagtatgctggtgtaattgcaattatttgtaacttgttaagttttctaccaaaataaatatacattttgtataagcattataaattaagactttttaatggttgtgtttttgaaagacttgttaatgattaatgatttcaaattacttaataatacaagttttaaataattttaaaacggtagtgtgtttttagggaacaaacttattgaactatctactttactatttcactatcataaacgttcaataaccatatgaataatcttaatcttaaattcttaaaactcccaactgttaaaatgacagtttttttcgatttatgcgtgagtaccgttaaggggtttgagtcagggtaagtgtcaatcaaagactcaaacccacatatgtttctggacaaacattttggatacatttgaactctggtcccattcaatcctggcagaaaacaaaacccatcaaattaaaagtattttaagaaaagttgtcaataatttcgggtagcaaatcactacttactttacaacgagttttgctcaaattcgaagctgcatcacctgcatttaggacagccaaacaaatttaatcgtcttaattaggtaagttcaatggtggctcgcagaacgtggtcgcaatccacattttcagtagtggtggtggtgatttgttgttgcagtacagtaacgcaacggatttgattaaaacattattaatatcttatcgatagacgtgcacagatccagcaaaatcctctctggtgactggtaattcctgctattactttttgagtgggtggggataaaaagtgaaagctactgcgcttctgccgcctttgttgcaaatcccgtttgggccacagatgattaatgacctttttgcaatccactcgtactaacccttctatttgcattcgaatttgcatgcagcaagcaatggcacgtggacaccagaagatccagtcgcaggcgaaggcctccgagaagcaggccaaactaaagaagcaacaaggacacagtgc

SEQ ID NO: 39797 - DNA, 825 bp, DROSOPHILA
atgtacaagtggctcaagaagctattgcatctgaaaaagggtaaaaagacgccaccaaaacccacaaaaacgcctccaaaagtgccgaacaaattaaaggagaagagagtgcacggccaaaagcaaacgatgaccaatgacttggtgctggttataatgccagaccaactgtataggggtaccgaaaacactgccaaatccaaactttataaactggccgagaatcgcgtcagcaagcagcgtcatcgaagaagaagtcgtcacgagataaccaaagcctcggttgaaacatttagaacagcgattcccagcgaatgcaataacaacaactacaatgttaataactgcataaggaggcgaaaggataagcccttgcgaaatagtgtacgatataagttggcatctcttcatgccgatatgaatgttcgctatgaaaaggaacacgctctaacacgtcagctatcggaaatgtgccgactgtaccgattgcagaacgaacggtacaagggaccggaaatggagctatcggtcgggcagttgcaacaaaatatcgaagcctatgccgaggacattattaaaactgaacacgaacttctcgaattgaaaaatgaaattaaacatgatatatcgctgattaataacttaaagcgtctgacgttggaggaatcggaggcagatgccgcctgtaaaaaaggcgcagcaaaaataacacatcccttacaggaaaatgaaaatacccctcaagttgctaaaaatacgcaggaaatgcagtttgttgataatatttacgagttttgcgataataatgccagtatgctggtgtaa

SEQ ID NO: 39798 - protein, 274 aa, DROSOPHILA
MYKWLKKLLHLKKGKKTPPKPTKTPPKVPNKLKEKRVHGQKQTMTNDLVLVIMPDQLYRGTENTAKSKLYKLAENRVSKQRHRRRSRHEITKASVETFRTAIPSECNNNNYNVNNCIRRRKDKPLRNSVRYKLASLHADMNVRYEKEHALTRQLSEMCRLYRLQNERYKGPEMELSVGQLQQNIEAYAEDIIKTEHELLELKNEIKHDISLINNLKRLTLEESEADAACKKGAAKITHPLQENENTPQVAKNTQEMQFVDNIYEFCDNNASMLV

SEQ ID NO: 39799 - DNA, 2765 bp, DROSOPHILA
ctcaagttgctaaaaatacgcaggaaatgcagtttgttgataatatttacgagttttgcgataataatgccagtatgctggtgtaattgcaattatttgtaacttgttaagttttctaccaaaataaatatacattttgtataagcattataaattaagactttttaatggttgtgtttttgaaagacttgttaatgattaatgatttcaaattacttaataatacaagttttaaataattttaaaacggtagtgtgtttttagggaacaaacttattgaactatctactttactatttcactatcataaacgttcaataaccatatgaataatcttaatcttaaattcttaaaactcccaactgttaaaatgacagtttttttcgatttatgcgtgagtaccgttaaggggtttgagtcagggtaagtgtcaatcaaagactcaaacccacatatgtttctggacaaacattttggatacatttgaactctggtcccattcaatcctggcagaaaacaaaacccatcaaattaaaagtattttaagaaaagttgtcaataatttcgggtagcaaatcactacttactttacaacgagttttgctcaaattcgaagctgcatcacctgcatttaggacagccaaacaaatttaatcgtcttaattaggtaagttcaatggtggctcgcagaacgtggtcgcaatccacattttcagtagtggtggtggtgatttgttgttgcagtacagtaacgcaacggatttgattaaaacattattaatatcttatcgatagacgtgcacagatccagcaaaatcctctctggtgactggtaattcctgctattactttttgagtgggtggggataaaaagtgaaagctactgcgcttctgccgcctttgttgcaaatcccgtttgggccacagatgattaatgacctttttgcaatccactcgtactaacccttctatttgcattcgaatttgcatgcagcaagcaatggcacgtggacaccagaagatccagtcgcaggcgaaggcctccgagaagcaggccaaactaaagaagcaacaaggacacagtgccaacgaccagaagaaggcggcccaaaaggcacttgtctatgtgtgcgccgtttgcaaggtgagccagctacagtgaagcctctgtaaagcgaacaaactagagtttgaaagtgcctattgcatttcatccagaaggttaacttctgtatgatggagttattagtcaactcaaataataacaaaatgtagtgctccttaaaactatcataatcagaaacacttttacttgtgatattgttttaacactagtttccgctcttacccatgtttttgagtgtataaaaaaaaagtatttcaatttatatgcacttcctactttattaacattaactgcttttacttgttgtcgtaagtaattcaaattaatttaattgaacatgaatatttaccaatatcaaatgaatatgtttgtccaacgttatcttaaattaagtgatgaccaagcactgctgatatttgattactttaaatgataacatattgatatacgatcactgttttcaagttgctatatttgcacccctagttcctttatgtatgtggataacaatttgggtgaaaacctaatcgaatctcgcctccatttcagtcgcaaatgcccgatcccaagacgtataaacagcacttcgagaacaagcatcccaagaacgacatacccgaggagctgaaggaggtctgatgatcgtttcactttaagctgaacgagatggacgagttgcctaccagtacgaaacatttgcaacaataaatttgcatcagccctaagaagaaagcccacaatcaagccgaagccaagaggatggataatagtcgtaataataatatacaaatgccagttttttcgtatacacactgctgaattttggttttgttttatacattgaaattaacacagtatgcgattgttcgatgtgtggctaaaccaatacaaagacacctacctaccttaaaaaatgaatagaaattgtttaattttgatatttattgcctaagccacaggaagatatctaaaacaccataaatactctgagctccgttttggatttttgtttacacgtgaaagttttatacgaattatgccacaaatgaaagaaaataaatctttttgtactataactaatttatgtaattgacaatttataaataaaaatgttaaaattatataatttgttataatataataatttatttaaatattattttagatgtgcttttagtttaagataaaaataatactttttcgggggagtaggtaatatttttaaattacgaacatataacaaatacttttttattttattacgaaaaataaaaatgttgaaatgcttaaaaattatacaaataattagaaataggaaaatttattacgagtaccgttaagtggtttaagtcaggatagctgttagtccaagacgcgaacccacatatatttatgcccaaacattttggatatagttcagctctggtcccatttaatcctggcagcgaaacaaaacccgacaaattgatacaaatttacggttaatcgttaataatttcgggtaaaaaatcaaaacagtttgtaacaacgaattttacgtaactgcaaaggctgcatcacacctgcatttagtacagccaaccaaatttaatcgggttaattaggtaagcagcggtggattcgcaaaaagggcgcagaa

SEQ ID NO: 39800 - DNA, 234 bp, DROSOPHILA
atggcacgtggacaccagaagatccagtcgcaggcgaaggcctccgagaagcaggccaaactaaagaagcaacaaggacacagtgccaacgaccagaagaaggcggcccaaaaggcacttgtctatgtgtgcgccgtttgcaagtcgcaaatgcccgatcccaagacgtataaacagcacttcgagaacaagcatcccaagaacgacatacccgaggagctgaaggaggtctga

SEQ ID NO: 39801 - protein, 77 aa, DROSOPHILA
MARGHQKIQSQAKASEKQAKLKKQQGHSANDQKKAAQKALVYVCAVCKSQMPDPKTYKQHFENKHPKNDIPEELKEV

SEQ ID NO: 39802 - DNA, 1943 bp, DROSOPHILA
tatatatatatatatatatgtaattagaatagttatagaatgaattctttcatattaccgattgcagtagctttgcagctgctgttggatgttcgacttgtgtcccttggtgtccccaaaattggccttgctctcgatccagttgatcacagagcctttgtaaagaaatggcaggatcatcttgatgtccggcgtcttgtcatatcccatgcgtcgcaaatctttctcgtcgtagaaatggatacccgcctccttagccagattcttaagcttaagctcgtactcctcgccaactatgcggcgtcgcaggtccgttatggatccctcttgattgtcgctgactatgcactgctgcacattggccgccagcttgggatcgtcgataagatgcggatgcctaagaagctgtgagatgtgcgatcgatgccgatccttgtacttctcctgcagcaacatcctgcagagagccaccgggttcagtgcttcggcacaagccattcggatcagtagggcattgtcgtagtataggtttttctgctcctcgtagctgaatccaagcaatttggattattattggtcatggtgtcaggaaagaacacgagattgtggccttacgctttgagaagccttttcccgcgctgatcctgcttccagtgaccacgcgaccggttaaaaagctccgactgcaggatgcatgtcaatgccattggctccacgtccctgaagaagcgattcctcaactcgaactcgcagtcgatggccaagccgtggaagccgttgataaaccggcaaatcttattgtattcgccgccgctcagaatctttcgcttctgttgcccatttccgccggccaaatccggaatttgggacatcatttccggccagaaatacaaaactatttcagcgaacgtatgaaagagcgccagaataaacagctgtttaacgtacgctaatcgaatacacattttaatttatcgatagctgacgtgcctgaagtttctccacgtcgcgaagcgttcacactggtcggcagtgtatatcgaaatgttccgaatgcatttagttcaattattttcataaaattgttatcataatattgacttcttgaaaaatgtttaaaataacaaaatgtgtgtagtgccaccaaatcagtgtgtgcgaattaaggcctaaaacaaaaacaatcgggttcgagcatcggctatcggtaaaggatccaatatcgtaactattgtaccgatgcgtaccagtaccgcgtaacggtacattgattgcattacaaatttataaattatagaatataatacaaaatagtacacttggatatttatttttaattattttttggcagcaatttccgcccttggctgtaatgtattgaatgaaacaaagtgtcttaattttgatatatttttatttttatatattcttatacatagcacgggtttacgatcatttcttaggttaacacttctattatttgcgttaagcacttttaccactcaacacaactaggaaatgttattttttaactacgcataatgggtggtatgcgaatttttgtataattgttgaccattttgacttaaagctataatataaataagcttggttttttataaatgctattcttattcatcatttggaagcaaagatcattcctttttgctcgatttaacaacagtttataaatgtgcacctaaaataaactaaatgagatacgaaagcgtgtaataaataataattttgaataaataattgtttaatagtgttggtgtaaaaggcaacaaagaaaatgtgttgttattgagagtctacttgtgttttaactcccttatctaagcgattaattcgagttggttcattcagctcgatggtcaaacttggtttaacaataagtcatcttaaaacttgacctgattccggccgaaaactcttaccgg

SEQ ID NO: 39803 - DNA, 821 bp, DROSOPHILA
ttaaacagctgtttattctggcgctctttcatacgttcgctgaaatagttttgtatttctggccggaaatgatgtcccaaattccggatttggccggcggaaatgggcaacagaagcgaaagattctgagcggcggcgaatacaataagatttgccggtttatcaacggcttccacggcttggccatcgactgcgagttcgagttgaggaatcgcttcttcagggacgtggagccaatggcattgacatgcatcctgcagtcggagctttttaaccggtcgcgtggtcactggaagcaggatcagcgcgggaaaaggcttctcaaagcctacgaggagcagaaaaacctatactacgacaatgccctactgatccgaatggcttgtgccgaagcactgaacccggtggctctctgcaggatgttgctgcaggagaagtacaaggatcggcatcgatcgcacatctcacagcttcttaggcatccgcatcttatcgacgatcccaagctggcggccaatgtgcagcagtgcatagtcagcgacaatcaagagggatccataacggacctgcgacgccgcatagttggcgaggagtacgagcttaagcttaagaatctggctaaggaggcgggtatccatttctacgacgagaaagatttgcgacgcatgggatatgacaagacgccggacatcaagatgatcctgccatttctttacaaaggctctgtgatcaactggatcgagagcaaggccaattttggggacaccaagggacacaagtcgaacatccaacagcagctgcaaagctactgcaatcggtaa

SEQ ID NO: 39804 - protein, 250 aa, DROSOPHILA
MMSQIPDLAGGNGQQKRKILSGGEYNKICRFINGFHGLAIDCEFELRNRFFRDVEPMALTCILQSELFNRSRGHWKQDQRGKRLLKAYEEQKNLYYDNALLIRMACAEALNPVALCRMLLQEKYKDRHRSHISQLLRHPHLIDDPKLAANVQQCIVSDNQEGSITDLRRRIVGEEYELKLKNLAKEAGIHFYDEKDLRRMGYDKTPDIKMILPFLYKGSVINWIESKANFGDTKGHKSNIQQQLQSYCNR

SEQ ID NO: 39805 - DNA, 2640 bp, DROSOPHILA
gattacataaccagcatctggagagtggttttagcttggccaagtcagttggtcagtggtgctttgtcggtctcaggttgctggaatcgataggattgctttttgggcggtgcggcaacttgtcgcaactaaaaaccaaaaacaaaaataaaaaacaaaaaatacagagagccgaaaaaccgaaaataaaacaagtcccccaacatgtattcataattcaggcttttgatctcgcccagtctcactttcgactgcaaatactacccagtcgatccaattcgatctggtcgtgcaattgaaccgttccattcagttattcaataccaggcccactgacataatgaccagcacaaaaacaaaaaaaaaaatacccaaaaaatcagaagacaaaaaccaaaaaaaaaagacattttggaaaaccaaatttgcccgaatgggaaaaaaattcggcgaaacaacaagcgaaaaattcaaacgcccatcaggccaaaaatttgattgagttgctgctgctgctgcgagttgctgttgctgctgcgagttgctgctgctgctgcattggcaagaactaattgcgaccttggcgatcactcgcctcgtatcgtgcacttatgtagattgtgtgctcgcgggcaaattcgtctatgcgccgactttaatgtgtctatatctataaaacccgcgcatatagtatctgcgccgatcgccaaaatcggcgaatggcacgttcacacacacacggcagtgcagatcggtggttttatttttcaatcgaatggatcgcgaacaacaagatcagctttatgtggaaaacgtctgtggaaattgcgataagatggtgccaagtgaatggtcatcccatcacgtatccaatcttttgtttggcgtccagaaaaaaagataaaccttgattagcatatcttttttaatcgcaataaagatttttgtatattcatttttaattttgaatggaaaataaaaacttgttattggcataagtttagccgcaagctaaaattcattttaatctttaatcttttggctttggttaattgatgtttgcggacagcaatttttaaattaataaattgagatctatgtgcaagtagaaatatctttcagatgtgtcattccagaagtatcttatcaaaaaagataatacaaggaataagttttaataaatttactagtaaagatatattatattataatatatatattatttatataatatattattaagatagtaagtaacacttactcttgacggcccacatcttggcatcgctgagcccgcctagatagctcctcatgtcccgactgcagttggcggacactccgccggagctctccacctgaccccactgggcggccaggacggcgagatcgaagacgttgagggcgtccctgaggcgtcgggtttgggacagatcatagctaagcttgggatcgacatggggcagcagagtggcagccgtaagatctccgtgcagactgaggttaatcacattgtgctggtccggagcggaacttaggttatgtctgcccggcggaaacttgccatcgtccttgtcgatggccgcctgtggcgttgccagcagcgagagcagcattgccagcaccaaagtcctgcgcatcatatcgctacgctgcgtttgcgccctatagtcgatatatgtatatatgcaaattggctgggcacgacgttcctgcgatgtcttttgctttgctttttttttccggcctgcttcactttcacttcacacgacaaacaaacaaaaaaaaaaaaaaacaataataaaatccaattcgggttaacagggaattatttatgtattttgcaccagcattttcacaaccaaaaaaaaaaaaaatggaggatcaacacactcggcagaaccgttagaattcggtttaattcttttctatttattttgttagcactttattttttatttcttgttttttttttttgttttggataggagttgtgggaaaaatgtattgaaaacacacgcgcggcttattataacttttcagctttatttatatttttggggagctgcgacgaccgcttggcatgaacgcacgtctacgaatcgcgactgcgcgtcttgagcagctgtaaaaatatgttaacaattccaaaaacgcaggcccaaaaaaaagacaaaaaaaatttttttgagctcagctcaagctcaagcttgatctcaatctcagacactctctcactctcgctctctggcagcgcgggcgctctccgtctctcgaaagcgcaagttgtaccgttagcagcactttcgttggcagctcgagcgcactctcccagtctttctctctcttgggaaaaagcaaaagccctgcgtcatcgactatgtggtaatatctttcatagtgtgtgtgtgtgcgtgtgcattatgttatggaattttgcgagagtgtgagtgttgcaaaagtggccgcaaaaatgaaattagccattgatatttgaatacgcgacgaggtcttgaggatcgcaatcgcaatcactataaaccactatagccatatagccagcggtcccaaattccagccaagtcggtcaaatcagttaagccaagtcggttaaataagctaaatggattcgcactcaggcaa

SEQ ID NO: 39806 - DNA, 390 bp, DROSOPHILA
atgatgcgcaggactttggtgctggcaatgctgctctcgctgctggcaacgccacaggcggccatcgacaaggacgatggcaagtttccgccgggcagacataacctaagttccgctccggaccagcacaatgtgattaacctcagtctgcacggagatcttacggctgccactctgctgccccatgtcgatcccaagcttagctatgatctgtcccaaacccgacgcctcagggacgccctcaacgtcttcgatctcgccgtcctggccgcccagtggggtcaggtggagagctccggcggagtgtccgccaactgcagtcgggacatgaggagctatctaggcgggctcagcgatgccaagatgtgggccgtcaagacttgcggctaa

SEQ ID NO: 39807 - protein, 129 aa, DROSOPHILA
MMRRTLVLAMLLSLLATPQAAIDKDDGKFPPGRHNLSSAPDQHNVINLSLHGDLTAATLLPHVDPKLSYDLSQTRRLRDALNVFDLAVLAAQWGQVESSGGVSANCSRDMRSYLGGLSDAKMWAVKTCG

SEQ ID NO: 39808 - DNA, 2876 bp, DROSOPHILA
ggtatatttgccagcactgaaaaattactatttgtaagaaaataaaaacaataaaacaaaactaatttccagatagtcgaaatcaaaaagggaatttgtactaaaatcttgagaataaaaacaacgaggagagaaaggcaaagtatactttagttgccaacacaaatacacgcacactcaaacaactcaggctaacacaatagctacgtttaagtagccaagctcttttaatgtatgtaagtcaattcaagcaggctctagttagagaacaaaagaaatgagcaaaaacctaaattccacacatagtatgtacatttctacatctggaaatttttccatatttgttgtccgtttacaatgaaatagataagataaagggttaagttgatcgatcgctgcgtagctcgcacaaaacaaaatgttcttttaaaaattttcattgaaatcattaccagtttatcagttaaatggttcatttacttcatagtatgttaagtttactaaaatgagcgctattattttggccccaagtgtatgagtgtgcccttcaactgcttccatttaaactgctttgcaggatttctatttctggagcagcacttgcgcatgtcctgaaaaaatgcctgttgcatgcagagattcgtggacctaccccaaattcccacagatgcataaaagttggctgatgatttttcagtggacaattattgacagagtatcaaaaaaacaattcagactcaaggaccttttcgcaatacaattggaatattatgatggttgcaaaatcagataatttctaagttaagccacattaaatgctagttgtttgacataactcctaatttagttcgatataattccaattgaactgtcgaaaaggatgccccaagctacatgtaaaatgcttagagaggtattttaaagtatggcttaaaaagcacctggatgtaattccttccggatgtgattcgtcgccgtcgaagtccagaactgtcactcttcagttgccgaagatggtgcccacgggaaagacgacgatcctccgtttgccgctcaccaccagcgattcatagtgatagttcttggccagcagaacatcgttgcggtcggcagcaaaggattcccagatgggatccaagtccggattgaagcaattaatggccacaatatcgctcggtagtcgtggtatcagttcgtaggcgcagcccagcttctcattccacagactaacttggccgtaaggtaggggatcccttttggccaactggccggcctccttggctgtgcggaatgtgtgcaccgtcaccactcccgtcgctccattgcccagatagctgtgcacgcagtcgtacaccaagacgggtgattccccagccttaaggctttcgccttgtactgtcttggccttcagctcttcgatcttggccagcgtgctggtgtagctcggatgcttggacacctcctgcgacaacggacgcaaatcctgcgccactaggcccacaaactgatcggcaatgctctcctggagtagcaacgtggccaccgatccctcggcaaagggattctgcagggactggagcaactggtggcgcgctgagtgcagatcaccgtcctcgaagacgaccatcagctggggggagcgccactggggtgcactgggaatcagcgccaactgcaagtagatacatttttgaatttaacatatgtatgtaggtgctccgataatctcactgagacacaatccgtgtgccaaggagatcaaggttatgtccgatattgtctgactgaccttcgtttcctgcgccgtcggctgcagctggttgaccatgtagctggtgatcctggacggctgggactgggtgaagttgctggccatgctctgcgaattgaaaacttgaattcaatggaatcgcccgatcagctgcgttatcagcggctcacgcaaacatacacacacgcacataaacagacacacacgcacacacacattcacatgcagagaaggaagatcgctgataaactaaaataccagttattggtattattcagtatttaacacggcctgtcgcattttatagctacggtcacaccgaaataataactggcatgtataagcggaacagcgaccggtcacattggcccacacatcacaattttaatttaaattgcaattggtcgtgttgctgcgctgacgccttccagcgtataaaagaaaataacacttttgcccccggctagctaatagttgttgacatcactcgttattcgccgttcattgttgacgcccccgtgcaaaggcagcaacaacaacagcgattgccaaatattgcagcagcaacaacaagaacatttggagaacgaaagaagaccaacaagtgcgcgcacacacacacacacgcacagacgcacacagatacactcatacagtgaagctattgcgcttttagcaccaattgaaagtgaattgcaagtgaaaatagacgcaaagtggaacgatttcagcaaattgttgcacacgaaaataacaaaacagctgtgcgactcatttttttttgtgttttattgttgttgttgtctgcgccgcgtgtggcagcagcaggagtgggagtgagagagcggtagccgctgcaataactgcatttgagtgcgagcgagaaggagcaggagagcgacatcatcatgaccgacctcaacgagctgatgggatccccttttgtgcgtgtgaaggtaagcaagcagtgcatgcgatgcgggagacgagatgccgctattgcactgcactggccagcaagcagtgcactgcactcacccccctcatcttatccaacaaacaattgcagccataaaaatagcaatgggcgactaggaaaactcat

SEQ ID NO: 39809 - DNA, 759 bp, DROSOPHILA
atggccagcaacttcacccagtcccagccgtccaggatcaccagctacatggtcaaccagctgcagccgacggcgcaggaaacgaagttggcgctgattcccagtgcaccccagtggcgctccccccagctgatggtcgtcttcgaggacggtgatctgcactcagcgcgccaccagttgctccagtccctgcagaatccctttgccgagggatcggtggccacgttgctactccaggagagcattgccgatcagtttgtgggcctagtggcgcaggatttgcgtccgttgtcgcaggaggtgtccaagcatccgagctacaccagcacgctggccaagatcgaagagctgaaggccaagacagtacaaggcgaaagccttaaggctggggaatcacccgtcttggtgtacgactgcgtgcacagctatctgggcaatggagcgacgggagtggtgacggtgcacacattccgcacagccaaggaggccggccagttggccaaaagggatcccctaccttacggccaagttagtctgtggaatgagaagctgggctgcgcctacgaactgataccacgactaccgagcgatattgtggccattaattgcttcaatccggacttggatcccatctgggaatcctttgctgccgaccgcaacgatgttctgctggccaagaactatcactatgaatcgctggtggtgagcggcaaacggaggatcgtcgtctttcccgtgggcaccatcttcggcaactga

SEQ ID NO: 39810 - protein, 252 aa, DROSOPHILA
MASNFTQSQPSRITSYMVNQLQPTAQETKLALIPSAPQWRSPQLMVVFEDGDLHSARHQLLQSLQNPFAEGSVATLLLQESIADQFVGLVAQDLRPLSQEVSKHPSYTSTLAKIEELKAKTVQGESLKAGESPVLVYDCVHSYLGNGATGVVTVHTFRTAKEAGQLAKRDPLPYGQVSLWNEKLGCAYELIPRLPSDIVAINCFNPDLDPIWESFAADRNDVLLAKNYHYESLVVSGKRRIVVFPVGTIFGN

SEQ ID NO: 39811 - DNA, 1839 bp, DROSOPHILA
acttttgcataatattgaaatcttattgttaacaaagtcgtttatagcatggataggctggctgtgttacttgtaataaagaaggcggcatttttaaaaaccgtaaactcctccgactgttagtcggttttctgaaaaactgtggataatagttttatgcatttttctgttactgttacgcaattatctcaaatactggggatacacatagatagttagacctttcttttctcaacggcattgcatttttaaattttttaatggtagatggcagtgtgaaaacttcgcagtgtgaacaccatggctatcgaagatcgatacgaaatagcgatggatgcaatcgatatttgcgggcctgccaatcgatgtacaaccaccactggcggtcacttcagttgtttacttttttactttgcgtgcagcggaaaaccgggccgaattgaactgctcgaattttttttttattattttttttcgccactcttgccgccgcattttgccgcaaattggtgtaaatagaagagaggaagcgattgtaatgaaagcgcgcggttttttcagtgtgtgaaaatgtatcgaaaatgaaagaagtgaagaaggcgcaaagagagctgctaaagaagtgcgtgccgaaaaaagagagcggcgaaaagtgccaaaaataaaacaacaaaatagaaaccaaaagaaaaataaattaaaacaggctgcagagaaaggcgatcgaaaggaaaagaacgaacgaagagtgagagaggcgaaagcaacagcaacaagtgggcgaagatgtgcaaatgacaaattgggcaaaactccgactcctgtttccctcgctctctctcacgcactccctcgcgctcacgcacactcgcacgcatatccccgtcattggccatctcgctcgcacgcgttgaaaacgagaacgggaacaggaacaggaattgggaacagccgacggtcaagttcaagtgggaacggaaacggaaggcgcaaggaaaacatgcggaggccctttacagctttgaatcgcaatcactacttcgtcatcggcctgctcctgggcctcctgctcagctggcacattccggaggacatctgggaggaggagtgtcccgaggaggccgccgagaatctgctaatcgagcgatttggccaggagttcgagccccacttgaacctgatcaacaagccgctggcggccaagaagccggtaagtcactgttcccagttatgaaccgcattaaatgtataacggtacacgtacgatcgttataggtaggagttctttaaaattcttttctcttctttttaattagtattatttgatatagtcgctgattattgaataatataaaatattgtattaaataatacatcatgatatagccgttaatttattaaacaattttcacaactttgttgatttgcagatgaagaaatttatccgacatcgtgctttattttcggtaaaacactctgcataatagccactaacatttccgcatgagaatatatttaatattttatttactattgggataattttatatacatatatataaccctaaatcgtaatctttcgccaattggaatattgtcggggtgccgaaaaaaataattcaagtcattaatcgagtttctgaggataatgggtatgtgattatttgcacaactcatcacggggggcttccaatgccatgcatgctcattagacggaagttattaatggattcattgttgtaccgatttaagtaaaaagcgtgagtgctcgtgctgcctctaatcaatagaataatcggaatacaaatccacgaaattgtgtttctcaaatcgcaatcc

SEQ ID NO: 39812 - DNA, 234 bp, DROSOPHILA
atgcggaggccctttacagctttgaatcgcaatcactacttcgtcatcggcctgctcctgggcctcctgctcagctggcacattccggaggacatctgggaggaggagtgtcccgaggaggccgccgagaatctgctaatcgagcgatttggccaggagttcgagccccacttgaacctgatcaacaagccgctggcggccaagaagccggtaagtcactgttcccagttatga

SEQ ID NO: 39813 - protein, 77 aa, DROSOPHILA
MRRPFTALNRNHYFVIGLLLGLLLSWHIPEDIWEEECPEEAAENLLIERFGQEFEPHLNLINKPLAAKKPVSHCSQL

SEQ ID NO: 39814 - DNA, 3893 bp, DROSOPHILA
cggtcggcaacaattcattcagacaaaaagttcgccacaataaaaacgaaccgcgcgcgaaatcgaatcaataatttaatgcaggtgctacctacgccaggttttcttttactgccattttccgcagatatataccacacatacatatatatgtatatagatatatacacatatattccccccgatttccgatcacatttcaagcgacgtccactgcttttgtcattttggccattgccatgttaaggttgacatacacaataataataataatgtatccagccatcggacttggcttgtttgccgctagttaagggccattcccttcgagaaatttccaccaccgccataaaatttcaccccgccaatcgagattggccgctttttccgacacatgagcggcttaatctgaatgaaaatattgcgcaaattctgattctttcgttttttaatagtaccatttatgcacttaaaaacagaacatctttgctgtactgtaaaatcaaaaaagtatttagacaaattgaacaccttacaaaaaaaaaaaatggaatatttataaaacaaaaattaaaatcaatatcttcttttgaattataaactcaaagcaataaactccatattttcatatatatcataaatcataaataggttttaatgaaaatcgtttggatttgtaatacccatactttgtcgcagtgcattgcttatttatattttcatatgtgccacattttactccgtgaaaatataattttaacaaaaatatttaatggacttatgtgtattaaattcatgtttaacaaaaaattaatatttgtactggcatttaagggtaatacgatgtcagtacgtaaataaactggttgctatatttagttgacaactgtttgttttctccaacatgtcgaagtacttgtaggataagtaccagtcgaatcgcttaagtagatactgcaaaaggtaactcgtttcagtggctcattctgagcgattcgcgatggtctactatcaattgcgggcctccaggacgccacttctctgctgtttgggtctttttgttgtctatctgctctaccagtcacttggatcactccaagtgttgaataacccacagggaactatatcacagccagcatcccggcccaaaaagggtaagaagtttatattcgagtgaaaaagaaatataagacgtaatatatatataaggctaccaatcggtgtacttgttgcaatatgaaaactaagcccattaaataccaacaaaaaaacaattttcgtatacattatttagagtgtgtgctagcgcgaccttttcaatatataacacctgttgtttttgctggcaaaaaaaaaaggtaaaccataaacacggttgttgtttccatccatcgatatatttgcactgtatgcaaacatttttttttgtgttgactgcagttgcaagtgagaaaccagacttcgagtcggtaaacaacacaacaggcataatttatttaaattaaaatttagctggacttgtcttgcagttgctgtcgttcaccatggagcccatccaggaatcgataccgaaggcaaggagagcgcgggatcgcagcaggaaccgaatctggaggaactgttgcggagcaaagaggacgtggactgggtgcgtctgcgggctgaccagtgtgccccgtatccccgctacgaagacatcgagtttccgaatccctacttccagctaacaaggcatgaaaatctatcttactatctctatggggcatactacgaccggaggcccaggataccggagatggtggtcctcggaatggccacctacaatggttcctatccggccacctatttgcaggtttggtacgatggcgataaccagccagaaaagttgcccgtataccaaagcaaattgggctggtacaaggagtggggccttccagagggtgttgtatttcctacgctcctaacgtttcaaatgaaatcccaaagggttccacagctggtgagtctggtcttcgatccgtgtgcggtgccaacgaatgcctttaaggtggtaccaccgccacccgaggagccaccaaatgcacaacgtccaaagcgaatcggagtttgtgtgaaatatctccgatttcccgacgtcgacatgaccgatagatttgtggaatggctggaactgatgaggctactgggtgccaccaaggtgaccgccttcgatattggactccttatgcccaacacaaggagaacccttgcccactacacgggagctggtgatggattcttggatctgcggaaattccgttttcccaatgagaccgcagatcacgagacattccgtgcgatgattattgaggtgctgctgtacaatgactgtttataccggaatctgtacgatttcgattttgtggccgtggtggatgtggatgaggtaataatgccactgggtgagcatcgcacttggcaagatttgctgacgcatttgcaggttcaggatgtgaatagcaccactcgctctagctattgcttccgcaatgtgtatttttccaagcagctacccgtggacgaaagcattccggaacaattctttatgctgcgtcatgtgatccgggtggcggaacacttggatccatactctgcgatcaagtgccttcatgataccagctatgttacgttgctgcataatcattttccctttcaatggatgaacgcgagtgatccgtaccatgttggcatcgatcttggccagatgcagcactatcgctatacggaaaatctcaaatctttggttgaaccgccgcccgtaagggatgataacattcgacgattccagcaccaactcatccacaactcactggaagtccatcggcagctggcccagagtcgagcggcatattgattatattttaattgctttttcgttatatttaagaggcttaaattggcggctgcgccggccaagggctttgtacagtacgtgtcccaccttttgaccccgggccacgtcggcaggataataattgcttattgacatgacggagtccggagtggtcagggcgcccaggtgtgccgccagtgtgtgccgcaaaagtttgctttttccatttagcttagccacatcaagggctgtactttcagcgccggtgaaatatagatactgctcacagtccgcagtataattgataagccatagatatagatatgttgctctaaccgcctatttttttttttttattagcataaaataagtacaaaagtgaattcttccattgattcgatttttaaacattgttattctttttcgaactttagttttttttgtcaagctgtcatttgtctcgaatgttttaaatgcttgcattaaatattaaaattaagataaccttttacctcttagagctaagtgaaataagcaacttcattcctggataataaacagattaaactgaaatccaaatagagtagaactcaatgacaaagaagccgcagcaaagcaaccactttcattttccagcttgcaacggagcaaaaattaatttgctttacattgcaattttgaagtggacccgagaaatttatgccaatctactttggatgtagaggcaactttggtatttgattcggtcatccggcgcatttcattcagcaaagaaagagcttcgaattgcaaagactttgctgcagacaacagactagctgcacattgcgaacttttgacaatacttttcttttttttttttttgtgattagtaacgaacgaacccaaaaatagagccactattgttacttttccattaggcaattatctgagttttgattggccaagaggatgaggtcgtctcgaagatttcgtgttggactttaatctttggaattgggaccgaaaacaatttgggttt

SEQ ID NO: 39815 - DNA, 1518 bp, DROSOPHILA
atggtctactatcaattgcgggcctccaggacgccacttctctgctgtttgggtctttttgttgtctatctgctctaccagtcacttggatcactccaagtgttgaataacccacagggaactatatcacagccagcatcccggcccaaaaaggttgctgtcgttcaccatggagcccatccaggaatcgataccgaaggcaaggagagcgcgggatcgcagcaggaaccgaatctggaggaactgttgcggagcaaagaggacgtggactgggtgcgtctgcgggctgaccagtgtgccccgtatccccgctacgaagacatcgagtttccgaatccctacttccagctaacaaggcatgaaaatctatcttactatctctatggggcatactacgaccggaggcccaggataccggagatggtggtcctcggaatggccacctacaatggttcctatccggccacctatttgcaggtttggtacgatggcgataaccagccagaaaagttgcccgtataccaaagcaaattgggctggtacaaggagtggggccttccagagggtgttgtatttcctacgctcctaacgtttcaaatgaaatcccaaagggttccacagctggtgagtctggtcttcgatccgtgtgcggtgccaacgaatgcctttaaggtggtaccaccgccacccgaggagccaccaaatgcacaacgtccaaagcgaatcggagtttgtgtgaaatatctccgatttcccgacgtcgacatgaccgatagatttgtggaatggctggaactgatgaggctactgggtgccaccaaggtgaccgccttcgatattggactccttatgcccaacacaaggagaacccttgcccactacacgggagctggtgatggattcttggatctgcggaaattccgttttcccaatgagaccgcagatcacgagacattccgtgcgatgattattgaggtgctgctgtacaatgactgtttataccggaatctgtacgatttcgattttgtggccgtggtggatgtggatgaggtaataatgccactgggtgagcatcgcacttggcaagatttgctgacgcatttgcaggttcaggatgtgaatagcaccactcgctctagctattgcttccgcaatgtgtatttttccaagcagctacccgtggacgaaagcattccggaacaattctttatgctgcgtcatgtgatccgggtggcggaacacttggatccatactctgcgatcaagtgccttcatgataccagctatgttacgttgctgcataatcattttccctttcaatggatgaacgcgagtgatccgtaccatgttggcatcgatcttggccagatgcagcactatcgctatacggaaaatctcaaatctttggttgaaccgccgcccgtaagggatgataacattcgacgattccagcaccaactcatccacaactcactggaagtccatcggcagctggcccagagtcgagcggcatattga

SEQ ID NO: 39816 - protein, 505 aa, DROSOPHILA
MVYYQLRASRTPLLCCLGLFVVYLLYQSLGSLQVLNNPQGTISQPASRPKKVAVVHHGAHPGIDTEGKESAGSQQEPNLEELLRSKEDVDWVRLRADQCAPYPRYEDIEFPNPYFQLTRHENLSYYLYGAYYDRRPRIPEMVVLGMATYNGSYPATYLQVWYDGDNQPEKLPVYQSKLGWYKEWGLPEGVVFPTLLTFQMKSQRVPQLVSLVFDPCAVPTNAFKVVPPPPEEPPNAQRPKRIGVCVKYLRFPDVDMTDRFVEWLELMRLLGATKVTAFDIGLLMPNTRRTLAHYTGAGDGFLDLRKFRFPNETADHETFRAMIIEVLLYNDCLYRNLYDFDFVAVVDVDEVIMPLGEHRTWQDLLTHLQVQDVNSTTRSSYCFRNVYFSKQLPVDESIPEQFFMLRHVIRVAEHLDPYSAIKCLHDTSYVTLLHNHFPFQWMNASDPYHVGIDLGQMQHYRYTENLKSLVEPPPVRDDNIRRFQHQLIHNSLEVHRQLAQSRAAY

SEQ ID NO: 39817 - DNA, 2595 bp, DROSOPHILA
ctggttgttaacgcattattcactccaaacgctataattcgcctattgtcggatgtgccagggatttgcatacatacatatattgcgtgtactgtacatcgcatttacgtttaagtcgatggcggcaagtgtgcgcttgaggatggcttatggcattttcaggcaaaacttcattcactatacgacagcattgttaacagttttgtatgccaatcacattaaaactgactaattaaatgagctaagtgcattacaggggcttacagtttggcaagctattgagtaattataagacgaaattaagtctaaagatatttcccacttcagcaagtcttttaaagacacatttatgaatgtcctcaaagcccatggaacacacacacacacagagagagactggccaaaaatatgtaaactcatgtcataattgaattttcatttcggtctgcgttcggccgcagagaagaacggcaagccaaagccaaagtcaggcgcccaaactgaataattaaaataaaacgcaaataaaaaactaattttgtcacccgaaatgaggtcgaacaatgtgtggcaaagtcgctgcgattgagattgagtccgctggcttaagtcgtaaagctgcccgaatttactttattgaaaactcattaaaaagttgtaaaaataaaaccgcttccccgcgcggaaagcagccactcaaaagctcatcagtttggctttcaactccttggattcaattaggaaatccaatgaggggagagctctctacttcgagccaaaaataatatgtgggggtggaaaggtttcaataaattaagctaccctagtatgctttaaagtaaaatcgaatgatttttttttttataagtcaaccacatttgttgggaacaattgtgtaatcttataaccccttcatattctgtcgtatttaaaatttttatttttttttttttttaaacagcggacagggggagcagagactcaaaaagcgtatatcaaaatggcacccaatcgcaaggacggaaagaagaatattacggaaaagcaggaagcgaaaatgttagccgaagctggtggaaaatcggccagtgatagcgatgcgagcgataccgaatggcaaatggttcaatttgtggacgatccgaatgtcctgcgagttgcgatcatagcttgtcctgtaggttagccattaaatggttttaaattgcatcactcattcttatctatactaattaggaggtgaccttgggctttttactgtgtggcgttggctatcagaaggatagatttcgcaactatatgatggttgagagcggtgtgttttgaagtggaattcaaccactgactgatacaatattcattccacagagacgccacaagaggatgtggagcagttctttctcacggtttacaggagatccaatatcggcattgtcatcatcgactacgatacggtgaaaaggcttcgtaccatgatgcaacgatgttctcagctgcttcccgtcctggtcacggtgcccaacaaatcctcactgatcacgtacttggacaaaaaggagcgaaatcggcgacttcgccagcgtgatgcctattaggatttcgatttggaagtggttttttttattttttacctccccctgttactgtgacaaattcgaagcacgaaaacaggtcaaatcattttcgttttataaatttgggatatcttaactatcaaacgacaatcgacttgatacatttagacaatgagcttgaataatggatgtatcaataaagcccattccaatttcaattcctctacatgtgtttatttcattaattaacaaataattggattcgaaagtgctcgaatctgaaatgtttttctgtttgtagttttacgagtagcttacacacacggcttacacaccaaattagtttcaatttagttttaaccgaataaaaagccaaataggctttattggaaattcaacaatcggaatttcctgcacacatcaatgtggcattcggattacgtctttgttgccattttagttcagttttcagtttcagttgctctagcaaattaattacaattacctttggatccattcgattgcactcggcgaatgtttttgacacggccgcaaagcattttcaatgcgtatggctttccggcattcggtttgtgtacttcattttccattttcccggcttttggccaaaaactttctgtgtgtgcatggatggaatggtgtgtggaaagcctgtcaatggcagtgtgcgtaaaagtttgccataaattcggagcaaattgaaacagactagttgcccacttcaaaggggatttcatctaaacagcagcagactcacgattccggatgccaaatggctcaatgccggactagttttacctgtcccgtgcagacagcaaaagtgactccggggttcgttcgagggtcgagacatctcatctcaactcatcacatcaacctaaacgaagtcaatcgcaatgggcgattagctttcggggccatttaattgaatcgttgggcagtcaagcagccggaaacttcgaagtccggaatacccgagtccgtaatttatgcgcatata

SEQ ID NO: 39818 - DNA, 408 bp, DROSOPHILA
atggcacccaatcgcaaggacggaaagaagaatattacggaaaagcaggaagcgaaaatgttagccgaagctggtggaaaatcggccagtgatagcgatgcgagcgataccgaatggcaaatggttcaatttgtggacgatccgaatgtcctgcgagttgcgatcatagcttgtcctgtagagacgccacaagaggatgtggagcagttctttctcacggtttacaggagatccaatatcggcattgtcatcatcgactacgatacggtgaaaaggcttcgtaccatgatgcaacgatgttctcagctgcttcccgtcctggtcacggtgcccaacaaatcctcactgatcacgtacttggacaaaaaggagcgaaatcggcgacttcgccagcgtgatgcctattag

SEQ ID NO: 39819 - protein, 135 aa, DROSOPHILA
MAPNRKDGKKNITEKQEAKMLAEAGGKSASDSDASDTEWQMVQFVDDPNVLRVAIIACPVETPQEDVEQFFLTVYRRSNIGIVIIDYDTVKRLRTMMQRCSQLLPVLVTVPNKSSLITYLDKKERNRRLRQRDAY

SEQ ID NO: 39820 - DNA, 5279 bp, DROSOPHILA
tgtaacaagtaagagttgggccagaaatgaactttcccccaaatgccacagatgtatgtatgcatgtatatgcccatggctgtggtattgccacttctttggcaaccagccatttggcgaagatatgcatttcttaacgtattcaatatacagaccgctgcggctgcgattgctgctgctgctggcgctgctgctcgacggctgccgacggccactgcgcagcggtggtgcggtggcggtaccgctgcagccgctgccggcgccgctgccgccaccgacgacatcgacgtactcggccacgtcgctgctgttgtgttgttgtttatttggaggatcctgcgatgttgcagatgcaacagtcgacgacgacgaagacgacgactttggcaatgaaaagtgttcacgcaccgcacacacaattacgcacagcaaaaaaaaaaaaattacaaggcaggatatgaaaaatatacacaaagcaacacacacgcagtcagccgacacgcacacacacacacacacacactcagccacttatgcgcaatggcgagttgaacgatagttcgctaaaaatcgtagcatactttttgccgcgctactgaattcttgtttctgtacaattcgtctttgatctgtacgtatttttttatatttttaatatttattgtttggttttcttttttttttgtttatgtatttctggctgatttttgccggctgcgattttcttgcgactggctgctgcggtgcttgtggcacgtctgttacttcaacaccaactgaatggcatgtgtcgagtgaaaaggacgcgaatgccatgccgagtggacaggtccttgccaacgaacagctgtcctggcgccaaacagctgacaccagcttttcgctcagtaaacatgggaaaatgcctaaaagctttccacttttcaagctttcaaaggatatcttaagctgcccgaaaagctcgcagtccggttggcagtaccaattgggtgggaaaatttcaaaaatcaaagtgctcacctgtctgggtgctggagtcgaaaaatgtactggttgtttccacggtcatggtgccgatggtgccgtcaattatctgcgccgacgaatcgcgtctgccacgataactggaagtacaggtgtataattgaatataatcatatacttattgtaacaagtgttaaatatcagcactcaccgacagacgtcgtcgctctgcgagctctgtcgccggaagttcctgcagcgtatcatctcctcggtggtcgactgccggcggaatcccctggcgatcagtatctcctcggtggtggactgcctccgaatggccggccgctggttctgctcgacggtggtctgcgtttgtggcctagaacagggacttggatcccgggaggagcagcagctattcgagtccggcgatctcggcgatctggctgccgaactgctctgcctgcggagtgtatgccgccttggactaccatcccgctcgtgggatcgatccggcgatagatgcgttcgcgaatctcgacgaccgccacgcgacgcgctatccggtgacagggaatcccgtcgagaggtgcgcctctcgcaatcgtccggcggatcgggactgagtgcgggctgggagccacgcctactgccgcccggcaggcagccctcgtcgaaggcggtcgcctggcgttgcagccgctgtaggcgtggcgcccgctccggactgacgcctgccttggaatcccgccgattgacacggccgcactgcgtctgcgaatcgcggcgacccttcggcgccgtcggactcgttgccggtggcgtcacggagctagtgatgatcgttggcggcggcagggcttggcacgcggagtccacctgctgatgggccaggtggtgagtgctcgaatgcgtcgagatcaggggcatggagtggtccgaacaggagccggcggaactggtggacgggcgctgctcctgccgaaagtttgggaattccggcgcggccagtgagtcgcgcttcttggtcatctggtatttgccgggtggcggtggcgtggtcacccgaccggccacattgctatcgcgtcgactgctggacaggtagctctcaccggatccgcgccgggatgcctgatggtttggtggttcggtggttggtagttgccaggatgtgcggtggtttggtgtggaatggtgggaaagagagagagagagagagaacagcgccacgggttaggggtcaaggttgtggtcaaggtggagccaaaaggtgctggtaattacttagaactcaactggcaaatgcacttgcttggaaatgttgcttcgactaacttaatcggttatttatttataataaaaacatatttaagtgaatttgccagcaatcttatatcttattgcctaaggcagccgattttgtatctctatagagtatatatgcgctaaatacttacgcttttagagcactcgacgacgacgggcacggagacgctgggctgctcctcaactgccccgctttcgcgccgattccagtgcctgacgaactcggcggtattcgagtctcgtcgcgacctcatgctccggatgcccgagtccgcggatgattcgcgtcgcttgcgtggcgccatgtaagtggtgcagccaccaccacccgatccaccggcacccgtgctcgcatcggtggtggttgaggtgcgccacggcagactgcgggccagatccgccagcgtttcgcgtcgattcagctgcgccttggagcgggatgcctgctgcagctgttgttgctgctgctgcgagtggtgctgctgctgctgtttggtgccgccgctccactcccgcaggatgtccgtcagctgggccagcgagctgcgccgccggcgctgcaatcctggcggcggcgaggtgctcggcggtgtggtgatctgggccgctgagtcccgtcgtccgcccaaccgctgccgtatggtggactcctccagctgaaagcggaacatcgtattattctcaaaacgatcttcaagaattattcaacgatctatagccataaggttcggttacactgaaagtggtagttgggaagttctctatagatggccacttttaagttgaaaacttttgttaaatacaaatgtagatttaaaacattaaattaaatttattgaatttgaggctgcagtgaatttattttaaatttcaaaaagaaaatgtttcaaattaaaactaaatgctgagatatattttacattttcgattacaaattatttgtcgattaacgaaaatgtgtttaataaatgttcagtttcataattttctgtaagatttgaataaattttatcttatattgtttttttttttttgtaaataagctaaagtgtttgtcaattgaaagcagctctgatttagttagctcaagctctttttcaggccacaagcacttcctcagaaccatcaaaaatggttctttcgcatgaattgtttattcactttgggaaatatttaagatatatatatatatgtaacataatataattgcgaattagtgcgacccacctgctcccgcacaagatcgtcccagccgttgccgccctgccacaccaaacccacttggtgcgacatgatgggcaggttgcacacaaagcaaatggctgtcatagtcctgaaaatacacaagacggcgattagtgaattgtaaaaacctactataagttaacttaatgacaagcaaagtgcatgcagtaaaaaaaaggagaagcgaggaaaagagggaaaattgaagatgggacagtgtcatgcggtgaagaatgtctgaatggcagatgttatttttggatcggctgcttggctgcaaagcttttctcgagaaaaagagcttcgtccttaggatatgaaaggatacgaaagccaaaggctcgaagttgattggaaagcttggaaaagttcgaaaagctgttagtgtgttagtttggcatgcggtgaatgtggttaaggatgtgaaagctccaaggtgagagtcctggctttggtttcagtttcagttttagtttgacgtgcatatagataaaagcgtagagaagaggaaagctttttgtttttttttttttttttggtttttcgttatttagttggtggaaaagtgaaagcgcttccgctgatttttgaggtcaggtggcgtttgtggtgttttagagttaaagaatttcctctggattgctaactttttgcgtatgaccacgcaggtgctgctgcacggctgatccatggaccggtaatgccgcagttttgacatggcgcatgttctggtttctgtggcagcgcccgccgatcctcgaacgtgagcggtatccttcggctcctgccgctcctgcggccctcctttactcggctatttccggccttatcctcctccttgcctgtatttaatgttcgagttcttgcgaatgattgcgaatttctttcgtggttttcggctagccgaaagtgcggtgatttttgggtgtgtttttttttatattcgtgggtttttttttcagtggggctttttgggtttttttttttaatttttggagggggtggtactgatgggtttgctacacacacagagacacagagatacactggaaaaaatcgaagaaaatagtatttggtggtttaaaacgcattggatgggggcaattttcggatggctggcaaatctcaatttacataagggattgggatttactaattgggtcaaactacaggtaacagtatggggtcctttactatagtaacgttttgtaaaatatatattgatatttattgtttatacctatgaaaaatattaaattaataaatataattataatataaataattattctttatattaataaaacataatgaaagtatatataaagtgaggccatgccagatgctttagttattgtttcttatcaatagagtacttaaatatttcaatttcccttgtcaattcaaagttgccttctaccttcccctttttgtattcattcgcatttatttattgtaaaagttgcgctgcagtattgcgtataattggttaaatccttcatacgcaccgttgcccaaagaaatcgagaggcaacggaccaaatactatgtattcgtacttattttcgcagaaatacaagtaagctcaagacacaatgttcaatttcccagaaggttgccacaattcaatttggttcttattacttagaatatagatggaaagtcctatttatatgttagtaatgcaccaattattaaatttaatgttagtacggctt

SEQ ID NO: 39821 - DNA, 1752 bp, DROSOPHILA
atgtcaaaactgcggcattaccggtccatggatcagccgtgcagcagcacctgcgtggtcatacgcaaaaagactatgacagccatttgctttgtgtgcaacctgcccatcatgtcgcaccaagtgggtttggtgtggcagggcggcaacggctgggacgatcttgtgcgggagcagctggaggagtccaccatacggcagcggttgggcggacgacgggactcagcggcccagatcaccacaccgccgagcacctcgccgccgccaggattgcagcgccggcggcgcagctcgctggcccagctgacggacatcctgcgggagtggagcggcggcaccaaacagcagcagcagcaccactcgcagcagcagcaacaacagctgcagcaggcatcccgctccaaggcgcagctgaatcgacgcgaaacgctggcggatctggcccgcagtctgccgtggcgcacctcaaccaccaccgatgcgagcacgggtgccggtggatcgggtggtggtggctgcaccacttacatggcgccacgcaagcgacgcgaatcatccgcggactcgggcatccggagcatgaggtcgcgacgagactcgaataccgccgagttcgtcaggcactggaatcggcgcgaaagcggggcagttgaggagcagcccagcgtctccgtgcccgtcgtcgtcgagtgctctaaaagcgcatcccggcgcggatccggtgagagctacctgtccagcagtcgacgcgatagcaatgtggccggtcgggtgaccacgccaccgccacccggcaaataccagatgaccaagaagcgcgactcactggccgcgccggaattcccaaactttcggcaggagcagcgcccgtccaccagttccgccggctcctgttcggaccactccatgcccctgatctcgacgcattcgagcactcaccacctggcccatcagcaggtggactccgcgtgccaagccctgccgccgccaacgatcatcactagctccgtgacgccaccggcaacgagtccgacggcgccgaagggtcgccgcgattcgcagacgcagtgcggccgtgtcaatcggcgggattccaaggcaggcgtcagtccggagcgggcgccacgcctacagcggctgcaacgccaggcgaccgccttcgacgagggctgcctgccgggcggcagtaggcgtggctcccagcccgcactcagtcccgatccgccggacgattgcgagaggcgcacctctcgacgggattccctgtcaccggatagcgcgtcgcgtggcggtcgtcgagattcgcgaacgcatctatcgccggatcgatcccacgagcgggatggtagtccaaggcggcatacactccgcaggcagagcagttcggcagccagatcgccgagatcgccggactcgaatagctgctgctcctcccgggatccaagtccctgttctaggccacaaacgcagaccaccgtcgagcagaaccagcggccggccattcggaggcagtccaccaccgaggagatactgatcgccaggggattccgccggcagtcgaccaccgaggagatgatacgctgcaggaacttccggcgacagagctcgcagagcgacgacgtctgtcgttatcgtggcagacgcgattcgtcggcgcagataattgacggcaccatcggcaccatgaccgtggaaacaaccagtacatttttcgactccagcacccagacaggtgagcactttgatttttga

SEQ ID NO: 39822 - protein, 583 aa, DROSOPHILA
MSKLRHYRSMDQPCSSTCVVIRKKTMTAICFVCNLPIMSHQVGLVWQGGNGWDDLVREQLEESTIRQRLGGRRDSAAQITTPPSTSPPPGLQRRRRSSLAQLTDILREWSGGTKQQQQHHSQQQQQQLQQASRSKAQLNRRETLADLARSLPWRTSTTTDASTGAGGSGGGGCTTYMAPRKRRESSADSGIRSMRSRRDSNTAEFVRHWNRRESGAVEEQPSVSVPVVVECSKSASRRGSGESYLSSSRRDSNVAGRVTTPPPPGKYQMTKKRDSLAAPEFPNFRQEQRPSTSSAGSCSDHSMPLISTHSSTHHLAHQQVDSACQALPPPTIITSSVTPPATSPTAPKGRRDSQTQCGRVNRRDSKAGVSPERAPRLQRLQRQATAFDEGCLPGGSRRGSQPALSPDPPDDCERRTSRRDSLSPDSASRGGRRDSRTHLSPDRSHERDGSPRRHTLRRQSSSAARSPRSPDSNSCCSSRDPSPCSRPQTQTTVEQNQRPAIRRQSTTEEILIARGFRRQSTTEEMIRCRNFRRQSSQSDDVCRYRGRRDSSAQIIDGTIGTMTVETTSTFFDSSTQTGEHFDF

SEQ ID NO: 39823 - DNA, 3448 bp, DROSOPHILA
aaactgtgcgcatatttgggtagcaaacggagcaaaggacccgatcccaaggacattctaaaacatttgtttgcacaaggattttttgtatatgtatatatatcacatatacatatatcgcatcacatatttaaggtacacagattaacttacccaaaaatgcactttatatttttcagttctaaattagatgaattgcagaacattgaaaatatctgcattttatttgccttttttattcagcaatgaaattttggagaacttatttgagtttaaataaatatcttaagataatattcctcgtctatgtattttatatgacacgatacaaagaatattaaaatattcatttattgagcttaattgcatttcaatttcgaagcatttgttcatttaatattgtaaatatttgaagaaacttataaagagctatctttaaaatgagctttaagctaactggcatctttactgattgtaaaagttttaaactaaaaggtcctgttcaaacgaaaaaataagcttatacttcatttatttgagcttaaaagcgtttctttgttggaatactcaaaaggtaacttagaaagttttacttttaaagctatacttggaatactaaacaagagttgaaaaagtagagtggctagctacattagaaataattaaaaatatctacagcaaatataaattgttaataaataagatctctccaaaaagttttgtcatttgaggaatttacttagcccatacatgacctctgactttccaaagagctaatcacgtgaatgacccacagttaaaagtgcgataaataattatgaatgaccaagagccacctgcttcagtggctgcttatcgaaataaagttattgttatagcaaaagaaaatatgcgataagtgcagtgtcagtgaaaaaatgcagcaaactcgcatgataagccgctcgagtgctactataaagctctggattcgatccacggaggtcacaaaccactcgagatgcagacgcagcagaaacggaaagttagcaacagtcgagcttttaccatgattttaatcctgctgcaagttcttggtatccttggccgtggagtgttggcccagaaaagctcgcccattgccaactggcacatggctgatccgcactacacaagtgaccagtacgccaaaattctgggcgaagcgggtctgggccaggatgccgatgacaaggagcacaagggtctgggtcccatgcaaatccagtacgtggactaccagccaaactgccagccgggcggagtgccagtctgtgccaccaatggaaccgatagcttctacttcgagaatcattgccgtttggaggcggccaacatgaagatgctcttccagcacggcacaggtgagtgcacagattgcagattgcttataaattgtattgtatatatatatatatttttaattcttttaatgtctaatttatatgaatacccaaaacatttgcctttaccctgagtgtttcccatgcagaactggagcccacggagatggagcgatgcctgcccaactgccagacgatgaagtgcacccaggttgagcgtccagtttgcgcgctggccgagattggaggagctattccacaaacattcgccaacgagtgcgaaatgcgaaaacacgaatgccacacgaaacaaggtctgttaaaacattttgtacacaagtccgttcaatcttgtaaccataccatgactatttagtcctgagaatcctgcacactggtccttgtcagactccaaccaaaagtgggcgcaaaaagaagctgcgtcgcaacaagaaaaagcgaccaacactcaacgcctcaatttcaaagtttgctaccattccgaagaaagtatacataatgctggccactcctgctcctaggagcagcagcaccacgcccaggcccttcttcagcacaaccactacccgaatcacgacgacggccaggatgaggcccaccaaaccgaccagcacaagtccctcgcccatgcgattccagcagctgatgaacgtggctaatcccatggtttccgtttcccaggctatagatgcctataatgtatacaatatacccgatgtgggtcacgattacgggcgagataaccgactcctcgctctcgatgtttttgccagaagttggtcgtgtcacagagccctattccgtgccccctagaaccacgaccaaaactaccagcaccactagggccaccaccacatccaccacaacgccaaagccagttttggccacatccaggatcatcactcctttgagcaccagcactatgcaatcctttctgtctgttcggatgccgagcactactgagatggtcgaagaatccacaacggagaatccggaagcgagtacacaagcatttagcaccactcaaaaatccactgcaactgcacaaaccaaaatacttgaataactatgtaaaaaatttttaatatttattgaaattatttatacagctgttgagatatatcataaattataaagaaaaaatttccaatttttaaatcaatccaacttttttaaagcagtatgcttttaaattcccttcaattcatcaaactatagtctttctgctttgactgacaaaacaactcagacaatttcagttgccttactgatcaacatcaacaacaagccagaaaaaaaacaaaataaacggtggaaaacatgaatttcatggtaagaaaatttgtggacacgaggcaaagattacatttctaactgcatatccctgtagccaatcattctctttgtattgtatgcaatatattgcaatatgtgtaaaagtatatctaagattttatactgtggaatgaaggaaccttccgctcggaacggtactaatgcagagattttagaaatgatcgatttgaacagagatccgattctcttctatgaacagcgtatataaaggaaggaaatagataatgggaatgactatgcaagaggtagatgatatactgaacaatataacaacacccaggaacttgaacggtgattttgtcacgatgatgaagaacgaaaccttggcaaacttgcaacttaataataattacattgttacattgtgaacaaggacaaaaacaactctggaaacatttttggaaaaggagaaagtccctgatatacagccattttgacatccgtttcctgcctaacaaaactttgcatcccatgcgctaactccatgtttaagtcccagtttagtttcgagtgcaaccatttattatcatataacgttcttaaatttacaatttttaactcaaaatcaacattgttctatattaacacaacatatgtacaattacactagaacccagtttataacttgcttaacagcccaaaaatataaaataaatgttactccgatctgagctcaaagtgtccagcttaagttttttgttttctcgttt

SEQ ID NO: 39824 - DNA, 1258 bp, DROSOPHILA
atgcagacgcagcagaaacggaaagttagcaacagtcgagcttttaccatgattttaatcctgctgcaagttcttggtatccttggccgtggagtgttggcccagaaaagctcgcccattgccaactggcacatggctgatccgcactacacaagtgaccagtacgccaaaattctgggcgaagcgggtctgggccaggatgccgatgacaaggagcacaagggtctgggtcccatgcaaatccagtacgtggactaccagccaaactgccagccgggcggagtgccagtctgtgccaccaatggaaccgatagcttctacttcgagaatcattgccgtttggaggcggccaacatgaagatgctcttccagcacggcacagaactggagcccacggagatggagcgatgcctgcccaactgccagacgatgaagtgcacccaggttgagcgtccagtttgcgcgctggccgagattggaggagctattccacaaacattcgccaacgagtgcgaaatgcgaaaacacgaatgccacacgaaacaagtcctgagaatcctgcacactggtccttgtcagactccaaccaaaagtgggcgcaaaaagaagctgcgtcgcaacaagaaaaagcgaccaacactcaacgcctcaatttcaaagtttgctaccattccgaagaaagtatacataatgctggccactcctgctcctaggagcagcagcaccacgcccaggcccttcttcagcacaaccactacccgaatcacgacgacggccaggatgaggcccaccaaaccgaccagcacaagtccctcgcccatgcgattccagcagctgatgaacgtggctaatcccatggtttccgtttcccaggctatagatgcctataatgtatacaatatacccgatgtgggtcacgattacgggcgagataaccgactcctcgctctcgatgtttttgccagaagttggtcgtgtcacagagccctattccgtgccccctagaaccacgaccaaaactaccagcaccactagggccaccaccacatccaccacaacgccaaagccagttttggccacatccaggatcatcactcctttgagcaccagcactatgcaatcctttctgtctgttcggatgccgagcactactgagatggtcgaagaatccacaacggagaatccggaagcgagtacacaagcatttagcaccactcaaaaatccactgcaactgcacaaaccaaaatacttgaataa

SEQ ID NO: 39825 - protein, 334 aa, DROSOPHILA
MQTQQKRKVSNSRAFTMILILLQVLGILGRGVLAQKSSPIANWHMADPHYTSDQYAKILGEAGLGQDADDKEHKGLGPMQIQYVDYQPNCQPGGVPVCATNGTDSFYFENHCRLEAANMKMLFQHGTELEPTEMERCLPNCQTMKCTQVERPVCALAEIGGAIPQTFANECEMRKHECHTKQVLRILHTGPCQTPTKSGRKKKLRRNKKKRPTLNASISKFATIPKKVYIMLATPAPRSSSTTPRPFFSTTTTRITTTARMRPTKPTSTSPSPMRFQQLMNVANPMVSVSQAIDAYNVYNIPDVGHDYGRDNRLLALDVFARSWSCHRALFRAP

SEQ ID NO: 39826 - DNA, 5761 bp, DROSOPHILA
aatcctgcacactggtccttgtcagactccaaccaaaagtgggcgcaaaaagaagctgcgtcgcaacaagaaaaagcgaccaacactcaacgcctcaatttcaaagtttgctaccattccgaagaaagtatacataatgctggccactcctgctcctaggagcagcagcaccacgcccaggcccttcttcagcacaaccactacccgaatcacgacgacggccaggatgaggcccaccaaaccgaccagcacaagtccctcgcccatgcgattccagcagctgatgaacgtggctaatcccatggtttccgtttcccaggctatagatgcctataatgtatacaatatacccgatgtgggtcacgattacgggcgagataaccgactcctcgctctcgatgtttttgccagaagttggtcgtgtcacagagccctattccgtgccccctagaaccacgaccaaaactaccagcaccactagggccaccaccacatccaccacaacgccaaagccagttttggccacatccaggatcatcactcctttgagcaccagcactatgcaatcctttctgtctgttcggatgccgagcactactgagatggtcgaagaatccacaacggagaatccggaagcgagtacacaagcatttagcaccactcaaaaatccactgcaactgcacaaaccaaaatacttgaataactatgtaaaaaatttttaatatttattgaaattatttatacagctgttgagatatatcataaattataaagaaaaaatttccaatttttaaatcaatccaacttttttaaagcagtatgcttttaaattcccttcaattcatcaaactatagtctttctgctttgactgacaaaacaactcagacaatttcagttgccttactgatcaacatcaacaacaagccagaaaaaaaacaaaataaacggtggaaaacatgaatttcatggtaagaaaatttgtggacacgaggcaaagattacatttctaactgcatatccctgtagccaatcattctctttgtattgtatgcaatatattgcaatatgtgtaaaagtatatctaagattttatactgtggaatgaaggaaccttccgctcggaacggtactaatgcagagattttagaaatgatcgatttgaacagagatccgattctcttctatgaacagcgtatataaaggaaggaaatagataatgggaatgactatgcaagaggtagatgatatactgaacaatataacaacacccaggaacttgaacggtgattttgtcacgatgatgaagaacgaaaccttggcaaacttgcaacttaataataattacattgttacattgtgaacaaggacaaaaacaactctggaaacatttttggaaaaggagaaagtccctgatatacagccattttgacatccgtttcctgcctaacaaaactttgcatcccatgcgctaactccatgtttaagtcccagtttagtttcgagtgcaaccatttattatcatataacgttcttaaatttacaatttttaactcaaaatcaacattgttctatattaacacaacatatgtacaattacactagaacccagtttataacttgcttaacagcccaaaaatataaaataaatgttactccgatctgagctcaaagtgtccagcttaagttttttgttttctcgtttgcaggtcacctccaaatttaactgtgttccgttcttactaacgctttctgtcttaacaatttctgggatttctgctgattcagtcttcgcacttttggccacactgtctgcatcaatttcaggtcctttttccactccgtggaaagaacctttagtggtttccgggaaaggtgtcgttgcaaacgttgtattttgaatggtttctggatcggagactgcattgatctttattgatttgttcaagggattggcagtgctttcctcatcctcttcatcatccggagtctcggaagagctataacttttatatacactcgaggatgtataagtctgatatgatggataagtggttggcgctttagttgtgatgggctccgttgtcgttgtagtttcattaacagccttctcagtacttatctgcgctttatttattttgactaacttgtcgagggccatcttagtagtttcgtcattcttaggggcttcagttgatgcataggttggataagtcttatagacactggaggctgaatacgttggatacgatgaataagtaggctccgctttctgtgttgtttcatcctctttttcaactgcatttattttaactaccttgtcgagagatttcttagtagtttcgtcatcctttgaagcttctgtggaaccatagactggataagtttggtacacatttgtggatggatatgttggataagacggataagtgggctgcgatttagaagtggtagattccgaaacggtagctgtctcagtggtctgttcatcttgcttttcattaatctcttcaatggcatttactttgactatcttttctaaaggcgcctgagtagtaacgtcattcttgggagttacactggacttatagtctggataagtttgatagacacttgaggacggataagttgcatacgatgggtaagtagtatgtgtttcatccactttttcagtgctttcttcaactgcatttattttaactaccttgtcgagtgatttcttagtagtttccgtatcctttgaagcttctgtggaaccatagactggataagtttcgtacccatttgccttagtggtctcttcatcgatcttctcagtgctttcttcaactgcatttatcttaactaccttgtcgaaaggtaattgagttgtgttctcgttcgtaggagccgcagtggagttatagactggataagttttgtatacgctcgaggttggataaattggatatgaagggtatgtaggtttcggtttacgagtggtggactgcgttgtctcatcagccttttcagttgtgttctcagcacttatctggactttatttattttaatgatttcatcgacgggcacctttgtagtatcttcggtcacaggagcttcagtggtggtgtaggatgcatacgaattataagaattgaaagacttataagtcgtagttggttctgtgctagtggtcttctcagcctcctgttcaggtacttgaacagcatttatcgatagagaaggttttgatggccgtgcagtggttgtagcatgttgaggagaagcagttgttatgtatttttttaaaggcgtagtggtgacactggactccgttgaactggattcagtagattcttcaggctggccagttgttgtggagggctttggcgtatcttcgataacagcatttacctttatatttcgcctgggatttggagttacagttgaggcctcggtggtctctgagtcacctggttgaggtgtagttgtgattttatcggtcgtagttttgggagttgttgtagtggtagttgtggaagtggtcgtggaagtagttgtagaagcagttgtcgaagtagtagttggtgttgtctcataggttggattcggatatggcttggaggttccggcatactcggtgggcagattttcccaggatatctgatagggctgatatatgggcgcttcataattgggccttggggacacaaatgagcttgatggataaggctgaggcggagattgcggcccatagggtccttgagatccataaggtccttgtgatccataaggtccttgggatccataggctccacgagatccaacgttcggttggtaaggattaatcgcatagggattgtagttttgaacgcgaggcgactgaggaacgggatacctgctttcacaggggccatcgtgttgctttcgccaagctgcaatgaaaaatatattataagtatattataatataaaaaaatatattataattaattcgtattcttagtatgataccagacttataacgttcatatattctaaaaatataaaaaatcatgccttgccgtatacattcacataaggttggctagacgtgccactaaaacttttactttctcagacttcaaaacattgttgaataaaattagtcactgaatgtttgaggtaattcaaattgcataacagttacaacatgtttttttcattacagtgtattatttgtattatttaaaaagccaccattaaacagaagttaagtttagcggaatctatacgtttttcataagcttcagtacttgaagacccatctactcacgatgtcctgtgcggcacttcaccagctgcagttcgcactcgctcctgaagttgcgcctggtatccttgtactttccgcacactggattgtactgatcctggcaattgtccggacagacctccaaggtttcgcatctattctcgtgaatgatctcccagtctgcagaggaagagtgggccacaatgagtaaccatataggtttttttttttttgattccagtgaagtacttacttatgccagttagggctctgaagcgttggacttcgcaaggactgggaaaggtggatggctgggcacccggagctccggcacaaaccagactttcgggacccgacggcggacacggaagatcatatggctgctgttgttcgaaatagtgcggtgccggatagtagggaactccgtaatcccatgcccgagctccggcgaggagggcgaatccaattgaaactaggaaagctgtcattttcagaacgattcgaaagcgactatgccgtgacctccgccgcatccagcttatatacgtcctaacactcgatgttctcatacactgacaatgtaggtgtacgtgtcgggaactctgtttctgtttattataatgtattataatattgtttccataatttcgtatcaatcggcagacaccgcagacgcctcttctcccactttcattctgtcttgcactttattatgaaatatattgaccattatcgcagtgcggcttagctcaaccttgagtcatgtgaatttgtctgcgaactgcagttcttcgtaaagaaaatgagctaagaaatgagtcagcagaatgtttatagcatttcatagccgggaacttgaacttgatttccagcgatgggttgtagggcggcttgcagttcacgtgtggcactgcccaaccgtcgaatatcacgtttcctatgatataaattttgaagtctaaagccgtttacttgtattcccatttctaaaaaaaaaaaaaatagaaaacgtgatgcattggtataagtggcgttccaatcagcgaaatacaaattacttgcattttgcaattctagactgagaaaggtgtagcttttcttctggttttaaagttcattagaaatatattctgattcagagcttagtaattcatttaatggcatttattgagttcttaataaaaacatatttatataaaatggtatcgggtttctaaaagtatcaaaatctctttattttttcctatatatatatttccatatgtcaaactaataagtatatagaaaatgggactgtgcgtaagccgctgaaccgccataccactgatagtggggagtgttctgggttgtggttgctacggtggtgctggacgttgttgttggttcaatgatagttctgctggcaaccctggccacaatacaaccagagaattggaatacaatccttgaacctgtggttatcaggacattggtaacctctgcacaatt

SEQ ID NO: 39827 - DNA, 2532 bp, DROSOPHILA
atgacagctttcctagtttcaattggattcgccctcctcgccggagctcgggcatgggattacggagttccctactatccggcaccgcactatttcgaacaacagcagccatatgatcttccgtgtccgccgtcgggtcccgaaagtctggtttgtgccggagctccgggtgcccagccatccacctttcccagtccttgcgaagtccaacgcttcagagccctaactggcataaactgggagatcattcacgagaatagatgcgaaaccttggaggtctgtccggacaattgccaggatcagtacaatccagtgtgcggaaagtacaaggataccaggcgcaacttcaggagcgagtgcgaactgcagctggtgaagtgccgcacaggacatccttggcgaaagcaacacgatggcccctgtgaaagcaggtatcccgttcctcagtcgcctcgcgttcaaaactacaatccctatgcgattaatccttaccaaccgaacgttggatctcgtggagcctatggatcccaaggaccttatggatcacaaggaccttatggatctcaaggaccctatgggccgcaatctccgcctcagccttatccatcaagctcatttgtgtccccaaggcccaattatgaagcgcccatatatcagccctatcagatatcctgggaaaatctgcccaccgagtatgccggaacctccaagccatatccgaatccaacctatgagacaacaccaactactacttcgacaactgcttctacaactacttccacgaccacttccacaactaccactacaacaactcccaaaactacgaccgataaaatcacaactacacctcaaccaggtgactcagagaccaccgaggcctcaactgtaactccaaatcccaggcgaaatataaaggtaaatgctgttatcgaagatacgccaaagccctccacaacaactggccagcctgaagaatctactgaatccagttcaacggagtccagtgtcaccactacgcctttaaaaaaatacataacaactgcttctcctcaacatgctacaaccactgcacggccatcaaaaccttctctatcgataaatgctgttcaagtacctgaacaggaggctgagaagaccactagcacagaaccaactacgacttataagtctttcaattcttataattcgtatgcatcctacaccaccactgaagctcctgtgaccgaagatactacaaaggtgcccgtcgatgaaatcattaaaataaataaagtccagataagtgctgagaacacaactgaaaaggctgatgagacaacgcagtccaccactctctataactccactgcggctcctacgaacgagaacacaactcaattacctttcgacaaggtagttaagataaatgcagttgaagaaagcactgagaagatcgatgaagagaccactaaggcaaatgggtacgaaacttatccagtctatggttccacagaagcttcaaaggatacggaaactactaagaaatcactcgacaaggtagttaaaataaatgcagttgaagaaagcactgaaaaagtggatgaaacacatactacttacccatcgtatgcaacttatccgtcctcaagtgtctatcaaacttatccagactataagtccagtgtaactcccaagaatgacgttactactcaggcgcctttagaaaagatagtcaaagtaaatgccattgaagagattaatgaaaagcaagatgaacagaccactgagacagctaccgtttcggaatctaccacttctaaatcgcagcccacttatccgtcttatccaacatatccatccacaaatgtgtaccaaacttatccagtctatggttccacagaagcttcaaaggatgacgaaactactaagaaatctctcgacaaggtagttaaaataaatgcagttgaaaaagaggatgaaacaacacagaaagcggagcctacttattcatcgtatccaacgtattcagcctccagtgtctataagacttatccaacctatgcatcaactgaagcccctaagaatgacgaaactactaagatggccctcgacaagttagtcaaaataaataaagcgcagataagtactgagaaggctgttaatgaaactacaacgacaacggagcccatcacaactaaagcgccaaccacttatccatcatatcagacttatacatcctcgagtgtatataaaagttatagctcttccgagactccggatgatgaagaggatgaggaaagcactgccaatcccttgaacaaatcaataaagatcaatgcagtctccgatccagaaaccattcaaaatacaacgtttgcaacgacacctttcccggaaaccactaaaggttctttccacggagtggaaaaaggacctgaaattgatgcagacagtgtggccaaaagtgcgaagactgaatcagcagaaatcccagaaattgttaagacagaaagcagaatgattggctacagggatatgcagttagaaatgtaa

SEQ ID NO: 39828 - protein, 843 aa, DROSOPHILA
MTAFLVSIGFALLAGARAWDYGVPYYPAPHYFEQQQPYDLPCPPSGPESLVCAGAPGAQPSTFPSPCEVQRFRALTGINWEIIHENRCETLEVCPDNCQDQYNPVCGKYKDTRRNFRSECELQLVKCRTGHPWRKQHDGPCESRYPVPQSPRVQNYNPYAINPYQPNVGSRGAYGSQGPYGSQGPYGSQGPYGPQSPPQPYPSSSFVSPRPNYEAPIYQPYQISWENLPTEYAGTSKPYPNPTYETTPTTTSTTASTTTSTTTSTTTTTTTPKTTTDKITTTPQPGDSETTEASTVTPNPRRNIKVNAVIEDTPKPSTTTGQPEESTESSSTESSVTTTPLKKYITTASPQHATTTARPSKPSLSINAVQVPEQEAEKTTSTEPTTTYKSFNSYNSYASYTTTEAPVTEDTTKVPVDEIIKINKVQISAENTTEKADETTQSTTLYNSTAAPTNENTTQLPFDKVVKINAVEESTEKIDEETTKANGYETYPVYGSTEASKDTETTKKSLDKVVKINAVEESTEKVDETHTTYPSYATYPSSSVYQTYPDYKSSVTPKNDVTTQAPLEKIVKVNAIEEINEKQDEQTTETATVSESTTSKSQPTYPSYPTYPSTNVYQTYPVYGSTEASKDDETTKKSLDKVVKINAVEKEDETTQKAEPTYSSYPTYSASSVYKTYPTYASTEAPKNDETTKMALDKLVKINKAQISTEKAVNETTTTTEPITTKAPTTYPSYQTYTSSSVYKSYSSSETPDDEEDEESTANPLNKSIKINAVSDPETIQNTTFATTPFPETTKGSFHGVEKGPEIDADSVAKSAKTESAEIPEIVKTESRMIGYRDMQLEM

SEQ ID NO: 39829 - DNA, 2279 bp, DROSOPHILA
aacccagaatgccatcctcaaaaatgttgtgatccaaaaatgtttggacttttgtttacttaaatgaaaaagggagtgtgtgtgtgtgtgtgtaagtgtgcaacctacacccatgtatgcgtgtgtgtgtgcgtttgggtgagtgggtgctacaaaatttgtaataaaccaaagtcaaagagcgtttaatttggcattttcctaaagcaattcgattcgattcgtctcgtttcgattggattgcaaataccggaacatgggaattaatagcaagttcatttcgattttttttttacaagaatatatttttctttggcttagtttttgatttttcctggaattcatagcgtagagtataaatctatagaatatcggaagataaatataatccatttaatagcttaaggcgtaatgttttatttattcatatgtgtatggtttatattgctgattttatttaagttttttgttacgttttattatacaaatatttttactatagttatttttgttgcattttgaaggatatatttttattattattttgtttactcctttggacttcttatattttgagaatcccccttttggttaaattgccatttggtgactgcacgcaaagcgggtaaattattgtgccaacaatgacagcattaattgccgacactcacacaggcaaagatcacacaaacacacacacacatccctttcactcacaatcacattcacatttaaggaaccgagccgtgacgttgtttcagttaatttttgctgcctgtcacaggacatgcaaaaaggtattttaatacatgtcaatgtttggggtgcttttctctgcggatgtgttttgttattatattcctttatatattgtataactacgtaacaatatattatacagcttaggtggcagtggagatgtggaaactgccgactaactccaatccccccctttctaggaccccctgcgtatttagcagctgccttctatgtccttgggatgtccagcattaggggaaccaaagattcggctccatcctcgctgcatcctcgaatatcgcagctggagttcgtccatgacgctgttgaatgcatcaggggagaggctcggtgcctggcaattgttgtagatccagagactgcctacctttccacggagaaatccgttgactgccacgacctcgactatctgggttgcgacctacccgcctacccatatgatatgcttatgcacttgtcactgggaacaattttgtacggctttccgggtttctcctgaagatcgcccgcgtcggttgagtctgttgtccatttttcacactctcgtgttttgctgctccttatcgacaatgcttcccgcagtatgcgagcattttccacgggctctctttttccggtgtctcctgtggtgttcatctactcacaaatgctcgatggcgaatgtgtgtgtgtgtatgtgcttatgtgtgtgtctggtgcctatgtttgtgttaattgagtttatgttatcaaagatgtgctttgttgtggttttgacagcgaattttgactacaaaaaaaaaaaaaaaaatattcatctaaaatcgttaaataaaagtgctcttgtgtgaacaaaaaaccggttttgcataaacataattgcttccttgtttgcccatggaaaatttaacaaattttactaaattgaagtgacaacatttttacagagaatgccgcctttaaccttggtttgtattaaaaatgtttattattatgaaaagaatatgtatgtatgtatgcctttttctatatttttataccattttaatagaaaattgtttagtgttggaattttttgtggccgaattgtgctttttgcatttcatttgttgtcatccagaaatttcgtcaattaattttctactcttggcagggttttcgtttatatagaaagttttcggagggatttcccctttgtatgccactggtgaaattgttggctcacaagcagtatgtgtttttttttttttgtcgttttcggacattttcataatgaataatattttgttgttttggtttcgtttggctttgacatgggtaaacatttggccaagtcaaacatttgtgtggggtttaaagttcattgcattgtgtcagggttgatttcggccgtctcttcccatttttcccgcttttccggcacttttccgcacaaacacacacacacacacacacatgcagacatgctgacatacatacacgtgaaaaccctttttatttgcctgacccatgaagacaca

SEQ ID NO: 39830 - DNA, 279 bp, DROSOPHILA
atgtccagcattaggggaaccaaagattcggctccatcctcgctgcatcctcgaatatcgcagctggagttcgtccatgacgctgttgaatgcatcaggggagaggctcggtgcctggcaattgttgtagatccagagactgcctacctttccacggagaaatccgttgactgccacgacctcgactatctgggttgcgacctacccgcctacccatatgatatgcttatgcacttgtcactgggaacaattttgtacggctttccgggtttctcctga

SEQ ID NO: 39831 - protein, 92 aa, DROSOPHILA
MSSIRGTKDSAPSSLHPRISQLEFVHDAVECIRGEARCLAIVVDPETAYLSTEKSVDCHDLDYLGCDLPAYPYDMLMHLSLGTILYGFPGFS

SEQ ID NO: 39832 - DNA, 2500 bp, DROSOPHILA
caataatgccaatgttactaatcttacttatcgtttctaacgattcccttctagcttttattataatttttgcatttttatttttaggtagaaactaactttaaaaatattgcccatgctcagacagctccaaaaaatatttatatactaggagccgtaactaatgtggtgaactgtggtgtaaagtgtcttacggcgacttatggtgaacatttttattggatttacaaaaaaaaaacctatcttcctagaagaagttgccctcattcagttagctaaacactaatcaacaatttttgatccggtacatagagctatatactcttatatacaatacgcttacatagatgtccatatatctttgtatatattatatatatatatatatttcttttactatagagtcttaggagctagagactgtcttatacgttcgcttgatgagtttgttctggtttcttggtgttgcttactcatctatacttaggtagatgtaaatgtatatgctatatctgctggctctaccgattcgatttggattcggattcggattcggatcacattgaaagtactcgaaaatgttttgcaatttggggcgactttccatgccctagctgtttcctgttccacgtacattgaaattattattgtatctattataagtctggggatataagtgaaaacctacgcatcgatggctcgatgcatctatgcatctttgcatctttgcatctttgcatctttgcttctttgcatctttgtatctttgcatctttgcatctatggatctttgcatctttgcattcattcaattgtagttcagacattttgccacagatacgtggcctggtttctttttagctttgcttattacactgtaataatttttttttttttttgggtagagagtgtcctacgctttaggagcaacaaaaaatgaggatattgtgatttagcttcgccttaagttgatctccatctcttgctatttgacttcaagttataagttcaggaagctattgcccaggaatcccagcattatggtggacatggcaatcggggcgagttgcacattcgaggccgtactgttgccggccagtatctcggccctctttcgcatgcgttcctattgtcaaaaggtggaatatcgcgtataaatttgggcaaatattttcatatttcacgcatccacgtacctggtacagtttgtcctcgccgggcggatccaagcactcgaactcacagcaacgttcgccaactcgaaagtttttgcaaaactaatggggagaaaacgattgaagttagtttaaatctataaatgcgattaacatctatttgtcttaagttacaatcgcacaatggattatttaagttatatactaagactgggtgggcggcactcacatagggtggatcacagtagatggccttgcaccagagtggttcggagtgatagcagacgcaaaggctacagactcctggtccaggcacatagagcattccgtggttcaccttgttgccctgaaagtcaacacagtcctcctcgagtgcagctgtgaaaacgaagataatcagttggttatttcaatcgtttcgactatctaagaaactatcgaagtaactgtgtgcgtgcctgagaatgctccactttaatccggctagtcaatcgcttgaactcgcagatcaggggctatcaattcatttgaaccggggttacgtaaatgccaattccgaatcaaatcaaaagccagataatacgtgttttgtgcgtcgtttgccattgaactgatttcgattgtcagttcgttaaacgaagatgattgaataattaattgacattcctggtactttcatgaatgaatctctgagttgaattgtatctaagcattttgaagatatgaaaaacttatagatgcagttataattctagcttataaatttagcttcatttctatttaagtgcaaatataaaaaaactgcgtagctttaattttcaattcgaatgcctgcgcactttatagatacccaaaagtgtttaccctcttcattaggaaaataaatacccgatgttacaatgtaatttcagggtgcaacaatgggacagtgccactgacagttggacatttgtggggacagacagctggcagctatacatacatatacatatacatatacatagatgtggggtcaccgggctgccaaggaggtggtcactgtgttagcttttgaccgcgaactcaaaagctctgcaacattgctgcaaccaacatttctgcacacgaaagtggaattgttgcaagtgacgtaggcgttgctgggcatttgttgccgattcgaaggtgcaggttcgaccgcaacaccacaaattgcggatgcggtctttaatgggtcgcattctacacttgcaacaatcggatggcatgccacaatgagttgtagagcaattgtttaatagattgatagaatagattaataataagttgtgtttattgttaactta

SEQ ID NO: 39833 - DNA, 303 bp, DROSOPHILA
atgctctatgtgcctggaccaggagtctgtagcctttgcgtctgctatcactccgaaccactctggtgcaaggccatctactgtgatccaccctatttttgcaaaaactttcgagttggcgaacgttgctgtgagttcgagtgcttggatccgcccggcgaggacaaactgtaccaggaacgcatgcgaaagagggccgagatactggccggcaacagtacggcctcgaatgtgcaactcgccccgattgccatgtccaccataatgctgggattcctgggcaatagcttcctgaacttataa

SEQ ID NO: 39834 - protein, 100 aa, DROSOPHILA
MLYVPGPGVCSLCVCYHSEPLWCKAIYCDPPYFCKNFRVGERCCEFECLDPPGEDKLYQERMRKRAEILAGNSTASNVQLAPIAMSTIMLGFLGNSFLNL

SEQ ID NO: 39835 - DNA, 3916 bp, DROSOPHILA
aaccccaacaccaatgcaaagagatccatgtgtttgcgctcgcagtgtgtgtgcttgcgtgtgggtgtgtgtgtgggcttagagtcgagtataatgctgattggtaataccctgcagtttcccaaatggccgatgaacaccgcgcggggcaacttatgtacttatgtacatacatacatatgtacattttttggcaatctataaagctttgcttatgcgtgacaaattttattgtcgcattttatttacaaattttgtttctaaaatattttctattcatttggtgactttctgaattttgaatttttcttgatttttgtccattctccaactcctgacatccacctcgtcctgcctaacatgctcatcctgtgatcctgatctctgtctttgtctctgtctctatctctccagtaggtagcctctttatcgtcttgttggctgaactgctctttttggtgattgtatgtgtgtatgaaacttttccttgagggaaaaaacgtatatttctggtgaacccatctccgccgtgtcaatttgctccttctagtgttccaaagcattgcgttgcgatcgtcttcagttcagttgttttgtagtaaatatatgtattttcacttctctcacaagtggtttatttgagtgtattccttctcctcggcggttttctgtcttttgaacaaaccaacgtagttttatgctcctctttagaattctcctcctcgctatcctcctcatccatcaccagttggccatttaatgtcggaaacttaatgaccggcaaaattttgcgctgctgattgctttcattcataagcttcttgatgagattagcgatatcctcacgcttcttggttactgtgagcaggtcaaaccaattgctcagctccttaatgggcagtgtatagtcgttgatgggttttgtgaagaattgctccacatattgcagcagatagaggcccgcaatctgtaagattctgctgttgcgggcacctccacactatgaccggggcatattatccttgttaaagacatgcgccagcgcattcggatacttggccttgtgctcacaggtgagataatcccgcaatatggcaatcgctcgatgtcttgaggtgactgccaacgaatcgaaaataagtatcaacggctgtttgatgggaatatcatcactgagtgtcgtctgcacattattattgtttaccaccgggcttctaaggtttggataacatataatggccagtatccaatgggactgctcattgaatggtattataatgaagtccttgtcgaatatattgacgtttcgtgtccacttctcaaccctttcgtgacgcttctgggccgccgtctgcttcgtatttctgggattcgttcgtgtggtcaatcttttgtggaaaaacgtgctaaagatatgcgtcctatcgcgctggtcctctggtatgatgttattctttagccagcgcaaataaaaatcaatgattatatcgttcagatacgatcctttactgagacacataaagtccttgatggtgatgctcaggccaccggtaccagttggcggatatgtgaaaagggtttgattctcatcgggtgaaagtcttctctcggtttggccatcatcgccggcggtggtctcctcatcaccgctgctcaccagcaccacggcatcttcatcaacgtccctgcttagtatccaattgcgatttcggcgcaggcgactacgctctgcgcgttctgctggtgtgggtatagcagcgtcgctagttgctttcaccgctggcgaggatatggatgcaacattcgattgcacccgcgattgagatccaccagctgtctcttccgatttcttgctaacagcggcattgttcctcgactggatccactgggagattgcgggagcatcttcagctggttgcacgccccgaagaccattactcgtcattgtagaattggaggttatagccgtggagttgtgacttccctgtttattgccagatgaactagggttgtcatgagaactagcagcttgaattccattgttatcctttgcaatatggcacttcttctgtttcttggccttggtattagtattggcgtcttgatccgccgacaatatcacttggccatcattgttttctcccggactcccgcaaggacttttcttgtgcttcttgcctttggttgcacttgcagctggctggcaaccattgttggccaccgcagtctctgatggtttgacaaccgcaggggagtgctcttcaccggccatcgcattgggtggagcggcatcagccgatgatgcctttgactgatgcaccttcctatagaactcctccgcatgggcaaccgtctcggcaatgttatcactgatggggaagcccacagagacaaccaaatggataataccgccggcattctcaatgcaatcaatcgtggtgctctcatcgatctgaaggtccatttggaaaaacagatcctgcaccctacacgcaagattcggcagcttgaaggtgacgatgtgctgctttccactgctgtagataatcaacatcctggcacttcctttgtccggatccgtgtcggctcgattgatcagcaattgacgtgagactaatataaagtcattatgggcaattcgacgtaccgcttggtccttcgaaacagtttctttgcgatccattttggagccggattcaatagtataacatatgtacgttatatgggctgatctgactgaactgaagtttctcgtttcgattgcaaattctcgggctgcttgatgtgcaaagttaactggatggttgaagagtcacctaacacggtgactttgatcactatattcctttcattttccaatctgtgtgttttatgcgatatttgatatctgtctatttttattgttggggtaaacggcgtcccaagtgctgtatccaaaaatcatctgtgcgagttgctatcgccatcggagttttgctgctcatatcgatacatatgtatatgtttccaattggtatggattttgtggggtgtttttaaaaatatgtatcgatagtccgctttgaaatttgaatgttgcgaatattgaaattaaataatatttgaactgacgaaatataggcatttaagcgaatcttagctaagctaagttctttgcttttcatttacaagtattagtattcttacatgtggtatttacaaagttataagttcagccgtttgttgcaagttctttgtatgggaatttttaaaaaccaaaaatttattctcgttttaatttcaacattttgcaaatacaagtacagacattaatcaaattatagttgtgcgtccgtcatcgggtccacctgtccgatttttagtcgtcagcattgagctcctctcaccacatggatcgcttggcggcgataagaaaatcaaatgtaaacaaaaatattattgtttttttgttttttgccaagagcgtatttataaaaaaaaaaaaaaaacaactgacagacacacacacgttttcctttccgcgggccaaagggctccatttcgcaatttgcatcggttgccaagtgcggaaaaacgcatctaaatcacaacgttgttagctgtcagaaagtttgccaagtcgaattccttaaatgtgaagcaactggaaactggcttttgttttacatttacaaatttactattactactactgtatatactttactaaatagtgtcatatctgtgctggctgcagtaatatattttgcaaaatatatttttattcgaattgttttttcttatgcatatattaattatatatattatttaaaatatatttaacatttaagcacgtggaaaatgcatatgtaaataatacaacaagcctgctctatttttaaatatccagctgagtacatcatatttttcgggaaaa

SEQ ID NO: 39836 - DNA, 1916 bp, DROSOPHILA
ccgtttaccccaacaataaaaatagacagatatcaaatatcgcataaaacacacagattggaaaatgaaaggaatatagtgatcaaagtcaccgtgttaggtgactcttcaaccatccagttaactttgcacatcaagcagcccgagaatttgcaatcgaaacgagaaacttcagttcagtcagatcagcccatataacgtacatatgttatactattgaatccggctccaaaatggatcgcaaagaaactgtttcgaaggaccaagcggtacgtcgaattgcccataatgactttatattagtctcacgtcaattgctgatcaatcgagccgacacggatccggacaaaggaagtgccaggatgttgattatctacagcagtggaaagcagcacatcgtcaccttcaagctgccgaatcttgcgtgtagggtgcaggatctgtttttccaaatggaccttcagatcgatgagagcaccacgattgattgcattgagaatgccggcggtattatccatttggttgtctctgtgggcttccccatcagtgataacattgccgagacggttgcccatgcggaggagttctataggaaggtgcatcagtcaaaggcatcatcggctgatgccgctccacccaatgcgatggccggtgaagagcactcccctgcggttgtcaaaccatcagagactgcggtggccaacaatggttgccagccagctgcaagtgcaaccaaaggcaagaagcacaagaaaagtccttgcgggagtccgggagaaaacaatgatggccaagtgatattgtcggcggatcaagacgccaatactaataccaaggccaagaaacagaagaagtgccatattgcaaaggataacaatggaattcaagctgctagttctcatgacaaccctagttcatctggcaataaacagggaagtcacaactccacggctataacctccaattctacaatgacgagtaatggtcttcggggcgtgcaaccagctgaagatgctcccgcaatctcccagtggatccagtcgaggaacaatgccgctgttagcaagaaatcggaagagacagctggtggatctcaatcgcgggtgcaatcgaatgttgcatccatatcctcgccagcggtgaaagcaactagcgacgctgctatacccacaccagcagaacgcgcagagcgtagtcgcctgcgccgaaatcgcaattggatactaagcagggacgttgatgaagatgccgtggtgctggtgagcagcggtgatgaggagaccaccgccggcgatgatggccaaaccgagagaagactttcacccgatgagaatcaaacccttttcacatatccgccaactggtaccggtggcctgagcatcaccatcaaggactttatgtgtctcagtaaaggatcgtatctgaacgatataatcattgatttttatttgcgctggctaaagaataacatcataccagaggaccagcgcgataggacgcatatctttagcacgtttttccacaaaagattgaccacacgaacgaatcccagaaatacgaagcagacggcggcccagaagcgtcacgaaagggttgagaagtggacacgaaacgtcaatatattcgacaaggacttcattataataccattcaatgagcagtcccattggatactggccattatatgttatccaaaccttagaagcccggtggtaaacaataataatgtgcagacgacactcagtgatgatattcccatcaaacagccgttgatacttattttcgattcgttggcagtcacctcaagacatcgagcgattgccatattgcgggattatctcacctgtgagcacaaggccaagtatccgaatgcgctggcgcatgtctttaacaaggataatatgccccggtcatag

SEQ ID NO: 39837 - protein, 560 aa, DROSOPHILA
MDRKETVSKDQAVRRIAHNDFILVSRQLLINRADTDPDKGSARMLIIYSSGKQHIVTFKLPNLACRVQDLFFQMDLQIDESTTIDCIENAGGIIHLVVSVGFPISDNIAETVAHAEEFYRKVHQSKASSADAAPPNAMAGEEHSPAVVKPSETAVANNGCQPAASATKGKKHKKSPCGSPGENNDGQVILSADQDANTNTKAKKQKKCHIAKDNNGIQAASSHDNPSSSGNKQGSHNSTAITSNSTMTSNGLRGVQPAEDAPAISQWIQSRNNAAVSKKSEETAGGSQSRVQSNVASISSPAVKATSDAAIPTPAERAERSRLRRNRNWILSRDVDEDAVVLVSSGDEETTAGDDGQTERRLSPDENQTLFTYPPTGTGGLSITIKDFMCLSKGSYLNDIIIDFYLRWLKNNIIPEDQRDRTHIFSTFFHKRLTTRTNPRNTKQTAAQKRHERVEKWTRNVNIFDKDFIIIPFNEQSHWILAIICYPNLRSPVVNNNNVQTTLSDDIPIKQPLILIFDSLAVTSRHRAIAILRDYLTCEHKAKYPNALAHVFNKDNMPRS

SEQ ID NO: 39838 - DNA, 4373 bp, DROSOPHILA
atgcccacaaatcaattaagtcgattggggcaacattttcggttggtaacacacacacacacgcacaagaaaacggtaaagagttgttaagcgcccaaatgacaaatgcaaaagagtggaaggcaaaagcactcaaaagaaccgcgaagtcgaatctcctgcaacccaaaaaaaaaatctaggcaatccaacagctaagaaagaacgctatgcttctttcaaagatttgttcatttacaaaaggcaacaaatcaaatcaattagtaagtaaccaaaaacatctcagcttccggccagtgttggtaagttacctaacaagcagcagctaaagaattatattataccagttcttaaactataattatataaataaaatattaattatataataataattatataataataaaaaaattatataaaatttgttaatgttgcatgaacaaataaattgaattatgatcatatctttgccgtgcattcatttggagattataatataaattgcaaactgcaaaagaactcacaataaaatcacatgtttaacaaataaaatttaaatatagcacactaatttgcatctattaatggtttattatttccacaaaaaccatatgcaatgcatttttcgagttcaattcccaaaatgtgtcgatgcggccaacgagtgaaaacgaatggcagcgaattcctgggccgaaggacgaaggacgaaggacgaaggacgaaggacgatgagcatgcggcatgttgctgctgttctggcttgccgggaagtataaataccggagacgcacggccgtcggccatcagttctgcaaacgatttcactttggacgcgcgacgcgttggtgctcctgctcctttcgttcgtcgttcctcgtcgtccttgccacgaaaatctcgccacaaaattcagcttgtttgtttgcatttctttttttttgttgtttttctgcttttttttttttttttttgattgtgcacgtgcagcaaagcaatgttcaccaattggctgactggcagcagcagcagcagcagcagcacgccgataattcgctccaatgcagccggtatcgttggtgccggcaatgtgacaccgagcggagtcagtgccaccgctttggtgatgagctcgccaccggatgttattctagaggtgggtccggcacccagcaatgtgcgtttcgtggcgcactccctggtgctgggcatgcacagtggttacctgcgttccgccattcgtttggatgagactgccgccggcaccgccgcctccgtatccgcatccgcatcgatatcgataacgggtgcaacagctgccagttgcaatccatcatcatcatcatcagcagcatcatcatcatcatcagcggtcacgacggcatcgggcgaactattgctatatctcagtaatgtgacagccgatcaatttgcaccgctactaacctatatgtataccggttatctcgatctgaacgtcgacaatatctttgccgtactgctggccacccatgtgctgcacatgccacgggcactggaaatctgccggtgggtgtgggttcaatccaatgaataatatgcgaaatagcttgcaatatccatgggcataacgaatttaatatatataattattccattgatcaagagttaaaactatttaaaatatgtatatttattttctagctcatttttggcgcgcgctcaaacggagggctatttgaacggtaatcccgccgcccagctttgtccagtgcccagcatacccgccaagatcatccggccgataccgagcaaggcaaccatgccgaattttggctttctccccctgccacaagcgccgccaagtgttgcaccttcggcacaaccaacggctcatcaaccaacaactggcatcgctccagttgcttcggcttcaattctaagttcatttggcaccaacacgcagcatatggagcacatggaacagcccatagccatgctggacaacgaagtggatgaggaggatgtggaggtatttatcgatagcaatacggtgacggataacgaagccgaagaactcgaaccggatgtggatatggactgtaatgtttcggtggtaagttctctggccgccagcagtgccggcagcatgaatatcgaacgtttggatgtgaagccaccaacacccatacccgtgtctgttgccaccataatatcagccactacgaccaagtcgcaagctcaaagtcttggtcagtccaaaggtcaaaactctagaagagagtcaaattccaagggtaacagaacaaaatcctccgcatcccgatcgcgaaaatccagtggcctgcaggtggccaaggctcctgtgccggctgctcaattggatttgacagcagccgccacaccatcgataacatcctcgaaattcatcatcgatgtggccagttgcgatggaccggttcgttttcgaaggattctcaacacagcctacggtcacaagccagaggccatggaatcgaatgcgttagctggtcctgccactgctccagctggcggcagttcaaactcaacgatcagcgaacaacatcgcagccaacagagtgttagcttatcgtttcaccagcaaatggccagagccatcagtagccagcagcggcaattgagtcatcagcagcaggaggagagcgagaatagtggcgatgccataccagcaacgattggtaagcagcatgcaacaggagccaccgctgcatcgtcagccatgtcaacatcatcaacgcatgctggcagcaatagaaagtcacaggcaacgggaacgggaacgggatcgggatcagcaaccgcatcatccgctggaaatcaggagctctacgtatgcgtctattgtaagcatacatttaaatcacaatattgctatcaaaagcatgccaagcgacatttgaacccattgactttgaccaccaacgataagaaactgctgatggaatctgccgcttcaatggccaacactatcgaaatggacaatccatcatcggtgggtcagagtggtgcaaacaattcgagcggttcgattgcaactggtaatggtgcaacagctgttgcagcaacaacagccttgctgcgacgtgaggttcgaccgctggacatgaatgtgcaatattatccctgcaagacgtgtggcagcaagtttcccagctactattttgtgcacaagcatcgaaaaatgtgccatgcggatgagatcgaggcgacggccactagcaatacgagcaacaacagcagcagcaacaacagcagcaacaacaacagcagcagcagcagcggcagcagcggcagcagcagcaaccacgcgaaacgcgacgatcagcagcaacaacaacaacaatcctaaagtaaatagagtacatgcaacaacaaatatggcaattggcactggcaaaatcaaagcaacgaaatttacgaatttatctacacctatcacacacacatctcacacacacacacacacagaatgtgtgtgttttttttttttttgtcgctctagaaatgcaattgaattaataaaatgtacttaaaaacaatcagcattgcgagcataatggtgaaacataatgggttaaatctaggaaaatacgtaaatacaagtgcacaagtgaaagtggaaaagcgtcaagttttgaatttgatacaaaaataatgaagaataaaaatctccttaaaaaaaaaaaaaaataagaaatctgtgcataaatcaaatgcaagttctgcaaaatgtttgaaattagaattaatgcattggaatgctttcaaatcgaaccgattttcatatagcatatagcatatagcctcgaatcgcatccacattccagcagctcatcatcatcatcattatgctccacttcttgcaccctttgaaacgaagattgaaatgcgaaatggcaaggggaattcaaaggtaaacaattcttgccgcaatttaataattaaattaaatcacttgcataataaaaaaaaaaaaaaaaagacgtttacaaaaaagactttaatttaattgagtttaattaactcgccagggagatgacagccaacaaggccgagcgaagcaaagacgatgatgctacgtgggtggcagtgggtggtgggtggtggtttgtttttggttcagtgggtggtgctgggcgttgggcggtggtgcaaacaaaaaccgcaagcggtcgaaaaaagcgttgatctgagcaccgcagaaaatgaggaaaatgagcgctggcagcgagacactcgcgggaaaaccagaaaaccagcgtagccaccaattgagctactcctttatacccacctcgttgctcccatcccgtgtcaactctttttggccctggactccgaccaacttg

SEQ ID NO: 39839 - DNA, 2238 bp, DROSOPHILA
atgttcaccaattggctgactggcagcagcagcagcagcagcagcacgccgataattcgctccaatgcagccggtatcgttggtgccggcaatgtgacaccgagcggagtcagtgccaccgctttggtgatgagctcgccaccggatgttattctagaggtgggtccggcacccagcaatgtgcgtttcgtggcgcactccctggtgctgggcatgcacagtggttacctgcgttccgccattcgtttggatgagactgccgccggcaccgccgcctccgtatccgcatccgcatcgatatcgataacgggtgcaacagctgccagttgcaatccatcatcatcatcatcagcagcatcatcatcatcatcagcggtcacgacggcatcgggcgaactattgctatatctcagtaatgtgacagccgatcaatttgcaccgctactaacctatatgtataccggttatctcgatctgaacgtcgacaatatctttgccgtactgctggccacccatgtgctgcacatgccacgggcactggaaatctgccgctcatttttggcgcgcgctcaaacggagggctatttgaacggtaatcccgccgcccagctttgtccagtgcccagcatacccgccaagatcatccggccgataccgagcaaggcaaccatgccgaattttggctttctccccctgccacaagcgccgccaagtgttgcaccttcggcacaaccaacggctcatcaaccaacaactggcatcgctccagttgcttcggcttcaattctaagttcatttggcaccaacacgcagcatatggagcacatggaacagcccatagccatgctggacaacgaagtggatgaggaggatgtggaggtatttatcgatagcaatacggtgacggataacgaagccgaagaactcgaaccggatgtggatatggactgtaatgtttcggtggtaagttctctggccgccagcagtgccggcagcatgaatatcgaacgtttggatgtgaagccaccaacacccatacccgtgtctgttgccaccataatatcagccactacgaccaagtcgcaagctcaaagtcttggtcagtccaaaggtcaaaactctagaagagagtcaaattccaagggtaacagaacaaaatcctccgcatcccgatcgcgaaaatccagtggcctgcaggtggccaaggctcctgtgccggctgctcaattggatttgacagcagccgccacaccatcgataacatcctcgaaattcatcatcgatgtggccagttgcgatggaccggttcgttttcgaaggattctcaacacagcctacggtcacaagccagaggccatggaatcgaatgcgttagctggtcctgccactgctccagctggcggcagttcaaactcaacgatcagcgaacaacatcgcagccaacagagtgttagcttatcgtttcaccagcaaatggccagagccatcagtagccagcagcggcaattgagtcatcagcagcaggaggagagcgagaatagtggcgatgccataccagcaacgattggtaagcagcatgcaacaggagccaccgctgcatcgtcagccatgtcaacatcatcaacgcatgctggcagcaatagaaagtcacaggcaacgggaacgggaacgggatcgggatcagcaaccgcatcatccgctggaaatcaggagctctacgtatgcgtctattgtaagcatacatttaaatcacaatattgctatcaaaagcatgccaagcgacatttgaacccattgactttgaccaccaacgataagaaactgctgatggaatctgccgcttcaatggccaacactatcgaaatggacaatccatcatcggtgggtcagagtggtgcaaacaattcgagcggttcgattgcaactggtaatggtgcaacagctgttgcagcaacaacagccttgctgcgacgtgaggttcgaccgctggacatgaatgtgcaatattatccctgcaagacgtgtggcagcaagtttcccagctactattttgtgcacaagcatcgaaaaatgtgccatgcggatgagatcgaggcgacggccactagcaatacgagcaacaacagcagcagcaacaacagcagcaacaacaacagcagcagcagcagcggcagcagcggcagcagcagcaaccacgcgaaacgcgacgatcagcagcaacaacaacaacaatcctaa

SEQ ID NO: 39840 - protein, 745 aa, DROSOPHILA
MFTNWLTGSSSSSSSTPIIRSNAAGIVGAGNVTPSGVSATALVMSSPPDVILEVGPAPSNVRFVAHSLVLGMHSGYLRSAIRLDETAAGTAASVSASASISITGATAASCNPSSSSSAASSSSSAVTTASGELLLYLSNVTADQFAPLLTYMYTGYLDLNVDNIFAVLLATHVLHMPRALEICRSFLARAQTEGYLNGNPAAQLCPVPSIPAKIIRPIPSKATMPNFGFLPLPQAPPSVAPSAQPTAHQPTTGIAPVASASILSSFGTNTQHMEHMEQPIAMLDNEVDEEDVEVFIDSNTVTDNEAEELEPDVDMDCNVSVVSSLAASSAGSMNIERLDVKPPTPIPVSVATIISATTTKSQAQSLGQSKGQNSRRESNSKGNRTKSSASRSRKSSGLQVAKAPVPAAQLDLTAAATPSITSSKFIIDVASCDGPVRFRRILNTAYGHKPEAMESNALAGPATAPAGGSSNSTISEQHRSQQSVSLSFHQQMARAISSQQRQLSHQQQEESENSGDAIPATIGKQHATGATAASSAMSTSSTHAGSNRKSQATGTGTGSGSATASSAGNQELYVCVYCKHTFKSQYCYQKHAKRHLNPLTLTTNDKKLLMESAASMANTIEMDNPSSVGQSGANNSSGSIATGNGATAVAATTALLRREVRPLDMNVQYYPCKTCGSKFPSYYFVHKHRKMCHADEIEATATSNTSNNSSSNNSSNNNSSSSSGSSGSSSNHAKRDDQQQQQQQS

SEQ ID NO: 39841 - DNA, 1742 bp, DROSOPHILA
ccaccaggcggtggcaccacctggtgcctttgccaaggccaaggcagcgcatgccctgagtgaactgggtgcagtcggtggtggggtgtcattggtggtgggcggcggctctggaggaattgcaggcggaccaggtggtgtctcagtcggtgtcggtgtaccgggcggcggcggaccaggaagcggtggcggcggcggtggcggtcacaattccagttcatcgcaagcatctgctgcggttgccgctgccgttgcagcggcggccagtgagtccaagccgctgctgttgtccaagtacgatgcactcagcgacgaagattagttgtgactgccggcgtcgtcatcggcgtcggcgtcgcacctgcggccagcgacaatagcagtagcagcagcactaacgcccggcagcagtacgagcgtggtatacggctatcctggctaccggcgacactctcagcatcagcaacaacaacaacagcaacaacaacaacaacagcagccaccgcatccgcatcttgtccagcagcagcagtcgccacatcgtcagcagcagcagctgtaccagaccacggtgctgccgcctccattgcagtcccagcagcagcaactccaacagcagcaacagcagcaacagcagcagcagcaactccaccagcagcagaggagtctctactatgccagcgagcattatccgggaggcaacggaggcagctctgccggcggcaatccgggctactactgacagcagcatctgcaacattagcaacagcagcagcagcaacaacagcagcaacaacaacagcagcagcaacaacagcaaatgaaacaccataagttgtagaacaagatgcgtgagctaggcaaacgacatgtgtaaaaaaaaaaaacaaaataacagataagaaaaaaggctttaacaaaaagaagaattaaattaagagcaggcaaatataataggcaggcaattgagagatcacaagagatgcggagaggagtcaagtggagagcagacggcaatgcagacttgacaacattttaggtatagtttttgtccaatgaaaatgatttagacaatttaaaaaagtgcaaataaacaaattgtggatgcaggagaatgcagactagcataaaacttaaaactttaactatatggattgtaaatttggcacgtccaaaaaaagactttttaaagcgtgattcaaaacattttcttagtaatttaacgcaaatcatttgtaattgtatataaaaaaaaaaatgctaaatctgagcaaaacgaaatccgtattctttatgtcgcctaattgtacatgtccccatttgtgtagacgcgtgtgtccatgtccatgtccttgttcatttttttttgtcatgttcttgtcatttgttatttgtcctttgtctttcggtcgttgattccctctgctcctcacacagctccagcctcagcaccccgagtcagaacgttatgagaatggtagtgagaacaatttagatgcatatatatatatataaaactaaagatcacaccacacacacacacatatatatatatatacaatacactatgagtataaggagtaaacaaaataaataaaacacactgttgggctgttcttagaaaaaaaaaacaaaacaaaagaaaacaaaaaacctaagcaaaagtaaacgagaaacaagtaaatatagatatatatatatattacctataaaacactttaatcattatttaaacgacttat

SEQ ID NO: 39842 - DNA, 387 bp, DROSOPHILA
atgcactcagcgacgaagattagttcagtagcagcagcactaacgcccggcagcagtacgagcgtggtatacggctatcctggctaccggcgacactctcagcatcagcaacaacaacaacagcaacaacaacaacaacagcagccaccgcatccgcatcttgtccagcagcagcagtcgccacatcgtcagcagcagcagctgtaccagaccacggtgctgccgcctccattgcagtcccagcagcagcaactccaacagcagcaacagcagcaacagcagcagcagcaactccaccagcagcagaggagtctctactatgccagcgagcattatccgggaggcaacggaggcagctctgccggcggcaatccgggctactactga

SEQ ID NO: 39843 - protein, 128 aa, DROSOPHILA
MHSATKISSVAAALTPGSSTSVVYGYPGYRRHSQHQQQQQQQQQQQQQPPHPHLVQQQQSPHRQQQQLYQTTVLPPPLQSQQQQLQQQQQQQQQQQQLHQQQRSLYYASEHYPGGNGGSSAGGNPGYY

SEQ ID NO: 39844 - DNA, 2336 bp, DROSOPHILA
ctgaaaaccacattaacaaacacattcacatggaaagcacacagatcaattaacaaccattaggcagcctagcggtactttagtgttgtgcagctcaaaaaaaaaagcataaaaaaacttagcgcaaaatcgcaattgcaattagataataaagaaaattcgattaaatatctaagcaatagttttgcctactaccgcccgccgcttttactcctctctctctctctatctatctatctatctctatctctctttatcactctatctctctctatttctgtatccgcctgtttcttttcacaatatttatgaacgtatgtaacgattttaatgtaactcgtttatttatctctttcttctatctatggcatacaatccatcaaaaacaaaaaaccaaaatcactttctgattcccaaaaccaaacccgaataaattacagataaattggatggaactttctcaagatccagatcatcgtcaatgtccagcattgatatgtcttcctctgaatctgttacctgtttagcttttatcgagagttatgcaaaacgaaatggtaagactgatcggtgattagattatatcttaacatctatacatatatttaacattgtttttacttagatattttgacacttgttcctactttgtggattggaactagtttcggttcgatactgacattgttcatcaccatgcccgagcgagatgtgcgcaaatctcagccagtattgataacaataaatggtaagtgataaagccacgcacataaatgaaaacctttttaaatatcttctccttttttcaggtggccccgtggtacgactcaaaggatccataacttccatgtcttttttagactcatacggttcgatcataccctatacgtttgagacctggcgtgacgagaagagggacaacaaagatcgtaagcatctcgacttcataccacattgatctgatgcccccgactaatccacatatatatccaatatgatttcaaggcacaccaacaaagagcagcagccgcaccagtcccacattcacaccgacaactgccaatacattatcaaacacttcggtcgcgggtggtgcgtccgcaggcggaggagctggcggcggtggtggtgccggcggtggtgcggccagcggtggcgcagccgcaggagggccagccggcggtggtgccggagcaggatcggcggctggagcggccggcggcgttggaagcggtgtaaccagcggcggggggatgagcagcagcagcgccagcagcagcggcatcagcggaagtgtgagcaccggcctggaaactctcaccgatcgacaatacatcgttatcgcaagcgagaagcaaacaaaagtcttcgatgtcgccaaccagtgctgcatcaaccgcatacaattatcggaaatggattttgcagtcaaggcagaaactatcacgatgaaaggtgactttcactttgttttattttcattttattagtggagcaagaaagtcataatttgttgtaattagtgcaattgattgtaattaatacatatatcaacgttcccttcattccagatggctcttgcttagcaacctatctttcgaatggccatctaatggtacatagtcttcctagtctaaaactgttattggatactgatttcttaccacttatggaactaaggtgagccgtacacttataaggtactcttagcatttttacaactaatggttctatcgtctatttagttttcaaacaaaatgtaaacagggaattgtggatccaatgctttcgatatggggtcaacagatcattgttcatgaagatacaactcagtaagtcctaagctaaaatatatatttttatttccaacttttactaatcttgttccattatccacagaatatcaaaaatattttgctttagtcataaaggtcatggattgtacatggcatcgcccaccgaaattcaaaaattcacgatatcatcggaattttggtaaaccaaaacaaacataattcattgtactttaaacattgcatattaatttgtaattctttcccttattcaagtcaatttattttggagatgatgggtgaactatatacggtacacgaaatgcccgaacagccgaaggagggtttcttcaagggtctatttggtggtggcgccaaactcctggatcgcgaggagctatgtgagtagatctgcatcagatctgcatgtcgttaccatcgatcatttcaataatccgtacaattcctatccctatccttgcagttggcgagcagagcgggaaaccgaatcgatcggtggcacggcacatacccggccccaat

SEQ ID NO: 39845 - DNA, 336 bp, DROSOPHILA
atgtattgtcgatcggtgagagtttccaggccggtgctcacacttccgctgatgccgctgctgctggcgctgctgctgctcatccccccgccgctggttacaccgcttccaacgccgccggccgctccagccgccgatcctgctccggcaccaccgccggctggccctcctgcggctgcgccaccgctggccgcaccaccgccggcaccaccaccgccgccagctcctccgcctgcggacgcaccacccgcgaccgaagtgtttgataatgtattggcagttgtcggtgtgaatgtgggactggtgcggctgctgctctttgttggtgtgccttga

SEQ ID NO: 39846 - protein, 111 aa, DROSOPHILA
MYCRSVRVSRPVLTLPLMPLLLALLLLIPPPLVTPLPTPPAAPAADPAPAPPPAGPPAAAPPLAAPPPAPPPPPAPPPADAPPATEVFDNVLAVVGVNVGLVRLLLFVGVP

SEQ ID NO: 39847 - DNA, 2949 bp, DROSOPHILA
aagaactcttttcctgcaaaagtgcttcaattatatggcatgctccgaggaaagccatgtgagtaagcatatatatgtttgaaatatatattttttgatccttccctttctttgcccaacagatccaccaggtatgcgtccatgtcctgggtctcttggatatccagagttcgagcacaatgctcaacctgatcctcggctgccgcgtggccagtccgctgtgcacaatggccagcgttgtggctaactgtctgctctgggccatgttggatcatatgtcggacttgggcctggacttgcaccgattgcgtccggctaacacactgctgctcgtcgttgccgtggtgaagccgcatatttatgtaatatcctatttgcattccctgcacctggtggtccgtttgatatccagcatcctgctgatcggaccattcaatgcccagggccagcaactgtgccaggagaccgatgtgccggaggattatatgaaactggccagggacgattgttcgatattagttcgctggctaatcgcgatcgttgatgagctgcgtccgctgatggtggagaacaacgatttggggcatctgcatgagcgcctggtgcttttggagtccatatgtgagcttatgcagctcttgcatggccatttggttaagtgttaccaaggcaaaagtggaccacaatgtaagtaatagcgaacggaaacaaagaaatctgttataaattcagatactttgatgagaagagaattgaaatcttcaataacttaacctaacctttgaaacttatttcaagaaacaatcgcatcgtatatatatgcaatcaacgattttattatacacaataaaaaggctctagctttaactataaagttacgaggaaaactctagattttgcaattttaatgatgctacttctaaaaatgcaagcacttagtgatttgaatatttcgtgtaagcgtaaaaagctctggtaatagtcctcctgaactatgtaactattcatccaaaacggaatccagccattcctccacaccgtttttgcttgctgccgatgagggtgtggccggctgcaccataggcattggcatcgtaatggttccagagcctatatccagttgcgtatcggtcatggccaatagctcgtcaagttcatcaggttcagctgctgaggcagcaattggtttttccgccgctgcaggggcaacgtccttattggacttagcagagggagctcgcgacttggcgcccccattggcgtccttcagaatgcactgctggtaaactgcctcagcccgttcggcggccttctcttgggcggcaatctgagcgcgggtgaacaaagacgccggataatccatacgcttgtataacggaatcgtttgcagacccacatttaggcgggtgaggttcagggtgaagtaagcactggcagccttggtgtgtagcttggtctggccctcggccacgttggcccattcgcgctctgacccaaaggtgaagtggccgccaccgaggctgggaaactgggccagctgctggaaatcgccagctcgtaactgggcacgggcattctcatcgatgggtgcaccatccaggcccaattgctccacatcgtcggtgtcgctgggcagggtgtccagcatgtccctgttccgttgcggtgccaacgatgagcggcctgctccactggactgccaattgccacgcctggccaaccttggctcatcgctcgagtccgccacatcaaccatgctgcgacgggaggtgggtggtggcgatcccgacgatgtggtggagcgcccttgatcctttttatggtgatgattgtactgcttcatgttcctgcgctttctgtaaaggatgggttgttattattaggtgctaactgcgaggtgagtggttacgttgcacgtactccttggatcgatcgtccttgccggacattttgatgggggttgtgtggtttccggggtgttatttatctggtaattccgattcaaaatcggtttgtttattccttcgttcagcgacgcgagtgtgagcgggatggataatgcggcaaacagctgttcccttaactgagcgcagggtggccaggctatattgttgcaacataaaaaagtaacggaaaacgaaaaatataaatatacatattaacaacataccatatgaacattttagtttattacataaataaaatgattgttcaattacataaaaatacatatttaactataaaatctaatatttgtaataaatatttaaaaatatatatataaaactcaaggctacgtggcagccctgtgggaatcgaacagctgatgtcgataactttagacgataagctgccaaaggaaattgaaaattttcacaattttttggctaacgaagcaccggtgatgttggacttcctgacggagctgcgaagcagtggttctagggcggatcagctgcccggcaacatatacaccgagttcttcgcgaacgttatcgaggagcccagggaacatggatgcaagtcagcggatcaggattttacacaaggattctccatgctacgcactttcgataccgaaaatagcaatcaattggagccgccggcggccacggatgcggatgtctggatctttggctatgggtcgttggtatggaagacggacttcccgtacatagaccgacgacgcggcttcgtttggggattcaagcgtcgcttctaccagcacagcatcgatcaccggggtattcccgaacgtcctggtcgcgtggtcaccctgctgccaggcgatcccgcccaggatcgtgtctatggcgtcgcctatcgcatagctgctagtcaaaagggtgctgtgttggaccatctggattaccgggagaagaacgggtatgagcgctgcagcttggagttccacgagtatccgactgacggtgcagaacccatccaagt

SEQ ID NO: 39848 - DNA, 885 bp, DROSOPHILA
atgtccggcaaggacgatcgatccaaggaaaagcgcaggaacatgaagcagtacaatcatcaccataaaaaggatcaagggcgctccaccacatcgtcgggatcgccaccacccacctcccgtcgcagcatggttgatgtggcggactcgagcgatgagccaaggttggccaggcgtggcaattggcagtccagtggagcaggccgctcatcgttggcaccgcaacggaacagggacatgctggacaccctgcccagcgacaccgacgatgtggagcaattgggcctggatggtgcacccatcgatgagaatgcccgtgcccagttacgagctggcgatttccagcagctggcccagtttcccagcctcggtggcggccacttcacctttgggtcagagcgcgaatgggccaacgtggccgagggccagaccaagctacacaccaaggctgccagtgcttacttcaccctgaacctcacccgcctaaatgtgggtctgcaaacgattccgttatacaagcgtatggattatccggcgtctttgttcacccgcgctcagattgccgcccaagagaaggccgccgaacgggctgaggcagtttaccagcagtgcattctgaaggacgccaatgggggcgccaagtcgcgagctccctctgctaagtccaataaggacgttgcccctgcagcggcggaaaaaccaattgctgcctcagcagctgaacctgatgaacttgacgagctattggccatgaccgatacgcaactggatataggctctggaaccattacgatgccaatgcctatggtgcagccggccacaccctcatcggcagcaagcaaaaacggtgtggaggaatggctggattccgttttggatgaatag

SEQ ID NO: 39849 - protein, 294 aa, DROSOPHILA
MSGKDDRSKEKRRNMKQYNHHHKKDQGRSTTSSGSPPPTSRRSMVDVADSSDEPRLARRGNWQSSGAGRSSLAPQRNRDMLDTLPSDTDDVEQLGLDGAPIDENARAQLRAGDFQQLAQFPSLGGGHFTFGSEREWANVAEGQTKLHTKAASAYFTLNLTRLNVGLQTIPLYKRMDYPASLFTRAQIAAQEKAAERAEAVYQQCILKDANGGAKSRAPSAKSNKDVAPAAAEKPIAASAAEPDELDELLAMTDTQLDIGSGTITMPMPMVQPATPSSAASKNGVEEWLDSVLDE

SEQ ID NO: 39850 - DNA, 3017 bp, DROSOPHILA
agttgttaatcttttcatgccgacgcataattaaaatgtgaatatggaaatttcaataggaatctgtgcaaaaaatgccccaaaaaaataaagggggcgataaaaaagcagaagagcagaaagaaaagaccaagcaaaggacgcacaaacacacacacacacacagaaacttaacggtttcctgctgttatggccatcttgcttgcacctcttgcgctttttaccgccagttcgtttgcgtgcgtgtgtgtgtgtgtgaaagcaagtaattgcgaaatatgaaatatgaatgcataatgagcagatattcgccaagtgtgcaagaaacttgaagcggcgatgggcgtggcaggtggaaaagtgggagtcggaaacggaggccaggtgacttttatgctaaaatgcgcacatcgcgcgtgcatttgcattttgccagccttttcgaaagcagtgcaaggacaagcacaaatacacacaaacaaaggcgggcacacacacaggcaggaaaaatcataactacagtaagcgtccgatagcagcgactcctctaagtccttcaattttatgcgattcaactagaagttcaacacaaaagtgtattttgtctaaaaatgaacataactatataattataatattttaatatattattacaaaaaattaattttaaatcatggaagatgtacataggttcaaggttcatgaattcaaatcaaaagcttcatagttaattcctagacttttcaattaaaagtacccacttgctgatttcactgtactcggcttggccaagatggcagccaagtgtgtttgaaaaacatgtcaaaatgttgtggagctcattaaaatagcgttggctatttgcacacatcatatctttcagtcactaatttgtagaaggaggaggagaaggtgaagcagcagcaaatccttgaaggcgccttttccctgttcaaaagtaatgcataactccctttttccagctttttcctcagataaaatggcagaatacaacatgagccacatggtgcgaccccagggattcagtttggaagagctgcgtcagactatgagtcgatcggcgattcgggaacaatgctactttatttatgccaccggcaatattctggaggtgatccatattcatatcataatcacattatctaatttattcacatgttccgttagattatatctggttttgatgaactgctcaaccaggaggggatccaattcggagcagataaactggctgcggtgtatgtatgcggtttgatggtttatctactccatcatgaggacacgtcggccacccaggtgaaaagaactcttttcctgcaaaagtgcttcaattatatggcatgctccgaggaaagccatgtgagtaagcatatatatgtttgaaatatatattttttgatccttccctttctttgcccaacagatccaccaggtatgcgtccatgtcctgggtctcttggatatccagagttcgagcacaatgctcaacctgatcctcggctgccgcgtggccagtccgctgtgcacaatggccagcgttgtggctaactgtctgctctgggccatgttggatcatatgtcggacttgggcctggacttgcaccgattgcgtccggctaacacactgctgctcgtcgttgccgtggtgaagccgcatatttatgtaatatcctatttgcattccctgcacctggtggtccgtttgatatccagcatcctgctgatcggaccattcaatgcccagggccagcaactgtgccaggagaccgatgtgccggaggattatatgaaactggccagggacgattgttcgatattagttcgctggctaatcgcgatcgttgatgagctgcgtccgctgatggtggagaacaacgatttggggcatctgcatgagcgcctggtgcttttggagtccatatgtgagcttatgcagctcttgcatggccatttggttaagtgttaccaaggcaaaagtggaccacaatgtaagtaatagcgaacggaaacaaagaaatctgttataaattcagatactttgatgagaagagaattgaaatcttcaataacttaacctaacctttgaaacttatttcaagaaacaatcgcatcgtatatatatgcaatcaacgattttattatacacaataaaaaggctctagctttaactataaagttacgaggaaaactctagattttgcaattttaatgatgctacttctaaaaatgcaagcacttagtgatttgaatatttcgtgtaagcgtaaaaagctctggtaatagtcctcctgaactatgtaactattcatccaaaacggaatccagccattcctccacaccgtttttgcttgctgccgatgagggtgtggccggctgcaccataggcattggcatcgtaatggttccagagcctatatccagttgcgtatcggtcatggccaatagctcgtcaagttcatcaggttcagctgctgaggcagcaattggtttttccgccgctgcaggggcaacgtccttattggacttagcagagggagctcgcgacttggcgcccccattggcgtccttcagaatgcactgctggtaaactgcctcagcccgttcggcggccttctcttgggcggcaatctgagcgcgggtgaacaaagacgccggataatccatacgcttgtataacggaatcgtttgcagacccacatttaggcgggtgaggttcagggtgaagtaagcactggcagccttggtgtgtagcttggtctggccctcggccacgttggcccattcgcgctctgacccaaaggtgaagtggccgccaccgaggctgggaaactgggccagctgctggaaatcgccagctcgtaactgggcacgggcattctcatcgatgggtgcaccatccaggcccaattgctccacatcgtcggtgtcgctgggcagggtgtccagcatgtccctgttccgttgcggtgccaacgatgagcggcctgctccactgg

SEQ ID NO: 39851 - DNA, 897 bp, DROSOPHILA
atggcagaatacaacatgagccacatggtgcgaccccagggattcagtttggaagagctgcgtcagactatgagtcgatcggcgattcgggaacaatgctactttatttatgccaccggcaatattctggagattatatctggttttgatgaactgctcaaccaggaggggatccaattcggagcagataaactggctgcggtgtatgtatgcggtttgatggtttatctactccatcatgaggacacgtcggccacccaggtgaaaagaactcttttcctgcaaaagtgcttcaattatatggcatgctccgaggaaagccatatccaccaggtatgcgtccatgtcctgggtctcttggatatccagagttcgagcacaatgctcaacctgatcctcggctgccgcgtggccagtccgctgtgcacaatggccagcgttgtggctaactgtctgctctgggccatgttggatcatatgtcggacttgggcctggacttgcaccgattgcgtccggctaacacactgctgctcgtcgttgccgtggtgaagccgcatatttatgtaatatcctatttgcattccctgcacctggtggtccgtttgatatccagcatcctgctgatcggaccattcaatgcccagggccagcaactgtgccaggagaccgatgtgccggaggattatatgaaactggccagggacgattgttcgatattagttcgctggctaatcgcgatcgttgatgagctgcgtccgctgatggtggagaacaacgatttggggcatctgcatgagcgcctggtgcttttggagtccatatgtgagcttatgcagctcttgcatggccatttggttaagtgttaccaaggcaaaagtggaccacaatgtaagtaa

SEQ ID NO: 39852 - protein, 298 aa, DROSOPHILA
MAEYNMSHMVRPQGFSLEELRQTMSRSAIREQCYFIYATGNILEIISGFDELLNQEGIQFGADKLAAVYVCGLMVYLLHHEDTSATQVKRTLFLQKCFNYMACSEESHIHQVCVHVLGLLDIQSSSTMLNLILGCRVASPLCTMASVVANCLLWAMLDHMSDLGLDLHRLRPANTLLLVVAVVKPHIYVISYLHSLHLVVRLISSILLIGPFNAQGQQLCQETDVPEDYMKLARDDCSILVRWLIAIVDELRPLMVENNDLGHLHERLVLLESICELMQLLHGHLVKCYQGKSGPQCK

SEQ ID NO: 39853 - DNA, 4409 bp, DROSOPHILA
ttggattcgagattgagttttaggccagagtttggacttaaagttgaggtggaaattggtgtatggaagtggcatttaatacttctctaaagttatatcataaaatatatgtaaaatcgcaccaggacatcagacgcagaaatcccgtgtaagtgtgcctaaaagcatgcagctatatatttcttagattggcaagtttaagaaattcactgcatacttttagacatcattaataacaattttagatggttcgttgacatattcaaaaatgttaatgtattgcacaaataaaatatcaaaactgcggctcatgattttatttttcagcaataatttaggtaattgacttaaaagtgtccacctgctgactgctttcgttttcacttttttttttgtttttttttcagccgtagccttattaagcagtgactttaattacgtttaaatattcattaagcctggcccggggtcctggccatttgcagcattccgcttcgtagccgccaggttcaatttcaatttaactttgttatcggctgtggcaccccggggccagagtgttttcggctgccaaatcaaattcgacgcccaattaaaattcaatttgctgcgcgccattaattagattctctccaccccccacccccccccctctatctggaccaatcaggcaattatggatttcgggactgcaggaggagactgaactttcttctaatagcaacgaaagccacctgagactttgtataccgcccccacaccattatgaagctattagacacccgaaccacagttatctttatgcaagccacattgaacagtctcgccgccacctgcagcgagcggcggccccattaattagtgtggccgacgctgctattgaagctgattttcccttggacactgcaattaggtgtaatatatgcgcataaattgatgcggcatgtgcaacatgtggtgctcgattggtatttaagtttaaccatatcatgcttaaatactaattaaacgaatattcatgttgggcttcatgactcacctgcttctgcaacgtgttggacagctcctccaggcactccttgcgctcgaatcgctcgaacttgaagctattggagcggtacagttcgttgtcctcccgccgacgattgcggcacagccttcgggtgattatgttgccaccactgccactcaaacggggactgcaaatgaaattatggttagaaatttagtcagtttgagctataggtatgctgaaatacaaaaaaaaatatattatattcatcttctacaacttagtttaagcctcttaaattcttgttatataaatgctgatggactattgctcaattgggtccctgctcgggcgccatcaacttgatttctctgctgacgggcgctctccacaaccctccatactcattaaccatcaaaaaaaaaaaaagaggaaggatatgcaaaaaaaaaaaaaaaaaaatgaaaaacgaataatactttgccatggtgggcgggggtcacattcgagctcgttagctggcgcttcattaaaatttcacacattcggcggtaaagaaaactgtgctccatttaccttattatgtatgcgcgatgtctgatgttgttggcttaaagcctcaaaaagttaagctcgacgcccaatggaacggcgacccactttgcatttgggttcgttcaacgcccgcggccacttcaacggctcaaaaatactgcaaactgaaaactgaactcggagttgcaaccgaaaactccaacgccccaacttaaccaaaaccacaacaacaaacaaatgaaaaactctgagagggcggttgaaaatggggtaaaaaggtttaagaaaaaaaggaaaagaccgagcgaacaggggacataaatacaaaaaaaaaaaaaaaaaaaaaaaaatagtaggcaacccggtaaaaactatgcggcaaacaaaagcacaagccactggagcagactcaagtggcagccacttgggcactccaacgcactggagctccagttgcaactccagttgcgcgctgcactcagagaaatcaaggattaaagatttcgtaagctatagtacaataaataaagacaaataatatatccttcaagaaataattgactttaaaaatatcttctaagtgttttatatgacattataaactatcttctttttgtgtggcttttctttttcaagcgtaaattgcttctgaactatttagttattttttaaagtgtagaagtgctactcacccgcagggcttgcagtgcgtcatgtgcagatcccagttgagatggaagttgaacatgcgcaacttggccaccgcccgctgtctcagtgaaatgtccggctgtcctccagttccggatccagtcgctccacctccagcacctccggctcctcctcctcctcctcctcctaagcccgcagtgtttgcgtgcccggttccagatcccacagatggtgctagtgccgtgccgcgctggggattcggatacatcatcactgtgccgctgggcgccgaagtggcgaaaagacgacgggatgagccaccgccaacgccgacagaaacgcccccgccatgatggtgactgggacgatagtgctggtgctctttcagtgtataaaagccgcccgaggaactgcaatggaaagcgagtcaaggcctcgttagagtctccgccaggaacattgaatggcattgtcttgcgagaaaattgaaaataaagaaaaccgagaaccaccatgaaaaggggtgctcgagaaatctctagagttttcaattcgcttcaagtggtgcccaaaaggcatattgtcttgcggcattgattcatcgaacttccggatttccggatgtgcacatcgtgacatacttttggacaccttagcggcgaggtgcaaaaaataataatatttaacgcgattttttgaaattcctaatgatttgaagggaatttaaacttacgacatattgtcgccaccaggatcgccgacgcaactggtgacacccattccaccgccacgtcgtgggcgacttttccgacggcgtcgcctgcggcgttccgaggaagcggtacgtgtttgcaggacatgttggctaagggatttgttacaaccgccacctccaccgctgctggccagtcgtcgtccggtggcattgctgccaccactggcagtgatggaagcaccaatgcctccgctggctaatccctggacagcgaccaccagctggccatcgccgaaaccgccagccgaactaatcgtgtcggtggattgaggcgtggctgcagtggctcctgtggctgggccaccgatgattccatcgccacctgctgcttgctgtgcttgcgacttgctggtgttgcgcaaactgtggtttacttttcgccacatgcgctccatcttgaaaaatccgcttgattccttgcggcgattcgataatgttttcttgatgaggggtatattgttgaaagtgattgttgcatacgagtatatttgttagcttattacagtttccattactcttttcgctttaccccaataaatagtttttttttatatatttatttaatttttggttaattaaagatatatgagaattttttcagttaatgccaaatgcgttccagctgcttaatttcctttgttggttcattgttgagtattggtgtgcgtccttgttgtgatttgtggttgaatatctcttgctgctcaatacagattccgttagtattttggtatttttaaatactttaattgttgtaaatatgtgatttaatgtgaaatgattagcaaatattttggttttttaccagtttgtttagtaatgctttaaatgtatggaagccgtagatctaagatactttcatttgcataatccacaacatttatttaaatgtaagccttttcgataataagaagtgtttttgctaaaacgttacgttagtttaaattttgtgcgagtttagtcggtgtttaccattactatgtattaatcctaaagatttaaagtttttgatattggcaagcactttttttattattgattaatttatatagtttatttcaattaccacatgtttttgaagagttttagccattgctaggaagtttttggtatttattttcaaaacagctagttgttaaccttttcgttgttaaagttctttctatttaatagttatgtttgatataagatattgatttcatttaaagttgttgtggaacaatttgaatttcctttattggtttttgtaaacttattttgttagttggtgtaaattatcgttgttgaatcttcttggcagttgttgatagtcgttcattcccctgttgatgtagatagttgtttttacctatgggttgatttcatgtggagttcttcttagttgttgttttattt

SEQ ID NO: 39854 - DNA, 1026 bp, DROSOPHILA
atggagcgcatgtggcgaaaagtaaaccacagtttgcgcaacaccagcaagtcgcaagcacagcaagcagcaggtggcgatggaatcatcggtggcccagccacaggagccactgcagccacgcctcaatccaccgacacgattagttcggctggcggtttcggcgatggccagctggtggtcgctgtccagggattagccagcggaggcattggtgcttccatcactgccagtggtggcagcaatgccaccggacgacgactggccagcagcggtggaggtggcggttgtaacaaatcccttagccaacatgtcctgcaaacacgtaccgcttcctcggaacgccgcaggcgacgccgtcggaaaagtcgcccacgacgtggcggtggaatgggtgtcaccagttgcgtcggcgatcctggtggcgacaatatgtcttcctcgggcggcttttatacactgaaagagcaccagcactatcgtcccagtcaccatcatggcgggggcgtttctgtcggcgttggcggtggctcatcccgtcgtcttttcgccacttcggcgcccagcggcacagtgatgatgtatccgaatccccagcgcggcacggcactagcaccatctgtgggatctggaaccgggcacgcaaacactgcgggcttaggaggaggaggaggaggaggagccggaggtgctggaggtggagcgactggatccggaactggaggacagccggacatttcactgagacagcgggcggtggccaagttgcgcatgttcaacttccatctcaactgggatctgcacatgacgcactgcaagccctgcggtccccgtttgagtggcagtggtggcaacataatcacccgaaggctgtgccgcaatcgtcggcgggaggacaacgaactgtaccgctccaatagcttcaagttcgagcgattcgagcgcaaggagtgcctggaggagctgtccaacacgttgcagaagcaggtgagtcatgaagcccaacatgaatattcgtttaattag

SEQ ID NO: 39855 - protein, 341 aa, DROSOPHILA
MERMWRKVNHSLRNTSKSQAQQAAGGDGIIGGPATGATAATPQSTDTISSAGGFGDGQLVVAVQGLASGGIGASITASGGSNATGRRLASSGGGGGCNKSLSQHVLQTRTASSERRRRRRRKSRPRRGGGMGVTSCVGDPGGDNMSSSGGFYTLKEHQHYRPSHHHGGGVSVGVGGGSSRRLFATSAPSGTVMMYPNPQRGTALAPSVGSGTGHANTAGLGGGGGGGAGGAGGGATGSGTGGQPDISLRQRAVAKLRMFNFHLNWDLHMTHCKPCGPRLSGSGGNIITRRLCRNRRREDNELYRSNSFKFERFERKECLEELSNTLQKQVSHEAQHEYSFN

SEQ ID NO: 39856 - DNA, 4100 bp, DROSOPHILA
aagtttttggtaaaaacccgtttctttcaaatttcggtcaataaataatccgtttttttgccacaacttttaaaataatggccccaatatggaatgtcatacctcgttgagctcgttatttaattccaaatcgaactgtgtccaaaaattggaattctattttttcgccattttttgcaaattttgatgatgcaaaatttacaaaaaatgcaaaaattgtcaaaaaaataaattttcctaaatccttcaaaaagtgatagggatcgttagcattggtaattagctgctcaaaacagttattctttcgtctatatgacattttatagagaagttatgacgaaaattccgtatgtaaaatcacgtttttcgcaatacccgtttttttagaatttccgtcaataaataatccgtttttttgccacaaatttaaaaataattgcctgaatattgaatgtcatacctcaatgagctcgtaattaaatttcccatcaaactgtgtcaaaaaaaaggaattctatttttttgctatttttttcaaattttgatgatgttaccccttacaaaaaatgagaaaattgactcaaaaataaattttcctaaatccctcaaaaagtgattggggtcgttagcaatggtaattagctgtccaaaactgtttacattacatcttaatgattattattagcaaaattatgattaaaattcccatcgaaaaatgtatgaaattttgccaataccgtttttccgatttttgaaattaatattatcggtttttttttaaataggtgtctgaatatatacctctttgagctcgttcttaaataatctatccaaaatattccacatcaaatgtacatacatatgcttctcacgttttttactcatacataaaaaaaaatacgtctttcataatataattaattactaataattatacaaatattatagtttatataaaaaaaaattatttgtcatcatattattgtactcattgaagggcttaaaactcagcctggtagtatgcagatgatggtgaggctgtttctgaactatttcccaggagcagctcgatccgtttcctggcctccacaaaggcggccattacttcgtccagagtggtggccctcgaagtatccggatttgaactggatctgacatcgtcatcattgctatcgccatcgtcgctactatcgttgccgagttccagatggaagtggtgatggaactgatcagatgtgtctatttggcgctgctgaagcttttgaagccggagcgaaagtgttcccgtggtggtcattggcctgtcagagttgaagttcaaacgggaatgcatttccgattgccgatgtacatcgaagaaggactcaaagtcgaacagctgacgaccgcctatgaaataccgattgagggcatccagccagttgcccagtggtcggatgcactgcagccgtatggagtccgttggcagggcggatgttaacggtatcgcatagtgagcatatccctcacatcgctcccgctgccagctatctatgctgatcacttcaaaatatagatgcagtagatcagccggatgatgttgttcctccagcagcagggtcacctgccagcagtgacccaaatgggcactcctccagtcgccggcattcctgcacgtggccgtcgctccctgcatggtatccaccccaggtgtaccctcataaaaggtatttgctggtgctttcagatagtatcttacatgtatgttggggttctcaaagttctggccttcctgtagttccagcagcaggctgacccgcttcatcctcttgggcggcatttcgaactggaggagacttctcctctcgctggctgcttctcgccgtctgcgataaaactcgagtatctcctcggcggaggcttcttcgggcagatcttcttcgatgggtaaaccatcgcccagttcctgctcatcctcgccatccgcctcctcagagaaaccatcatcgtcgtaggcctctagcggtgtgacattctcaaagccaaaggcatacaactgtcggcaatcgttattccgctcgatctgaatcacataatccagatcctgggcactgctactgaaatccggatagacatagagcagaccctgttcgggatcatatcgtatactaaccaacagtgtgtcctgctgcagatcggcatagatgtacattagctgatagccctttttatggaattcacttgcttcggcgggcataagactctcggaatcattatccaataaggtgtgtatgaggcacgttctggcggcaaaattggggtcatccagtattgaaacctccgacatattcgccgaggacagactggtaatagtcgggtgagctgcggcagagcagcctctctgcttcgccttgggctttcgtatccggcgacgaattgtaataggctcaggatcctccaccgtctctgcatcttccagattctccagtttccttagatatcgctgttgtagcttcaaggtttccaaggcccacctgtgatagcgccgctgtagtttcgaagcgcaacttccaggattgtttatatattgctccagttccgcttgactaaagtgcttttgctgccaggatatgcgtattgtggctatagcaccattgcagagttccttattccgtttatagaagagatcaccagcgggaggacgactattatcactgagaatgctccacgaccgattactttgggactccagatccgttatttctccctcgttcttatccttttccatttccccctcatgctgagatattggactccttcgtctcctgccggtgtaaccaattcccacattataataactgcagttgtagcccaagccagtcttccctccacacgaatcatcgccctgggggacatgaatatagcaatcctgccagatatcttcctccgatccgggatagtggtcaccatatgcgttcgtcgattgcgctcccgcgtattcaaatttggggaccggcagccattcactgatgtgtcgcagcttcagttccaattgcagatctcctatgtttccgctcacgcgataaactccagtgcgctttatgtctctgcttttttgcatgattcgccgatgattattttgcccagtaaatttttagtttctttattcaaacctcaaagaatgtaaatgactggccttctttgtttgttttccattttgttatgttttgtttatggtttttgaattaccgttgcccaggtaaccaatcgattatataccgaaaaccaactattgttgccgtgacaaccatgaaggccgataactgtctttgaaatatgatagctagaaaatagccgaaattatattagctgctcaataagatttttataaatttaaattgtacaaactgtaatttattcatttattttattatagccacaaatacaatgtcaattagattggaaataataaacatacattacacagctagcactgaacatttttaagttgtatattttttatttaataacttacaaataataattaatgctttgtttccaaacgaaataattcagaatggtgaatggattcaaatccaatttcaagcgagatagctaaatctagctagatagctgcactgtcgccagccctggaacataccaactccgcttcggtatattcgataggcttatcgattgctcgcgaagctttgccgctgtgtttgtgttatcgtcggccgctttatgcactccacattcctcgtttcattttggccgccagttgtgttttcgattgctctgcgtgctggtcgttcctccaagtctgcaattctgcacaattttacaattattcttcgcgcgtactccaactccccattcatccgtctgtttgtttggttgtttcctttcttcgttgcaccttttgcgcgcgcgcaaccgccgataaacagagaaaagaagaaaaggagaaattctgcaacaaacactggaagtgcaattttaagtagacgatcccgtgaatgttttccagttgaaacatttactatcgtttcattttttttttaaattttgttctgttaagtgttgaaaaaaaagtttttgcagccacagcaaactaaaac

SEQ ID NO: 39857 - DNA, 2100 bp, DROSOPHILA
atgcaaaaaagcagagacataaagcgcactggagtttatcgcgtgagcggaaacataggagatctgcaattggaactgaagctgcgacacatcagtgaatggctgccggtccccaaatttgaatacgcgggagcgcaatcgacgaacgcatatggtgaccactatcccggatcggaggaagatatctggcaggattgctatattcatgtcccccagggcgatgattcgtgtggagggaagactggcttgggctacaactgcagttattataatgtgggaattggttacaccggcaggagacgaaggagtccaatatctcagcatgagggggaaatggaaaaggataagaacgagggagaaataacggatctggagtcccaaagtaatcggtcgtggagcattctcagtgataatagtcgtcctcccgctggtgatctcttctataaacggaataaggaactctgcaatggtgctatagccacaatacgcatatcctggcagcaaaagcactttagtcaagcggaactggagcaatatataaacaatcctggaagttgcgcttcgaaactacagcggcgctatcacaggtgggccttggaaaccttgaagctacaacagcgatatctaaggaaactggagaatctggaagatgcagagacggtggaggatcctgagcctattacaattcgtcgccggatacgaaagcccaaggcgaagcagagaggctgctctgccgcagctcacccgactattaccagtctgtcctcggcgaatatgtcggaggtttcaatactggatgaccccaattttgccgccagaacgtgcctcatacacaccttattggataatgattccgagagtcttatgcccgccgaagcaagtgaattccataaaaagggctatcagctaatgtacatctatgccgatctgcagcaggacacactgttggttagtatacgatatgatcccgaacagggtctgctctatgtctatccggatttcagtagcagtgcccaggatctggattatgtgattcagatcgagcggaataacgattgccgacagttgtatgcctttggctttgagaatgtcacaccgctagaggcctacgacgatgatggtttctctgaggaggcggatggcgaggatgagcaggaactgggcgatggtttacccatcgaagaagatctgcccgaagaagcctccgccgaggagatactcgagttttatcgcagacggcgagaagcagccagcgagaggagaagtctcctccagttcgaaatgccgcccaagaggatgaagcgggtcagcctgctgctggaactacaggaaggccagaactttgagaaccccaacatacatgtaagatactatctgaaagcaccagcaaataccttttatgagggtacacctggggtggataccatgcagggagcgacggccacgtgcaggaatgccggcgactggaggagtgcccatttgggtcactgctggcaggtgaccctgctgctggaggaacaacatcatccggctgatctactgcatctatattttgaagtgatcagcatagatagctggcagcgggagcgatgtgagggatatgctcactatgcgataccgttaacatccgccctgccaacggactccatacggctgcagtgcatccgaccactgggcaactggctggatgccctcaatcggtatttcataggcggtcgtcagctgttcgactttgagtccttcttcgatgtacatcggcaatcggaaatgcattcccgtttgaacttcaactctgacaggccaatgaccaccacgggaacactttcgctccggcttcaaaagcttcagcagcgccaaatagacacatctgatcagttccatcaccacttccatctggaactcggcaacgatagtagcgacgatggcgatagcaatgatgacgatgtcagatccagttcaaatccggatacttcgagggccaccactctggacgaagtaatggccgcctttgtggaggccaggaaacggatcgagctgctcctgggaaatagttcagaaacagcctcaccatcatctgcatactaccaggctgagttttaa

SEQ ID NO: 39858 - protein, 699 aa, DROSOPHILA
MQKSRDIKRTGVYRVSGNIGDLQLELKLRHISEWLPVPKFEYAGAQSTNAYGDHYPGSEEDIWQDCYIHVPQGDDSCGGKTGLGYNCSYYNVGIGYTGRRRRSPISQHEGEMEKDKNEGEITDLESQSNRSWSILSDNSRPPAGDLFYKRNKELCNGAIATIRISWQQKHFSQAELEQYINNPGSCASKLQRRYHRWALETLKLQQRYLRKLENLEDAETVEDPEPITIRRRIRKPKAKQRGCSAAAHPTITSLSSANMSEVSILDDPNFAARTCLIHTLLDNDSESLMPAEASEFHKKGYQLMYIYADLQQDTLLVSIRYDPEQGLLYVYPDFSSSAQDLDYVIQIERNNDCRQLYAFGFENVTPLEAYDDDGFSEEADGEDEQELGDGLPIEEDLPEEASAEEILEFYRRRREAASERRSLLQFEMPPKRMKRVSLLLELQEGQNFENPNIHVRYYLKAPANTFYEGTPGVDTMQGATATCRNAGDWRSAHLGHCWQVTLLLEEQHHPADLLHLYFEVISIDSWQRERCEGYAHYAIPLTSALPTDSIRLQCIRPLGNWLDALNRYFIGGRQLFDFESFFDVHRQSEMHSRLNFNSDRPMTTTGTLSLRLQKLQQRQIDTSDQFHHHFHLELGNDSSDDGDSNDDDVRSSSNPDTSRATTLDEVMAAFVEARKRIELLLGNSSETASPSSAYYQAEF

SEQ ID NO: 39859 - DNA, 3135 bp, DROSOPHILA
gactgaatgcgaagtgatagcgaaattattgcaataattttcatacgctttaatttaccttataatgggttgcctcttttttttatctattttgttttatagttttggcaagttataaactatttaagtgcaaatgagctgacgtgtaataagttaaatggtttattctatcatatgtattgatcagcattttttatttcctttttttatttcttctatttatcatcaaaagaaaagctcttattatatatttatatatttttttgttaagcttagatttaagaaacgaggaaatattcaaagaacttgagatctttaggtaatttatagaaaagaagacttacatgggtattgcttaaaaaaaaaatatctaattttttcattttaaaaatatatatatagatatatagataaagacatatttgcgattggtttgtaactaccaatactattataagatagcccgccatatgaggatggtacttccccttatttaatgattgttcgttatttctgaaaatttcccatacgggtctgcattgggaaagtgttaatccgacctgaaccgatccgacctgaactcaactgaattgaactgacctagcccatccaacaggtgaccgacggagaggcggggtcaccatcattaagcggttcgttcatgcccggcggattaatttcggcggctggtcccaattatggaactgctatgtttcccattttttttttttatccaccggactcatttgcatttgccagccgtcgatgcgtttgttgttggaccaactcgaatccagatggacggagatggctttcgggttggtggtcaaaagagtggtgggcagcaagatgacgaaagcaagttcacagacagacggagcatctcgcaatccggctgctatataaaccgcgaatcgctcggattggagcatcagttggcttcctcatctgctacgtgaagttccatagttttcaacccccaagcaagaaacttccagcaatgaaggtgagtctgctcgacatagtgcacaaaacatcatcattaaaatcaaattgaaaatataaaaagttaaaaaattacgctaaaaaagaaagacacataatataaacacacagctataaaatatatatttttttattattttatataattaataattgcaacatcgaattatttacagatctttgtgtgtctcctggctaccttggctgccaccgcatcggctggcttcattggcggatccggcggtggtggcggtggtggccaccaggaggtgaagaccatccaggtgatccaccaggagggtggcggctactccggcggcggtggtcatggcggttactctggtggccatggaggctactctggcggcggccatcaggagattaagaccatcaaggtcattcagcaggaaggtggcggctattccggcggtcatggcggttactccggtggtcacggtggctactctggcggtggacaccaggaggtgaagaccgttaaggtcatccatgaggagggacatgccctgggcggcggcggttatgccggaggccttgccggccatggacacggacatggtggccatcaggaggtaaaattggtcaaggtcatccatgaggagggcggtcatggccacggacacggtggtggctactcccacggtggtggctactccggcggtcatcaggaggttaagactgtgaaggtcatccatcaggaggttggcggtcatggcggttactctggcggacatggtggctactctggcggcggtcaccaggaggtcaagaccgttaaggtcatccacgaggaaggacacgctttgggcggcggcggcggctatgccggtggctactccggccatggacatggacatggcggccacgaggaagtgaaggtggtcaaggtgatccatgaggagggcggtcacagccacgatcacggtcattcgcacggcggattcgaagaggtcaagaccatcaaggtcattcacgaggacggtggccatgcccacggccacggacccgcccccatcatcagcaacgaatacctgccgcccagcaatgagtatctgccccccgtatccgctccccagcccggatatctgcccccatcctccagctggaagtgattccatgccattcgattcgagtcatactgatccttgagtcttgttaagtaattttaggtccccttttttttctcatttcccatgttttttttattgttgttcccattttacctcaccctttaaacaaatataccatctgtaaattataaaccattcgaatattgtgtgatatatggggtgaacaacgatttggaaagtttgtttgcagcatatgagaatgtttaaagaaatagttggaaagttctgatagatggcgaattaacgtatcattgatcattttgcctgttttgtttgtttaaatttggtttaaaaaacccattctttatgcattctaattcccatgtattcacgattagttaggctgtgtgaattagcattttattcattttgatttgattccattcatgcggctcagtcactttcgattcgcgtttcaatttcactttcaactcgattcgatcgacccatattagcataatcacagtcatctaatttagcggtagctcaacgaccttttcatcggtgggcttatgttcattttagatatacgttgcatctaatggatatatttatgtatgtgtatcttaacgtttatttttatgtttcgaaatgtattttgtgtctggttgattatgttgtagcgtgttcttgtgtcttatggattattttgtgtatctgtgtcgtacattttgtatcttatggattattttgtgtatcggtgtcgtacattttatatcttatggattattttgaacgatgtggcttaattttaagctcgagttattttttttttagttttgtacatcgaagaaaagaagaacttgatataaatgtagaaagaaagtaaattgaaacgtttttttttcttttttcaattatcttataaacttttagaactagtattccatcatttggctttaatataatttgttttaaaatgttagcaaatattttaggatcattgattattttcaaaaaaattcaaatgaatatcattgag

SEQ ID NO: 39860 - DNA, 978 bp, DROSOPHILA
atgaaggtgagtctgctcgacataatctttgtgtgtctcctggctaccttggctgccaccgcatcggctggcttcattggcggatccggcggtggtggcggtggtggccaccaggaggtgaagaccatccaggtgatccaccaggagggtggcggctactccggcggcggtggtcatggcggttactctggtggccatggaggctactctggcggcggccatcaggagattaagaccatcaaggtcattcagcaggaaggtggcggctattccggcggtcatggcggttactccggtggtcacggtggctactctggcggtggacaccaggaggtgaagaccgttaaggtcatccatgaggagggacatgccctgggcggcggcggttatgccggaggccttgccggccatggacacggacatggtggccatcaggaggtaaaattggtcaaggtcatccatgaggagggcggtcatggccacggacacggtggtggctactcccacggtggtggctactccggcggtcatcaggaggttaagactgtgaaggtcatccatcaggaggttggcggtcatggcggttactctggcggacatggtggctactctggcggcggtcaccaggaggtcaagaccgttaaggtcatccacgaggaaggacacgctttgggcggcggcggcggctatgccggtggctactccggccatggacatggacatggcggccacgaggaagtgaaggtggtcaaggtgatccatgaggagggcggtcacagccacgatcacggtcattcgcacggcggattcgaagaggtcaagaccatcaaggtcattcacgaggacggtggccatgcccacggccacggacccgcccccatcatcagcaacgaatacctgccgcccagcaatgagtatctgccccccgtatccgctccccagcccggatatctgcccccatcctccagctggaagtga

SEQ ID NO: 39861 - protein, 325 aa, DROSOPHILA
MKVSLLDIIFVCLLATLAATASAGFIGGSGGGGGGGHQEVKTIQVIHQEGGGYSGGGGHGGYSGGHGGYSGGGHQEIKTIKVIQQEGGGYSGGHGGYSGGHGGYSGGGHQEVKTVKVIHEEGHALGGGGYAGGLAGHGHGHGGHQEVKLVKVIHEEGGHGHGHGGGYSHGGGYSGGHQEVKTVKVIHQEVGGHGGYSGGHGGYSGGGHQEVKTVKVIHEEGHALGGGGGYAGGYSGHGHGHGGHEEVKVVKVIHEEGGHSHDHGHSHGGFEEVKTIKVIHEDGGHAHGHGPAPIISNEYLPPSNEYLPPVSAPQPGYLPPSSSWK

SEQ ID NO: 39862 - DNA, 3146 bp, DROSOPHILA
gatacaaaataattactcattatttagccttagaaaattgggattttttttaattagttttctttttctactatttccggttcatctcgttttgctttattgcgtcattcatttcatctcatatatcgtatagtatatatgcgtatgtgtgtgtgtgtatttgtatatgtacgtgtgtgtgtgtgtatatttgttttaaggtttaacatttaatttactttcatctgcttcatcgtcatcatataaataaaaataaatacattattctttatgttaaattttttttttcgattttgtatccattatgcatgcaagcaaaacgtttttcgttatttttttgttcttttagtttttacttgttaaacgtccctacatccttttcattttttaaaaaagccgcactaaattttacaattacaaaaaaaaaaaaaataaattcacatatatgcatacaataatttttataatacacatatgcaggtcgagtcacattacagaaaaagggggaaaaaaataatatatatatatatataataatggtgaattgcaatatagcatcgcctgcagacaaacagatatatatatatcatatatatatataaatatatatatatataaacatatataagtgcggccttcaggtttacaattcaaatgttgaagtgttcatcgacttatgtttcgaagctggagcaaccgctgcagggtgttgcataaatgttggttctcactgtggctgctgttggtcagagagcttggttttcctaatgttcctctagttcattcttgtgttgtctgaatctcaatctctggtatcggttttggtctcctcttgcaaagcgaagcaaagcgatttatgcggcatgaaatatattaacagcttggctccatttcgtccaaaaaaacattaacatcaaaaaacagggctagcaggaaaatgaccgcccctccccccctaccccacaaatctgctcatcgcgtcccccgctatttgccccaattattgaaggacacagcagcccttcttcttgttcttcttctcgtcgatgaccacatgactagcggacgtcggtccgggaaccacctgtttggacacctgtcccagcgaggtgaccccattgtttccggttccgccgctcagctcggtcgccgtcgctgcttttccggcgccagcgtcggcagttgcagaggcatgggaatttgtaccattttgtgctgttgctagattctgcgagagctgcaaatgacatagaccctttagtcacatattttacattgggatagttaaccaatatccaatctcacatttgatttgattacactctcgccgatcgccgtaccgccgttgcaattgtcgtccgcatgctgggcgctcccgttgccaattgtacgctcctctgtgggtgtgatgggcttgccacctgaaagtaagggtattttattacacacagatcgaataactggggtctataagagaggaatgtaaatatatgtatgtatgtatgttgtacccccccccccccacgcacatcactataatttttgatcttgatcgacttgatcaagtagtacttacctctgatcatattgacaatttcatcagcctctctggacagatcgccgcctggtcgaaagggattgtcccagccggaatcggtgctgcaatggaggatattacccaagagacgataatatatttacgtaatattgtgcccataattatggccacccacctttgctgtcgatcgtatgccgctcccaggccaatcacctgctgctgttggatccccgccgccgtcgtggccatcgtattatagtctaagaggttgctgctgtagttgaactccggaaagtccagatactccgccggtggacagattacttgcggctggctgctgttgtagattgaaacgcgcactatcgaacgctccgatctggaaatgagcagagcaggcaacacaaatcgaattaggcattttctaatatatagaatgatgtatatctatatatgtgcagtggttgatgtgcagtgtgttttatatcgcgattacgagagggggcggtttgttggggggatgggaaccggcgagcactaaaatcacgcatcggcgcatgtgaccttaaaatagctgagcaagtgcgtcatctactgaggagccacctcaatgtcaattaaattaagtcatttggcaattggcttttagctaaatatctgattcaattgattgcaactaccagcgaaatacgattttctctctgtattttgaccaggttcatgtgataaatttcgaaatgtgaactacaatacattactactgaataatctgcttttccgcgtccaaaatggcacttttcatccaggagttatacagatttacggcggattcaagcaaatattcgttgccttacattttgttggcaacgaaaacgaagtctgacttctgccactaacacaaatatcagcaggtcactggatcaaagaagttaaatcaatactggggcaaagtgttccagattttgatttttttttggtcattgggggatcattggcactattattgttttgtggaagacatttttgaaacatttttagagcatccagaaatgcaatgcgtttgctttagtcttaaaatatttatattatatttagcttaatcagctgcactggcgaaaaaaatggatcgactgcattttatgagtaatgacaacttttttatgcccaatagaaaaccagcaatttgagaaatcagttcagaaataaattaggttttatagcacagttttgctggatgggcaacttattttttttttatctttataactggtttatgtcgatgacttcatttatggctggttggttgtacgaaaagcccgagacttacagagccgaaacgcactgtacgatcaaagaactggaatggcagatctaacttgtaagatctcaatctccgccatccatccaatggcccttgggacattcatttcctacatcttcccagcattcggttttattgtcccagaactttgaaccactaagtggaaaaaccattagagaaacctgtcgacaaaaaaaaaaaaaaaattcgagaaccagaagaagtagcaaaaaataaacagcctacaatcgaatcagacaacccgttcac

SEQ ID NO: 39863 - DNA, 681 bp, DROSOPHILA
atgacgcacttgctcagctattttaaggtcacatgcgccgatgcatcggagcgttcgatagtgcgcgtttcaatctacaacagcagccagccgcaagtaatctgtccaccggcggagtatctggactttccggagttcaactacagcagcaacctcttagactataatacgatggccacgacggcggcggggatccaacagcagcaggtgattggcctgggagcggcatacgatcgacagcaaagcaccgattccggctgggacaatccctttcgaccaggcggcgatctgtccagagaggctgatgaaattgtcaatatgatcagaggtggcaagcccatcacacccacagaggagcgtacaattggcaacgggagcgcccagcatgcggacgacaattgcaacggcggtacggcgatcggcgagagtgtaatcaaatcaaatctctcgcagaatctagcaacagcacaaaatggtacaaattcccatgcctctgcaactgccgacgctggcgccggaaaagcagcgacggcgaccgagctgagcggcggaaccggaaacaatggggtcacctcgctgggacaggtgtccaaacaggtggttcccggaccgacgtccgctagtcatgtggtcatcgacgagaagaagaacaagaagaagggctgctgtgtccttcaataa

SEQ ID NO: 39864 - protein, 226 aa, DROSOPHILA
MTHLLSYFKVTCADASERSIVRVSIYNSSQPQVICPPAEYLDFPEFNYSSNLLDYNTMATTAAGIQQQQVIGLGAAYDRQQSTDSGWDNPFRPGGDLSREADEIVNMIRGGKPITPTEERTIGNGSAQHADDNCNGGTAIGESVIKSNLSQNLATAQNGTNSHASATADAGAGKAATATELSGGTGNNGVTSLGQVSKQVVPGPTSASHVVIDEKKNKKKGCCVLQ

SEQ ID NO: 39865 - DNA, 3394 bp, DROSOPHILA
taattatcgattcaaaaattttttgtgtctcaagcttcctgtctttgggggaggttgtgggtaaaaaacggcggggatttgggggggtgggggtggggctttagttttggggttgggtgcgatgagcacaaagttcatcgcttgctatttgggttgatggcgatgtacatacgtatggtgttggtgttgttggtacaacccagctgcactttttgcccaaaggctttaggaaaagagatcagctttggattggcccaaaaaccaaaaatgccgagtttactatgaatttcaaaagcgaaacaaaagtgaaagctgccaaaaagtcattagacggatattttaattaggtaaaagtaggcccactttcggggcatgcacaataaaagccctgcaatgagtgtcgaagatacaccacacatggttacactgacaaaaatatagacaaaaatgtctaggaggtggagcctttgttaattcaaataaacccaaaacatatatgcagaaccttgaattccacctagtcaattatatctctcatatattttgacatgtctagataccagagtttacttttactcgcgacgataaaccacacattattgcactgacaaaaattataaaaaaaaaactttaaaaaaaatctaaaaagtgcattacatcgagcattttagtatggaccttttacgtattcaaataaaatggttttgaggaaccttaaaaagatatcaaatttacacattgcttgatatcagagtttacttttagtcattttgtcggtgcgaataagagatttccttcaagtagggcaaatagtgaatcatagacaaccactaccttaattggccattgctatcgtatatttatttggtcatgagggcaggtttttataatacctatatataaagaactcgtctgaattttattaaatctagctccttatatggttaacggattcgttacttttgtgcttagtttagttacagtgtatcaagtttgttacttactcttcctgcacctcaatgccgctgtcatccatggtccccttggcatagtctccactgtagccaccggcgagaggctgttgcgacgccagcgtcgacgccagctgcggctgaccagcggcggcagcggcggtatctgcggcatcgaacccaaaagtggactccatgtgctccgacaacggcgtcggcgtctcgaagacgagcgtctccaccatcgaacccttcgaggacccaaaggagacgctgtggacacaaacagttagtatataataaaataatacctattaacaaattaacttagcaaaatatactcctatatcctttcattataaacgattaaaatataaaaaggatattatacaagatcagtctacttaaggcagtagactctagcggaaaaagtgtaagagatttcaaagtatgttttcaaaaaaaaaaaaacaaaaaaaattaagacaggaaactttcagaaatcacgaacttgttaactagtgttcatgttactgtcaaactaaatcaatttcatttcaggataaataatcgacaagtaatcccttgaatacctttcaagatatatagctgtgctttgttgcgaggcaaaatcgaaattataatcaatcggtcaggttgcttttaagtgataatcacgaaattaaagactttctaatacctattatagaattttcgaaaatataatgtaagttccttactctggagttaaaattatgggaaaactaagagactttaaagattgaattatagctaatgaagtaaggagaataagtacactaactaaactatcaccaagacagttgtatataatgtataaattgaatagcttgaataagagtaagtaattgttggagatttaccgtttgaggccgacgcttttggtgcccaatttgctcagtttgccgggtttcttttgggggcgtgggaatttatcgctcagatcgctggatatatcctcatcatcagctgctgttgttgcagttgttattgttgttgttaccggttcttctcctgtcgtcgttgctgttgttgctgctgctgtcgccgcattgttgttgttgctgctgctggcctcgttgtttttgcatttgctgctattcttattacttttattattagccatgtttttcgcactgaccacaagcgaaccattattgttgttgttcacattgttgttgttttgctgcgttgttgttgtgtgcaccagtggcagcgacgttggcggcgcagcagcagcgacgccggcagagaatgccgacgcaggcagcggcgcaacaacaatctcctcgcttagcaaaagcgttcgctcatcacagtcggcagcgccgccggcggcgacgtcaacgtcggcagagacgccagcagagccgttggacagcattgcggttgcagcaaaacgattcgatttcgatttcgcggctaacggtgcatttcgagggggcggcgtggtgggcggggccagggccagcataggtatatctttatatatatatatagctgcgccacacacacacacaaacacttagttaaatcgcaatttgtgtgtgcaaaataatgacaacccaaaaaaaaagccaaacaaaatcagcacttgcacaaaggcacacaaatatatatttctatattttttttagcacagttaacgcgcacctctgtaaacagtaataacaaaaaaaaaaacaagcagcaacagctaccgcaactgcgacgtcgacggaggcagcggctgcggcagaggcgtcggtgacctgcactttagttcccgaccagaaactcgcgtttataaataaatatatgcatgtgcatttaataaatccgttagcgcgcgctctgttgctcttgtcctgcgaattcggatctcggattttttcggatcggagcgatacagtcggaacaatcgtgtgtgtatatttggcagcgcttcgaatttctgttctgttctgttccgttttgttcgaacgcactggcgatgacacccggccgatagcgcgactgtccgataagcagcacgccaattgcgatatctagatagctgcctagatagtttttgtaaaggtaaaaatctaggaaaagtgccaaactataaagtatttaattcttaaatttccgaaaataaatagttaatgcattcagaatgaaaaatacttagtggtaataatataatgtagcatttagcttaaagtaaaattgtttcaatttgatatataaaaagttatgcttagatttagcacataaatgtttgcacaaaataataaaataaaaatgtttaaatttcgcatataattgcaagaactacatttttaatatcttgaacaacactgcttagcccatccgtcgactatcgatggcttatcgatatgcgcaaactagcagttcttcca

SEQ ID NO: 39866 - DNA, 765 bp, DROSOPHILA
atgctgtccaacggctctgctggcgtctctgccgacgttgacgtcgccgccggcggcgctgccgactgtgatgagcgaacgcttttgctaagcgaggagattgttgttgcgccgctgcctgcgtcggcattctctgccggcgtcgctgctgctgcgccgccaacgtcgctgccactggtgcacacaacaacaacgcagcaaaacaacaacaatgtgaacaacaacaataatggttcgcttgtggtcagtgcgaaaaacatggctaataataaaagtaataagaatagcagcaaatgcaaaaacaacgaggccagcagcagcaacaacaacaatgcggcgacagcagcagcaacaacagcaacgacgacaggagaagaaccggtaacaacaacaataacaactgcaacaacagcagctgatgatgaggatatatccagcgatctgagcgataaattcccacgcccccaaaagaaacccggcaaactgagcaaattgggcaccaaaagcgtcggcctcaaacgcgtctcctttgggtcctcgaagggttcgatggtggagacgctcgtcttcgagacgccgacgccgttgtcggagcacatggagtccacttttgggttcgatgccgcagataccgccgctgccgccgctggtcagccgcagctggcgtcgacgctggcgtcgcaacagcctctcgccggtggctacagtggagactatgccaaggggaccatggatgacagcggcattgaggtgcaggaagagtaa

SEQ ID NO: 39867 - protein, 254 aa, DROSOPHILA
MLSNGSAGVSADVDVAAGGAADCDERTLLLSEEIVVAPLPASAFSAGVAAAAPPTSLPLVHTTTTQQNNNNVNNNNNGSLVVSAKNMANNKSNKNSSKCKNNEASSSNNNNAATAAATTATTTGEEPVTTTITTATTAADDEDISSDLSDKFPRPQKKPGKLSKLGTKSVGLKRVSFGSSKGSMVETLVFETPTPLSEHMESTFGFDAADTAAAAAGQPQLASTLASQQPLAGGYSGDYAKGTMDDSGIEVQEE

SEQ ID NO: 39868 - DNA, 2570 bp, DROSOPHILA
ctttaaacaaatataccatctgtaaattataaaccattcgaatattgtgtgatatatggggtgaacaacgatttggaaagtttgtttgcagcatatgagaatgtttaaagaaatagttggaaagttctgatagatggcgaattaacgtatcattgatcattttgcctgttttgtttgtttaaatttggtttaaaaaacccattctttatgcattctaattcccatgtattcacgattagttaggctgtgtgaattagcattttattcattttgatttgattccattcatgcggctcagtcactttcgattcgcgtttcaatttcactttcaactcgattcgatcgacccatattagcataatcacagtcatctaatttagcggtagctcaacgaccttttcatcggtgggcttatgttcattttagatatacgttgcatctaatggatatatttatgtatgtgtatcttaacgtttatttttatgtttcgaaatgtattttgtgtctggttgattatgttgtagcgtgttcttgtgtcttatggattattttgtgtatctgtgtcgtacattttgtatcttatggattattttgtgtatcggtgtcgtacattttatatcttatggattattttgaacgatgtggcttaattttaagctcgagttattttttttttagttttgtacatcgaagaaaagaagaacttgatataaatgtagaaagaaagtaaattgaaacgtttttttttcttttttcaattatcttataaacttttagaactagtattccatcatttggctttaatataatttgttttaaaatgttagcaaatattttaggatcattgattattttcaaaaaaattcaaatgaatatcattgagattttgcttgaaatcaggttcataaatgtgaatgtgctctgggtgctgtgatgtttaagaataaacaattaaatgagttatatattatatattatatatattattatattttagttattatttgtggggccatatatcctgccgcctccttttcgccgtattttgatcgatgcgattattgttttggcccagatactgatgcaggggcagtgggcgtggcgatgaggaggtcacacccagaaattcgctggtcggtctccatttcgagggcatccatggtgaatcgtagctctggtatctactttgatatttctcctcttgataattggccggtgcagttcccttctgttcgttgtgaaccttgagattcaacagtagttcaccatcgtcatcgatcaagttatagagctgaacacctttggcctccctcaaaggattggctctctccaatctgatttgttgcttaacctttggcctcactattggctttggcctctgaccaatgtaacgcgatgatcgatcgtgcgactgcaactggcgcaggatattcaatggcagtagtaaatccgattcgaagggcataaagccgctggctcgcactttgatgatatttctcagtaccggctgatggccataactctcgaccaggccaaaaaggctcagaattaaataggccaaaatgtgcattttccggcaggttgttagctcatcataaacacaaggatcactcgatataagcactcgaataaaaaataaacaaaatgtgttattcggtcgagagtgaagcgaaaaagcagcgcgttctaggcccgtgttgcagcaactgaacggactaaaaaatacacggctcaaatcaacctaaagtcagctgaatgcgctcgtaaaagcgaattaattagagaaaataccgtacggtacacgaatgcacagtgggttaaaatatatgcaaatttaaaaccaaaaattaaataaaatgcactgtctttgccattttaaatatataagacgatatagcatagatgttagttaaatagcaaaatttattagaagttcatagctttggcaccattgtgcgtggtgatatgtccaacactttggattgaaaataaaaacataactggccgcgactggacgtttattgtttggtggcctgttgaagtggctctttcttccattatttcctctattttgttatgagcaacacacatttattaacaacatcaagtgagttgtgagcgtatgtgagttgtgttgatttatgccaaagtggagaagaataattctttgaatgccttcgtgtggattgacattaacactggttcactagccgacagttgagccattacaatggccattaaaacataacccgtccactctcgctgccactggtagtggcccaaacaaaaagccaaaatacaaccatcataagcacacacacatctccggcccattagcattaagacaaaagacacccgcaatcaaaaaaaaaaaaaaaacccacaaactacaaaggcagtaaactctctatgcagattagcaatgtggaaaagcgtggctcagaattttcactccagccggcatttgcagttgaccgctgatcactctcactgttccacatttgcatatggacagtccggtacagtgcgtgacataaccgaagaacttaatgaaagtccactttaagatt

SEQ ID NO: 39869 - DNA, 570 bp, DROSOPHILA
atgcacattttggcctatttaattctgagcctttttggcctggtcgagagttatggccatcagccggtactgagaaatatcatcaaagtgcgagccagcggctttatgcccttcgaatcggatttactactgccattgaatatcctgcgccagttgcagtcgcacgatcgatcatcgcgttacattggtcagaggccaaagccaatagtgaggccaaaggttaagcaacaaatcagattggagagagccaatcctttgagggaggccaaaggtgttcagctctataacttgatcgatgacgatggtgaactactgttgaatctcaaggttcacaacgaacagaagggaactgcaccggccaattatcaagaggagaaatatcaaagtagataccagagctacgattcaccatggatgccctcgaaatggagaccgaccagcgaatttctgggtgtgacctcctcatcgccacgcccactgcccctgcatcagtatctgggccaaaacaataatcgcatcgatcaaaatacggcgaaaaggaggcggcaggatatatggccccacaaataa

SEQ ID NO: 39870 - protein, 189 aa, DROSOPHILA
MHILAYLILSLFGLVESYGHQPVLRNIIKVRASGFMPFESDLLLPLNILRQLQSHDRSSRYIGQRPKPIVRPKVKQQIRLERANPLREAKGVQLYNLIDDDGELLLNLKVHNEQKGTAPANYQEEKYQSRYQSYDSPWMPSKWRPTSEFLGVTSSSPRPLPLHQYLGQNNNRIDQNTAKRRRQDIWPHK

SEQ ID NO: 39871 - DNA, 4160 bp, DROSOPHILA
aaaaataaatattcgtatttttagacccatctggagcatagaaagtcttcacctcgccttaatccttgaacattacaattccttgctggccatattcattctatgtaaatcgaaccgatgggcttttttcccagcaactatcaactgttgccctttgtttacgcaccgacacaggaaacagtgatttgaagagtggacacacagatggatagcggaccaagtaaaaacggaatcccatttttctcttcgactccgcaaacagatggttcagatgcccacctacatacatacatgtgtacgcacacccacggctaataaaagtggttcggattttccaattcgaaagaggcgacaacgatgggccacgcccactggccaaggatggacgatggacgatggacgacggaggatggagaatagtcgatgggagctgagtgggtggcatcccggcaaatagagcaatttaaattggaacgtgattatgcaaacgtttgcacagcttaactcaagtgccgctccgtgccgctcggccagttggccagttgccgctgctcacacatggctaagagtggtgccgagtggcaaagagtggtgcagccatcgccagaggggggaaaccaaaaaaaaaaaacaaaaaaaaaaggaacagaagtaagccccaacccatccggcagctgcattacaagtcttaaataaattttttaaggccagccggccaccgcacaaaaatccatctaagtgcagcatgtctggcttaggcgccaagcacttaggttccaccatcgctcaaggacgcccaaagaaggatattgaacagtaggaacatctggctgatttgtggttcgtttcctccgaagattaacaaattagcaagagggatatttggccattaacgaactgactactagctacattagcgaactagctttaaaaacaaagttactctccttttgtttttttattattaagctcattattataaataattttgaaaatttatttattgatgcacccactccatccatcgtcttagtctgccattgctgcgccccgccagcaattccaggatgaacatcccggtggccaggacaatcaccagtccgtgaatacggtacgccccgttcattatacttttggtgatcctgcgcaggagaactggatcgttagaagccaccttacgtttgttctcgtactgcatgtacctcctttcgatgtgggccattaccccggcacttagcagctgtttgatcttccgatcgatggctggccggagaaagaatcttctaggaaagtagatgacgaggtgatacatgtagatcggttggcgaacaaaggtcaaacggctgatattcgggtgcttgtgattccagtaggccaagttactgatcagcgcaattgtggttagcctttcgtccggagctgccctctgaactcgctcgaatcgtgccgaaaagtctagtggctgccggcaggtgagttccaagggatagaagtcatggtagccattcgccaccatggtgtagttgtccttaatcaaaccactaagatccttgggcagtgggcggtggcgcgagaggcgaagaacgtcgaagagtcgcgcctgataggcacaccgcagtaccagggtgagtagcatccaactggccagtaagtagcgaaggaatcccttgcccggcagcctgtgatcgggtatcggattgcccacaatcaccgttaaaagatcctcgatcggatgactcaggcccaaacgggatctaagccaacaggtgcttagcacagccagcagcaggatcacgatgatcacgccccacaatttgccgcgaaacggcaggataagcggtcctaaacgacccaaataccgatccctgcgcaccaccatcacaaagttgctctggtggtaaacggtggacttggagaacagggagcgccgcttgtccgagccactcaagccaccgatggctatcgacacggtgccatctgccagctggaattttaaaaatttcagaaagttataaattgtaatatacactgatatacttcttttttttaaattacctgcctgaagcacccggacacgttaccctcgccaaagatctggctgggttcttggggcatatagagctggatgcgaaactttagcgccttggccagcagctggagcagatcccagtcgataccggcgagatcctcagccggaatggacacattgctggccggaggtggatccttgtgccgcttgtagatcaaatggggcggcatgtgggcggcgcccacgttgaacggacaatcgcccaagtggccattccgcacgggatacaagtccggcatactctgttgcggcttcccggtgatcctgtcgaagtgattgatttgccgcaccgtgatgcccggcgtgcagttggccttgaagagcttgtagctgtaggtgcccaccgttccgtcctccaattgggccacgaccaccacattgacgaaatgcatctgcagattggacttcacaatcgatccaacggtctgcctaacaaattgacgactctggatttccgataccaccactatgcagaagaactcgcgctccagcagctcgtcgggaaagatgaagacctggccactgcgaaagggcatttaacaattaaatgaagcatacaactattttaagctaaactgaaaaccgggagtgaataacctattaaataaaacatcaatttgttgtgcctcacgtgaaagcggtgtggtcgttgaccacgaagagtgtgtactcccaggtagtctcctctgcagtgcccttgtgcagcaggacactgagttctggagcgaggctggccaggatctggtcgaccagctgtcgctggcgttcgctcagctcgtagggacactccacacagatctctcgaactaccagcgtattgatcctgttagcaatgtagttcctggtcagataactcgaggcattcgccaatcgtcgggtgttaagctcgttctgctgattccccagccgcgagaggagcacatctcgaccagttggctgtgcccgcaccacgacccatatcccaacctgaatacccggcagaaggcagccggagaacagccacaggatagcgaagcgcatgactgaatggccgttgtgaatatcgcgacaggactctgctcgccgggacatctgagacacggtgctaatgtaattggcgatagcacttggctgatatgattaattaattgctaagattccgatattgattgaccatgttccatattcctactaaagtgagaaaatggtggtattataaagaaataaccacctttcgggctttagaaattaatcagaaatatacactttcgaaatatatagttaactaataaaaaaaagcttatgattgtaatgattatcgtctgatgttttttacattacagaaattcctaaaatgttattaaatactatactattcaagaagcttaagcgtttcgccaggtataaagaccacgatgtcctttcaagatagagctctcgatcttcgagcattcgaggcgccagggacagaaatagatatttacgaccaattgggcgggctttaaattgagtcaaggctggcggcgtcgccacccacttgccactacccccatccaccgttttggccatcagtcatgagccatgagccgtgagccatggccaaaagcgaaaggctggagcagtggctgtagcgccaccgagagcgcacttcttggtaatttaagaagcattgccgaggccacgacttgaccagaatgtggttcggggtggcttagagtggtgcagggcgccatttgggttcactagatgttattttacaaggacacgcgcacaatttataataacgtcgtcttcgtctcgggcattttcttcctcttcgtcgttggctttggctttctactccgaaagacgctttcgcttggccaaaaggaaaacgcacccacacatacacacatacccactctcactcactgactaagtaaaccaagctttgcttgtgtgtatgtatatgtgtgtttgcaaacgagaaaaatgaagcgaaacaattccaagtaagcaaacaaaactgatggaagataatctacttgaagcatactttaaggcgtatctaatggtccttttaatgtttaaacacgctttcgtcctgggctag

SEQ ID NO: 39872 - DNA, 1980 bp, DROSOPHILA
atgtcccggcgagcagagtcctgtcgcgatattcacaacggccattcagtcatgcgcttcgctatcctgtggctgttctccggctgccttctgccgggtattcaggttgggatatgggtcgtggtgcgggcacagccaactggtcgagatgtgctcctctcgcggctggggaatcagcagaacgagcttaacacccgacgattggcgaatgcctcgagttatctgaccaggaactacattgctaacaggatcaatacgctggtagttcgagagatctgtgtggagtgtccctacgagctgagcgaacgccagcgacagctggtcgaccagatcctggccagcctcgctccagaactcagtgtcctgctgcacaagggcactgcagaggagactacctgggagtacacactcttcgtggtcaacgaccacaccgctttcactggccaggtcttcatctttcccgacgagctgctggagcgcgagttcttctgcatagtggtggtatcggaaatccagagtcgtcaatttgttaggcagaccgttggatcgattgtgaagtccaatctgcagatgcatttcgtcaatgtggtggtcgtggcccaattggaggacggaacggtgggcacctacagctacaagctcttcaaggccaactgcacgccgggcatcacggtgcggcaaatcaatcacttcgacaggatcaccgggaagccgcaacagagtatgccggacttgtatcccgtgcggaatggccacttgggcgattgtccgttcaacgtgggcgccgcccacatgccgccccatttgatctacaagcggcacaaggatccacctccggccagcaatgtgtccattccggctgaggatctcgccggtatcgactgggatctgctccagctgctggccaaggcgctaaagtttcgcatccagctctatatgccccaagaacccagccagatctttggcgagggtaacgtgtccgggtgcttcaggcagctggcagatggcaccgtgtcgatagccatcggtggcttgagtggctcggacaagcggcgctccctgttctccaagtccaccgtttaccaccagagcaactttgtgatggtggtgcgcagggatcggtatttgggtcgtttaggaccgcttatcctgccgtttcgcggcaaattgtggggcgtgatcatcgtgatcctgctgctggctgtgctaagcacctgttggcttagatcccgtttgggcctgagtcatccgatcgaggatcttttaacggtgattgtgggcaatccgatacccgatcacaggctgccgggcaagggattccttcgctacttactggccagttggatgctactcaccctggtactgcggtgtgcctatcaggcgcgactcttcgacgttcttcgcctctcgcgccaccgcccactgcccaaggatcttagtggtttgattaaggacaactacaccatggtggcgaatggctaccatgacttctatcccttggaactcacctgccggcagccactagacttttcggcacgattcgagcgagttcagagggcagctccggacgaaaggctaaccacaattgcgctgatcagtaacttggcctactggaatcacaagcacccgaatatcagccgtttgacctttgttcgccaaccgatctacatgtatcacctcgtcatctactttcctagaagattctttctccggccagccatcgatcggaagatcaaacagctgctaagtgccggggtaatggcccacatcgaaaggaggtacatgcagtacgagaacaaacgtaaggtggcttctaacgatccagttctcctgcgcaggatcaccaaaagtataatgaacggggcgtaccgtattcacggactggtgattgtcctggccaccgggatgttcatcctggaattgctggcggggcgcagcaatggcagactaagacgatggatggagtgggtgcatcaataa

SEQ ID NO: 39873 - protein, 659 aa, DROSOPHILA
MSRRAESCRDIHNGHSVMRFAILWLFSGCLLPGIQVGIWVVVRAQPTGRDVLLSRLGNQQNELNTRRLANASSYLTRNYIANRINTLVVREICVECPYELSERQRQLVDQILASLAPELSVLLHKGTAEETTWEYTLFVVNDHTAFTGQVFIFPDELLEREFFCIVVVSEIQSRQFVRQTVGSIVKSNLQMHFVNVVVVAQLEDGTVGTYSYKLFKANCTPGITVRQINHFDRITGKPQQSMPDLYPVRNGHLGDCPFNVGAAHMPPHLIYKRHKDPPPASNVSIPAEDLAGIDWDLLQLLAKALKFRIQLYMPQEPSQIFGEGNVSGCFRQLADGTVSIAIGGLSGSDKRRSLFSKSTVYHQSNFVMVVRRDRYLGRLGPLILPFRGKLWGVIIVILLLAVLSTCWLRSRLGLSHPIEDLLTVIVGNPIPDHRLPGKGFLRYLLASWMLLTLVLRCAYQARLFDVLRLSRHRPLPKDLSGLIKDNYTMVANGYHDFYPLELTCRQPLDFSARFERVQRAAPDERLTTIALISNLAYWNHKHPNISRLTFVRQPIYMYHLVIYFPRRFFLRPAIDRKIKQLLSAGVMAHIERRYMQYENKRKVASNDPVLLRRITKSIMNGAYRIHGLVIVLATGMFILELLAGRSNGRLRRWMEWVHQ

SEQ ID NO: 39874 - DNA, 3704 bp, DROSOPHILA
aataaaaaaaaaacttgttattaaactcttattaataaatgcatatcagttttagatttcccatttattcagttatttatatattcaacttatttttcaattgagctaggcttgagtgtatcctcctttttatgatagctagattgttgcacatttttccctaaaagtaaaagccctttgacaaggacataaagtgcaatgtattgcacaactgtcgtttaactgcgagttttcactgtactttgacagcactgcgatggcagcaccgcgaacgtcagcagtgtgcaattcaattacaatcaagttggcagcgccggcctaatggccgatacaatggtacatcctctctgatattacaccacccattccaccgcccaccgcttttccgctcaattttccaaaacccccccacccccgctgccagttatcccgcagcgaacttaatcgaagcataaaacgcaaatcgcagcgacttcagcgggtaaaagtgctctttttacgggcccgcctctgcatttgtttcgcttcgtttttttgtctgttaatatttaatgcaatttacgattcattttttacaacctaataacgttcggacgggcgcgacgatttctcgcaaattgtttgccggccgttactcttgcgggaaaagtgaaaagccagcttttcctcccagcccatccaaccaacttaccagttgcgcaatttcacagtttcgcaatttccacgcaacaaaacaaacagaatgcaacatcctgtggcatgagtttgtgtaaatgtttgatcgcagtgtaggcatgaaaaaccttaaataaatataattatggattctctagggaagttgggttccatagcatcaatcaatgaagtcatcaataagttatagaaataaatatgaaaatactttattgcaatatcttatagcatccataaaaagtctataaatacacattttgaatttacattcatgttgctcttgaattttttgcacacttttgcaggcatggagcattataactcagactgtgagccggattacttgaggcaacgcgatcgtcaccacgaggaggccacgcccctaggcgatggcacgcccaccgtgacggccgccgcccccgaggtaacctatgcgcagccgcaccagcagcgctccacgatgccggcgggttcaccactgaaagtatccaccgtttcggcgggcaaataccaatcgaatgccaatctgggcctgtttcccaacagcagcagcagcggcggcagtagtgtgcaaaacggagtcaccgcccacacgccgcgcagcacaaatcccttcctgaacggctccaccaaatttgccagcgacgatggcggtctggaaaatatcaatatgctgaaaccatcggcctcctcctcgacggcggcgtcgtcgagcattcgcagcagtcatcgcaatcggaatgcattgaatcgcctcagtggcatgaccagttccagcagcgattcacagacccaccatcaccagcaacagcaacagcagcaacagcagcagcagcaacagcaacagcagcagcaactgcaaatttcgcagcagcagcaacagcagattgctgcagttaagcagcagcaacaaatgctgccgccggaggacagcggcgatgatgatttcgtcctgggactgggatccctcgaactgggcaactgcagcagcgggggagagtccgaggaaccgccgccggaaccggcgccacccgaaattccgccgcgcacccaatcgctactcatgtcccttcgcaagcattccgactacaagctgaagtacgaggagaagggtgaccagaagcacgaggagttcattcccaccagtcagctgcagaagggtgagttgagctctcaaaaaagggttcagttcaggctggaaatagatgcctacctcaatactcacacataaaatgccatatgacttttgaatcagttatgtaagatgcccaaggatttgaagccgaaagcaaattccttataagccaaattacagaattttagatatacataaccaatatcaaatgttgcaaatcatatacaaattattttgaattaattagattttcagacatcatttgattgatttgatttgtaacagcagatttaatttgaaatatagaaataaaaattgcccaactgagcgaggaaatagaaaaactgggaaattgcaacaaatcccttaagctttaagtcccaagctttttggaacaactccgtgagcttgcaatgtttttcgaaatgacaaaagcttttcgtcctgtgaaaaagctatcctttaacagaattttttgccttacttacatttatgttagtgcttaaagcttgggacaagtttcaaaagcttcatttaccatatagaaaatattaactagaatattatttttttgctttttcttacagattatattctcagcgataacctccgttcagatcagcaacttaagcctatatcaccaggcgactcaaatgggtaagtgcagctcagatattttatcaaaaaaaaaatatatttcttaaatggtgaaactttgacattcaggtgaatcgagcatatttaaattacttatcttatcttatgacttatgcttccaacttgtttgaacgtatttcaatataaaacaaaatgatttaattcataagctttgactacactaatattcctttaaggtacgtcaagagcttaatctgatttaactcgctccttttcttcggattattcaccctgtttgctgtgtttctgtcatcgaaactcgacttaaaaccatcaagcgaaatttttggggtgacaaaagtgggtgaagtgcagttttctgttcgcattttgggaagacagaagcatattgaatgaaaaaacagcgccgaaggaacctccacattgtcaacgtttgccctctaatctccggctggactatggaactctttgacgctcatgttacccgaagcccggccagacagaaagcaacagatgcactgagaaatatcggatgtaatagttagggaaattcaaaaaagttgtatatataaacttttgcatcctttataagttatttgaaaaccccattcacttcgctaccccaatttccacttaactacagctattgcaaatgtagtttctatgccatttgcatgaactattttttccagtgcaccggaagtgcggtgtaaaatgaagctcattccatgttaacggcaattaaattcacaaaatggtttcgcattggcatacgtgttcgccggatcgcagtttgtttgtttatcgtgtccgtccagtctatcggttcgtctcattctcagttggccgctccagctccatcatctacgccttttccgcttttccgggcgttttccgctgtctcgcatctcatctacaagtgcagctccattgtaatcccgggcaaatgtggagacaccaaagccgcagcgccaaacttcaaaatggctgcctttggtggccattggattcgcccttttttttttttggttttgttgtccccagttttgcgaatggggaccctattcgcccgcagatccttcaactcctgcactcctaccattttcatcccaaaccatctggcaaaaagatgtccgtagaattttgcggttttgtaagcggctttcgcctcgcattttgtttgttctgctcctctggatttctcgtccttcaggcggcctctttgtgtgtgtgtgtg

SEQ ID NO: 39875 - DNA, 945 bp, DROSOPHILA
atggagcattataactcagactgtgagccggattacttgaggcaacgcgatcgtcaccacgaggaggccacgcccctaggcgatggcacgcccaccgtgacggccgccgcccccgaggtaacctatgcgcagccgcaccagcagcgctccacgatgccggcgggttcaccactgaaagtatccaccgtttcggcgggcaaataccaatcgaatgccaatctgggcctgtttcccaacagcagcagcagcggcggcagtagtgtgcaaaacggagtcaccgcccacacgccgcgcagcacaaatcccttcctgaacggctccaccaaatttgccagcgacgatggcggtctggaaaatatcaatatgctgaaaccatcggcctcctcctcgacggcggcgtcgtcgagcattcgcagcagtcatcgcaatcggaatgcattgaatcgcctcagtggcatgaccagttccagcagcgattcacagacccaccatcaccagcaacagcaacagcagcaacagcagcagcagcaacagcaacagcagcagcaactgcaaatttcgcagcagcagcaacagcagattgctgcagttaagcagcagcaacaaatgctgccgccggaggacagcggcgatgatgatttcgtcctgggactgggatccctcgaactgggcaactgcagcagcgggggagagtccgaggaaccgccgccggaaccggcgccacccgaaattccgccgcgcacccaatcgctactcatgtcccttcgcaagcattccgactacaagctgaagtacgaggagaagggtgaccagaagcacgaggagttcattcccaccagtcagctgcagaaggattatattctcagcgataacctccgttcagatcagcaacttaagcctatatcaccaggcgactcaaatgggtacgtcaagagcttaatctga

SEQ ID NO: 39876 - protein, 314 aa, DROSOPHILA
MEHYNSDCEPDYLRQRDRHHEEATPLGDGTPTVTAAAPEVTYAQPHQQRSTMPAGSPLKVSTVSAGKYQSNANLGLFPNSSSSGGSSVQNGVTAHTPRSTNPFLNGSTKFASDDGGLENINMLKPSASSSTAASSSIRSSHRNRNALNRLSGMTSSSSDSQTHHHQQQQQQQQQQQQQQQQQQLQISQQQQQQIAAVKQQQQMLPPEDSGDDDFVLGLGSLELGNCSSGGESEEPPPEPAPPEIPPRTQSLLMSLRKHSDYKLKYEEKGDQKHEEFIPTSQLQKDYILSDNLRSDQQLKPISPGDSNGYVKSLI

SEQ ID NO: 39877 - DNA, 2360 bp, DROSOPHILA
cccactgtgctgccaatttggctgttttatagccaacggcaaatgcagcgtaatttcatttggagcaacaaaattgaggcgagcaaaatgggcacaacataaaaagtagaattttaggataccaaactaggattgatgctttttttttataaacaagcttgaagactaaagaaatacaaaaggttatgacaaatttttagaaattctaaaaaatattttataaaatatataaatcttagacagaaaaatgtaccaagaatacctgcagcactgactattgttaatagaagttctaaaaaattggaatactatatagaataatatacaactaaatatataatatataacttaatatataatatgtaacttaaactataactcaatatatataacttatagatatagatttgacttatagatcatagattttccatgacttcattttcctttgacttcattcggtaatcgatcgaccagcatcgctagttttgttggtaaatggtaaatgggaatgctatgtcctcctgcaattgctattaagttcactttacgtccagaagtcaaagtgaaagtaccggggagggcgttttgtatatatgtatgtatgtgtgtttgtatgtatgtatatgtcctggtaccggctgctatttattttcattttcgtgcatttatggctttatcttcttcccctctgctgacactttgtcgtttttatcgtttcagcgttaattcggttaagcacttaaagcaaactgaggtccacatggactgccagttggccagccggagttggagcgatgctgcgttgacaggagccacatcatcatcatcatcatcatcgtcattgggatcgtgggcatcggcggtgtgctcatcaagaaccattgaaggagcacaagaacgctggacaaattgcacctgcctagtctgagttgaccacatccggattgaatttgccatttatccggaaagctttcacatcgagagcaggaccatcatcatgtccagcagtcattccggaacaattggccgtaaacgcgtgggcagcggcagtgcggccggcagtgaatattactacgcatccggcggacttggcggactcactggatcgtcgaacggtggcggcaacggtggcggggagcaactgcgtcgacagcgttccgccgagtggcacagccacggtcgtcacggtcacggtcatggcctgagtcatggcatgggtcatggcatgggtcacggctatgggagcagcagcgaggatgagtaccagaataccggacaggcgacggcattcgatacccaactgctcgcccagctgctgttgcagagtcagcaattggcaagtgagtaccatggctaaaacactcaaagaaatgcatttgaaaaggcaaagaaaactaaatttgtcaactaatttgtaaataagtatttgtctagtttgaagtaagcgtaatacagcggggaagtattagttgatttaacaacttaaatatggaaaatgtatttaggtatatttttttttctaaccagtgtaatccgctgggttttcttgaattgaatgttacgaagcaaatgcgatttaccagtcggccagcagctagtaaatattcattattttatttaattgaattattcaacttccgcaactgtgtcgaggatgttgagtaaccaactaaccgactggcttaggtcctgccgcacaaatcgattccaattgctggccattgaaattgagctggccaagatgatgctgagatacattttgaggggggttaaggtgcgggggggggggagcactcctgacatttccctgattgaattcactaaatcgcccgttgcaaacgatgggccacagtaaaggttgcttcgcaggaatcccaagctacaattaataaaaaaaaaacttgttattaaactcttattaataaatgcatatcagttttagatttcccatttattcagttatttatatattcaacttatttttcaattgagctaggcttgagtgtatcctcctttttatgatagctagattgttgcacatttttccctaaaagtaaaagccctttgacaaggacataaagtgcaatgtattgcacaactgtcgtttaactgcgagttttcactgtactttgacagcactgcgatggcagcaccgcgaacgtcagcagtgtgcaattcaattacaatcaagttggcagcgccggcctaatggccgatacaatggtacatcctctctgatattacaccacccattccaccgcccaccgcttttccgctcaattttccaaaacccccccacccccgctgccagttatcccgcagcgaacttaatcgaagcataaaacgcaaatcgcagc

SEQ ID NO: 39878 - DNA, 360 bp, DROSOPHILA
atgtccagcagtcattccggaacaattggccgtaaacgcgtgggcagcggcagtgcggccggcagtgaatattactacgcatccggcggacttggcggactcactggatcgtcgaacggtggcggcaacggtggcggggagcaactgcgtcgacagcgttccgccgagtggcacagccacggtcgtcacggtcacggtcatggcctgagtcatggcatgggtcatggcatgggtcacggctatgggagcagcagcgaggatgagtaccagaataccggacaggcgacggcattcgatacccaactgctcgcccagctgctgttgcagagtcagcaattggcaagtgagtaccatggctaa

SEQ ID NO: 39879 - protein, 119 aa, DROSOPHILA
MSSSHSGTIGRKRVGSGSAAGSEYYYASGGLGGLTGSSNGGGNGGGEQLRRQRSAEWHSHGRHGHGHGLSHGMGHGMGHGYGSSSEDEYQNTGQATAFDTQLLAQLLLQSQQLASEYHG

SEQ ID NO: 39880 - DNA, 2392 bp, DROSOPHILA
agattcaacaagttatatgggggttgggtatgtgccccatttttgctaccccaacacattcgttgagttcctcttctacatacatatgtgtatagacgaacgttctaggaaaaaatgatgggtatgattggtttatttttcggattttttcttttcattttgtttcaataaaaatgtgaacaaattattttcgagtggccttaagttcgcatccttggccataattggttatccgactgtaagccaagtttcacatgacagttatgtaacgccgcacaggactctgtcaacataacagtatgttgcgctcaccgaagagagcaaggacaacagtgatgtttgatgctaaagagagccagtaaataagagagaacgtaactctcttagcgaaactcttaaattaagtataacagttttcctgaaacaatctgttaaacttgtaacgcctaagagaaaagttccacggccacttaacattaaactagaactaaaactaatgtttttattttaaacttcctagaaaatgttttagaaaattctttttaatattttcaaatatatattttttaatgtatttcaatagaattaagttggttactttaggagaatccttttagccaagacaccaatccgcgaatataagagtttggcatgccgcaaatctctgaggcattttattagcgtcgacttcatgtaacctcgataataaattccattttccgaactcttttttaaaagttttctcttaattcttctccttcgataaaggacgcaagcgcacagaaaatataagtctagttttatagcatttaaataatattttttcggagtgtcgatttaataatgcaaagtgtaagatctgacacaattaattcggcttacagaaatgcgaaaagcaaataaagtcttttgaattattcaaatacgaaagctgattttaattcctttaatcaagcatatgttcgattcgatacaaaaagaacaagcgatttaacgcttgttagccggtgatgctccccgatacgcgaagatatccctcgatattgccaaatcggagcttaacaatgccattgatggcatcgcgataggtaatgatcatcggaccaccgatccttgtcccatttacggctacacatccgatgcgactttcgttatccaaaatcaatgcattctcgctgcgcgtcaagctggcatgcaacttatgcaacgactttgtggtataaacagatttatcagattgggatatctacatatatatatatatacatatatactcaccttatcgggcgaataatagtcaagactcttgtcgttttcatcgctgccaatgcgccaaacttgataggtgtgcaacacctgggtgggtcgacccttaaacgatatgctggccatttagatgcagttcaacacttttagttacacttctgtcgaattttccggaatgccttgaaattttgtttcctgctgctatttgcaatggaatacgttatcgaactgaatttacgaccgaacatattttgacatttgcctaagcattgccaactgcgatgcggtgtatcctgatcacttggtccttggaactaatttcatcgaacaaacggagctgtcaaatccatgtacccctgcccgactcgaaatatattcagtttgctttcagagctcgtccagagcacaactcgtttcgtaacaaaaaatgtaaaaatttccaaattattgtgtaattggtaagctacaaatttaacaaaccacaaacatatggaaaaactacacagaaatcgtacaacatttgtatttctagagtttcacccttttgataacttaaatactcgccattgctttttgtaaagcaatggcaagtggttttatagctccggcaacacgaaaaaagtaagtaaataaattgtgccttatatttttccattaactaaacaaatttttcccttagcacctgacaattccatgactggactacactaattacaatacaatcgaatcgatggaaccggtcccgttggacgagtagcttgcatcgattctaacatgtgatacacaaatcggctaaaaactacatactaatatcatatatgggtttatatggcttaatgtgcgcttatatggattaaaaataaaatattgttaaatcaatgcgaagtctattacttttggttagtctgcaaatcttttcaagaggttggtatatatgtatatcctatatgcattccaattagtagtgccagtcgaaagacaatgctcgaaaattgtgggtggtgggagctggccaatgggggagggggggtggtgggagtggcaccgggaatatcggcgtatcgtgatgcgtgatgcggttgcttgcaacgtgacacggggctcggctactcgataaatttgtatt

SEQ ID NO: 39881 - DNA, 312 bp, DROSOPHILA
atggccagcatatcgtttaagggtcgacccacccaggtgttgcacacctatcaagtttggcgcattggcagcgatgaaaacgacaagagtcttgactattattcgcccgataagttgcatgccagcttgacgcgcagcgagaatgcattgattttggataacgaaagtcgcatcggatgtgtagccgtaaatgggacaaggatcggtggtccgatgatcattacctatcgcgatgccatcaatggcattgttaagctccgatttggcaatatcgagggatatcttcgcgtatcggggagcatcaccggctaa

SEQ ID NO: 39882 - protein, 103 aa, DROSOPHILA
MASISFKGRPTQVLHTYQVWRIGSDENDKSLDYYSPDKLHASLTRSENALILDNESRIGCVAVNGTRIGGPMIITYRDAINGIVKLRFGNIEGYLRVSGSITG

SEQ ID NO: 39883 - DNA, 2519 bp, DROSOPHILA
aaattgatcaaaaacatgaaatatctaagcaaaataaaacttttcttttctgacttgccgtattgtagttgcttaaacgttgaacagattttatacaatttgaagtttgaaagaaaaatgataatgtatacttactatacctctacctattgtttcttgacttggctggtaattatgcaaaaagagatcgagctacgtgtgcagatttgtgaaagtttccttatgacaaccgccacaatattatgttgtaatgaccagaaagaatacagaaagacccggtctaacgaccaagttgtcttgcattatatatgtaagttcaacgttttccgagtggatatttttggcgcaccccatctcaattttaacgctttcagtgtcgactgcctcccactgacacccccacccactgactaatttgtcacttttgttctcgcctcgcagggacttttggaatatcttgtactttttttgattgttttttttttttttttttttttgctggcaacccttttttcaagggcaatttcgtattcaaatgttgtttgactcggtgtctgtctcgctttctctccatttagttgctagtacgtgttcgttgtgacctgccccgttttccattttgctcgcagccagtacatttggaccacatcccccaaccgggtagctctcattcgcacgtaattagctgttaatttggactaccacttggcaaccgggcgtggaatttactttgtaacttctcccatgtttcggtgtgtggcaccgagccgttcatggggaaattgggaaaacgtttgttgatttggcccacagaagacgatggcattcgtatggtttattggctctggttttgcttcacacctatgcttatgttcaattggtatgattttacaaaggttgatttgattatacaattgttatttttaatttgagtaaacaattgatattttgaatttacatatctatgtgtttgggtgcttatcctaggaggctgtaaggactacatttcctggcctgcgaccactttgtcaacaaacgcctgaagctcggcttgtccctctgcgtcgggggctgccatgatcttgtcgagaatctgccagttaatgtgcttattcaatagtccccgtttgatgacaaaggcgcgcatcataatgttgaaatagcgagctctccaagcggaacgcagtcgcggaatgtagatgcgattgttgaccatctcgttgtcgtccacatcgtagatgtcgacttcgctgcccttctcctcgacaggctggtcctgcttctttggagcgattttcttacgcttctttggctttggcggcaggggattcgattccggctgtcggttggccagcttcgccatccatctagattgcaggtcggccagcgccaggtactccttgtgcgttaggtttggcacatcgcggaatagtccctccatcatatcgatcatcacatcctccggaaagctgcacgactccggtatccagatgccatcggtgggcaatatcttggccatggcaaagccaaagcaatgtggttgaaatgactggttctcaatgttattgttttatgagagctacgctgcttacgccgatagattaagcttgctatcgatcgatacaattgatcatcgacttaccgcaatgcatgggaggattatagaatgttcacactgataacgatgttataagctattaaataaatttatatagatatatatttatatataacaataataataataacaattttactcatgtgcatttataaatggtaatataatttaaattttaagttatcttgcaatcgaaaggggctagaatattggaaaaaaagccttgcttaaagattcttttaacttaaactacgacatcttcctggccgttggacagcttccaccacctgcagtgcagccccatggcagccttgccatccatctggtgagccaagtaaccccgggaacccaactgacaagcaaattacttgaccggggccaccaccaaccacaagtcaaggtatggctggcaaccgttaactttgcagctaattataaatgaaatccgatatcaaaaggcacactgggacacgcctttgtgcaacacccaggcaccagcacccactaacacacacgggggcttgccccctccaacccacggcacacacacacactgaaccagccgtcgaatacacagacaatgtcaattcatttggagttttggaagtcctggtcttggagtcctacagtcctggagtcctggagtcctggattccaaccggccgccagtctgtggttctcggcaaacaaacaaataatgaaaacagcacaaaggggctggcatcgtggtgtcatcggcgggttagggggtgttgggttggcgtattgtgggcgtggaccgagaacaaagtggaaaattcataaaatgtcattgtcgctttattaaaacgcgccaaaaaccttcacgatgccccactcaccactagcagcgccatctaacccccatttctaacacacaatt

SEQ ID NO: 39884 - DNA, 519 bp, DROSOPHILA
atggccaagatattgcccaccgatggcatctggataccggagtcgtgcagctttccggaggatgtgatgatcgatatgatggagggactattccgcgatgtgccaaacctaacgcacaaggagtacctggcgctggccgacctgcaatctagatggatggcgaagctggccaaccgacagccggaatcgaatcccctgccgccaaagccaaagaagcgtaagaaaatcgctccaaagaagcaggaccagcctgtcgaggagaagggcagcgaagtcgacatctacgatgtggacgacaacgagatggtcaacaatcgcatctacattccgcgactgcgttccgcttggagagctcgctatttcaacattatgatgcgcgcctttgtcatcaaacggggactattgaataagcacattaactggcagattctcgacaagatcatggcagcccccgacgcagagggacaagccgagcttcaggcgtttgttgacaaagtggtcgcaggccaggaaatgtag

SEQ ID NO: 39885 - protein, 172 aa, DROSOPHILA
MAKILPTDGIWIPESCSFPEDVMIDMMEGLFRDVPNLTHKEYLALADLQSRWMAKLANRQPESNPLPPKPKKRKKIAPKKQDQPVEEKGSEVDIYDVDDNEMVNNRIYIPRLRSAWRARYFNIMMRAFVIKRGLLNKHINWQILDKIMAAPDAEGQAELQAFVDKVVAGQEM

SEQ ID NO: 39886 - DNA, 2614 bp, DROSOPHILA
cagctgacggatcttccgctgctcctggctctcctgctgatgtcacaactgccagctcctggcgctccagctgacggatcttccgctgctcctggctctcctgctgatgtcacaactgccgctcctggtgctccagccgatggatcatctgccgctcctggttctccagctgaaggatcttccgctgctcctggctctcctgctgatgtcacaactgccgctcctggtgctccagccgatggatcatctgccgctcctggcgctccagctgacggatcttccgctgctcctggctctcctgctgatgtcacaactgccgctcctggtgctccagccgatggatcatctgccgctcctggcgctccagctgacggatcttccgctgctcctggctctcctgctgatgtcacaactgccgctcctggcgctccagctgacggatcttccgctgctcctggctctcctgctgatgtcacaactgccgctcctggcgctccagctgacggatcatctgccgctcctggttctccagctgaaggatcttccgctgctcctggcgctcctgctgatgtcacaactgccgctcctggtgctccagccgatggatcatctgccgctcctggcgctccagctgacggatcttccgctgctcctggctctcctgctgatgtcacaactgccgctcctggcgctccagctgatggatcatctgccgctcctggcgctcctgctgatgtcacaactgccgctcctggtgctccagccgatggatcatctgccgctcctggttctccagctgaaggatcttccgctgctcctggcgctcctgctgatgtcacaactgccgctcctggtgctccagccgatggatcatctgccgctcctggcgctccagctgacggatcttccgctgctcctggctctcctgctgatgtcacaactgccgctcctggcgctccagctgacggatcttccgctgctcctggctctcctgctgatgtcacaactgccgctcctggcgctccagctgatggatcttctgccgctcctggttctcctgctgaaggatcccctcccgctggaggatcccctgctggttccaatgtccccgctggtggagaccctgctgattccaatgtccccgctggtggagcccctgctgattccaatgtccccgctggaggagcccctgctgattccaatgtccccgctggaggagcccctgctgattccaatgtccccgctggaggagcccctgctgatgccaatgtccccgctggcggagcccctgctgattccaatgtccccggtggaggagcccctgctgatgccaatgtccccgctggtggagcccctgctgactccaatgtccccgctggaggagcccctgctggttccaatgtccccgctggaggagcccctgctgattccaatgtacccgctggaggagcccctgctgattccaatgtccccgctggtggagcccctgctggttccaatgttcccgctggtagctcccctggatcatctgttctgggaccaaatccgccagctggctcagttgtaccatcgattcctgtacttcctggcggagctggctcttggccttggcatcctcgaccaaacattccaatcgtgccaccgacctggaggcccctgcttcctggacaaaatggctcaggcgctcctggcagtggactaatcaatggcatcgtcaacccgccccaacgcccccatcccttctggcccaactggcaaagctgggtgaacagctggcgaccaacaaagccagttcctagcactgaggctcctgtccaaccgcagaatcctcagcagccgcagaatcctcaacagcctggaaacagcaatcctgagaccgccgaaagcgtagagcaagctgctccagtaccaccagccaatgtaccagcgtccaacgagaatgcctccgttgaggacagcaacaaagcttccagcgagaagtccaaggacaagccaaagtccggtgaggatcaatccaaggagcaggaacagaagaagcccagctctgaggagaaagagaaggacagcaaggagaagaacgacaaggacagcaaggagaaaaaggacaacgatagcaaggacaagaaggacaagtccaaggaggagaaggacaacgagtcccagaaagacaacgatggcgacgacgagccgagctccaaggagaagaagcaatacgtcaaggatctgatcaagaagctgaagaagggcgacgagtgcgacgaggacgacgtctatccggatgtccgtgattgccgcaaatactaccgttgcgaggtcaagaagtccggcaagcataagttcgcccacctgcgttgcgacaagaaggagcgattcgactggcttacccagtcctgtgtgcccaaggatgaggcccgttgtctcgagaaatagaactggcgtgggatgccacaatcaactgcacttaaatattggcaatgatattctatctccatttcctgggtcctatctaatttattgcacttaaacttaaatatctatcattttttgttttccttaataaatcttgaactttatgaaaatctggcaaatcgattgtttcattttgggttaaata

SEQ ID NO: 39887 - DNA, 468 bp, DROSOPHILA
atgccaaggccaagagccagctccgccaggaagtacaggaatcgatggggctccaccagcggggacattggaatcagcaggggctcctccagcgggtacattggaatcagcaggggctcctccagcggggacattggaaccagcaggggctcctccagcggggacattggagtcagcaggggctccaccagcggggacattggcatcagcaggggctcctccaccggggacattggaatcagcaggggctccgccagcggggacattggcatcagcaggggctcctccagcggggacattggaatcagcaggggctcctccagcggggacattggaatcagcaggggctcctccagcggggacattggaatcagcaggggctccaccagcggggacattggaatcagcagggagaaccaggagcggcagaagatccatcagctggagcgccaggagcggcagttgtga

SEQ ID NO: 39888 - protein, 155 aa, DROSOPHILA
MPRPRASSARKYRNRWGSTSGDIGISRGSSSGYIGISRGSSSGDIGTSRGSSSGDIGVSRGSTSGDIGISRGSSTGDIGISRGSASGDIGISRGSSSGDIGISRGSSSGDIGISRGSSSGDIGISRGSTSGDIGISRENQERQKIHQLERQERQL

SEQ ID NO: 39889 - DNA, 1793 bp, DROSOPHILA
gaagtctaagaatgctgatgtcagtccagaggcgcaggaacctctatagagcgatagccaaacaatacggggtaatgacctcttgcacgatgccctatcatcattaaccattgctatttcttttactattttgtagtacaatgaagtctcctggcaaggacttaacatacagatcctaaatgaagtcaccatctcgccgccgtaccgagtggacaacgtggtgtccagctcgaacaacgaaacttcatgcaactacatcaagcgcatcgtaagcaattgcccaaccgcagcaccttcaagcaaactgtcataaatccgaaatgaagttcgttaaatctttaatcagactagcaaaccattgtaacttaaacccaacgcaatggctcaaacaacgatttagttgaattaatgttcagaacattctagattcgctaatgtttataggttattcatatgtcaagatagtcctaaatatttcaagtacttcccaatgtggtttagggtttgattagaaacagtattaagcattttatcattctgatataaacatacaaatgcgcaaagttgcggtaaaaaaaaataatgctttatgacagaattgtggctggtgtggtcggtgtttttaagttcataggttaatctttactccatcttttatctgcagatcaaacagttcttcaacacgaggccatcgcccgtcccggaaagcggagctgcggccagcacctcgtcaccatcggtgtctcccacgtcctcatctcttgcatctggatcgccggttcccgcaaactaataataagcagaaaaaaaacacaaacaaaacaaaacaaaaaaacagaaatgtgcttcaaaaaagaacaacgtattggttttttaatctctcgggtgggcgcataaagttaacactttgatgggtattcgaaaaacgattctgaaaaaactatcagtttttgtggcttttatggtactttgaattcaggacccacaatttctcatctcgacttaaggttgtgaaaagttaaatcatttttttctaattattagataattcaattacacaatttcaattagatattagatatttgcatttaaatacatttaaaattttaataaaacttcttttaaaaatggatgcccatgtagcattaacatttggctataaacaagctagcagacatcactgtccgataaccgatagcccgattgttatgtatggcttgtggtggtcagctgcaagagccgcgccgcgtttttaacaaatttagcgaataagcaataaataacagacaatggccatggaagacgtgcagaagcacagcgtgcacacgctgatattccgctccctgaagcgcacccacgatctgttcgtctccaaccagggaaatctgcccgaaatcgacgaacgtttgtgagtatacctgtagtttgcaacttacgcattgttaatttgtgtttttcgttaaacagagagaagttgcgacgttccatcaaggcgaaggatggctatggccttgtgctggacaaggtggcgaagatcggcgaggccaggaaggcatcaggagcccaaacgccgggcgacaagacgctggccatcaccgatggcagtgcaacggatgcggccagcggtgccggcagtctggttaagtacaatgcgggcgccaggccagcggagaagacagcgccactggttaccggcacacacacatccctggtgcgcgcctccctggcgaacagcaatgcagatatgagcgccaatggcgccatcgccagccatctgcaattgataccgaaga

SEQ ID NO: 39890 - DNA, 321 bp, DROSOPHILA
atgctgatgtcagtccagaggcgcaggaacctctatagagcgatagccaaacaatacgggtacaatgaagtctcctggcaaggacttaacatacagatcctaaatgaagtcaccatctcgccgccgtaccgagtggacaacgtggtgtccagctcgaacaacgaaacttcatgcaactacatcaagcgcatcatcaaacagttcttcaacacgaggccatcgcccgtcccggaaagcggagctgcggccagcacctcgtcaccatcggtgtctcccacgtcctcatctcttgcatctggatcgccggttcccgcaaactaa

SEQ ID NO: 39891 - protein, 106 aa, DROSOPHILA
MLMSVQRRRNLYRAIAKQYGYNEVSWQGLNIQILNEVTISPPYRVDNVVSSSNNETSCNYIKRIIKQFFNTRPSPVPESGAAASTSSPSVSPTSSSLASGSPVPAN

SEQ ID NO: 39892 - DNA, 2641 bp, DROSOPHILA
cgcacactgttcgaggtgcagccactgatggagaagaatcgtttgaacgacgccaaggttgatccccgtggtcgcttctttggcggcaccatgcgctacattggcgatgagttcgagttccgtcacggcgagctgtaccgctgggaggccggtggccaggtgtcggtgatcaagggcgatgtgggcatctccaatggactggcatgggacgagaaggccaagaagttctactacatcgataccaccgactacgaggtgaagtcgtatgactatgatttcgagaccggcgtggctagcaatcccaaggttatattcaatctgcgcaagaatagtcccaaggatcatctgctgcccgatggcctgaccatcgataccgagggcaacctgtatgtggccaccttcaatggcgccaccatctacaaggttaatcccaagtgagtagttcactctaacattcgtgatcgagtgttaaatgtcgtacttcattgcagcactggcaagattctgcttgagatcaagttcccaaccaaacagattacctccgccgccttcggtggccccaacttggacatcctgtacgtgaccactgccgccaagttcgatcagcccgctccagctggcaccacctacaaggtgaccggactgaacgccaccggctatcccggcgtcaacctgaaggtctaggagctgcaatctctatctatccttagccgcagtaaaatgtaccaatcgaatccaagtgcaattatatgttatgctctttaacgttttaaatcgcgtctatcaatgttttgcatgctagttaggttatccttttttgcagttctagttcaaggtcagcttaaggatcacattctctcctgggaatatccaggatcatcatgtaaactcacaaagaggttgactatgctctactttactctgatttcaaacaacaatcttatcagccgcagacacacggtaatcatccgcggatcttatggtcatttggaggacgcagtgctcttatgcttctttattaatcagtggttctataaacaattttatacttatcgtctagtctaaaattaaagatagcaaggtggcgtaaaaaatcagtcgatgttttggtgaatggagatcatccactcaatttcggtgtagataaacatctgcatgaccgtctattcatcagactccgattccgattcggactcttcttcatcgtcatcatcgtcgtcgtcatcgtcgtcgtcgctgccggcggagcgatttagccgcagcatctcctggaactggtgtacacggatcttttgcggcacgatctgcagcagaaactccagattcttgttcttattgaccacctgggagagatgctcgtacttgagcgcttcgcccggtcgctggccgaattcctccgtgtatgccgcgcccgccaaatggcgaacgaatagctccgtgcacttggtcatcaggaagagcacctcgttggtgatcaagcccgtgtccatggagctcttcatgatcgttcgcacgcggctgaggggcagaaaggtttccgcggtcggtggacgctccacgggtggttggctccttggttcgcccatttgtttacttaattcccaagcaaactatggcttgggaatttttttggttttagagctgggctcacaagtggagctgtgaaactatcgatgttacaatcgaggcatgaaattcgtacctttctgagacactatcgattctttttttttatttgctatcgatggttatggtttatgaagacttaaaataagtaaccgcagggcttcccttaaaacgaacaatgctggcatacttctatttttgcaaggaattggatgtgcacaataatatatgtgttactttctcagaattaagttatagcgctaaatatataaaaattgagaaacccattcggatttgcctatactttcagctctagctggagcgggaatttaaccaaataacgttgcgccgatatgctatcggtagccacaacaagtatttaataaaagttttccaaatatttcaatttattagtggaaaaaccgctctaagcaaatacctttaacttaatcaagagattaggggtaaaacgattaggatctgcacgatttataaggaaacattcaattgcaacaacatttagacaagtcaatattatctacttttgtcttttcagtatgcaatcaactttggattttcacacttatagcttaaaaatctgtcttcattttcgaactcacatataaataaatatcaataaattattattgcacttgatttgtttgcagcaacgttgccagacttccgtaatcgatgactatcgaacctatcgctgcgcggcatgtgcaacactgcgttttctgctgcccccttttggctgttgtttcgtgtgttgaccaataaatttttcgcgtacttttccaacttttcaattaccgaaccgcaattgccgccaaaatagatagccgatagctagtcgagcgagtaaccagcgagtttttggccaattcacgcgacgatcaggggcagtggaagcaggagcaggatctcgaccagatcgccaggaagcgacatttccattagagcggttcaagtgaaagcgagtgagctgcacggcacgagagaacgagacaga

SEQ ID NO: 39893 - DNA, 641 bp, DROSOPHILA
ctctaaaaccaaaaaaattcccaagccatagtttgcttgggaattaagtaaacaaatgggcgaaccaaggagccaaccacccgtggagcgtccaccgaccgcggaaacctttctgcccctcagccgcgtgcgaacgatcatgaagagctccatggacacgggcttgatcaccaacgaggtgctcttcctgatgaccaagtgcacggagctattcgttcgccatttggcgggcgcggcatacacggaggaattcggccagcgaccgggcgaagcgctcaagtacgagcatctctcccaggtggtcaataagaacaagaatctggagtttctgctgcagatcgtgccgcaaaagatccgtgtacaccagttccaggagatgctgcggctaaatcgctccgccggcagcgacgacgacgatgacgacgacgatgatgacgatgaagaagagtccgaatcggaatcggagtctgatgaatagacggtcatgcagatgtttatctacaccgaaattgagtggatgatctccattcaccaaaacatcgactgattttttacgccaccttgctatctttaattttagactagacgataagtataaaattgtttatagaaccactgattaataaagaagcataagagca

SEQ ID NO: 39894 - protein, 140 aa, DROSOPHILA
MGEPRSQPPVERPPTAETFLPLSRVRTIMKSSMDTGLITNEVLFLMTKCTELFVRHLAGAAYTEEFGQRPGEALKYEHLSQVVNKNKNLEFLLQIVPQKIRVHQFQEMLRLNRSAGSDDDDDDDDDDDEEESESESESDE

SEQ ID NO: 39895 - DNA, 2222 bp, DROSOPHILA
acttttaaccccgcattgcgagtgattttcacttgatttctttaacgccaggcttctgtattcagccacattttagttgtcgcacatttgctgttaaattgactgggtcccgagttaaaaataaaaaacaaaaaccgcttctacgggagctgtcaccaccgactttgtctcaccagttggacgaaaaactcaacaaaacgcaagacttcaactcggcgactttgtatcacatactaccacatcgccagggtccaaacacacgcacaaagggcaaaaatatggggaaaaaaatctaccagccctgcgctctgcatccgcccgaaagctctggtccaagcttcagttcaagctcaatcggacaatcggaggtggacacactggccagccagtgcggaggagagcgcatgcgtgtcctccaaggaaacccgctcctaggaccgttacagtcgtcgattgagctttaagctccgcttgctcttcaccccttgggaacaaaactatcgaactttcgagaaatcgcggttttaaaatccgggcttaaatcatactgctaaagtttaaaaaaaaagcgaagcgacgaagtttaagctacttacccattctaagagttttttttttaattgatttaagtaattgatttactactgccacaattgttgataaagctttaagctttaagaatactttcaaccccttgtagtaaaaacttttgcatcaagatatcggttatttgaaaacccggctttaaccgaattacaaatgatcaaaggcgctctcatacttgacctaattaattaatatataaaacaaacaacatattttactctatttcagacttaattttatctctgtacatttcaataaccctcgtcaattacctttgcatactatctttaataataatgaatttttaccaattttcaatacttttctaaatatcaattgatcttttaaaataatgttaagtttaaataatttatatttaaattggtagtggtactcacattaggtcgcctagattcggtcgcgtctggacaagagcaaaactttccggagcccggcgccttttgttagacccttgcgagccgtagtgcgtgctccgccggatgacgccatcgccgatgatggcaatattgtcatccagaccgttgatgttgctaatggtcaatcgcgccataggagatgagccccttcggcgacgagctcccactccgcccagcattctgggaatcgatgaatcgaactttgcaatacgcgaaatgtactccaaatattgccatttctgtaatatattcactaccaactatcgggcacgttcacaatacaatgcgttgcacttgtttggggatcttcaacgattgcgaatgtccgtagacgacgggcccagagccccaggtgtgatgcaccagctgccacggtccggacggaactgatagtcgatggctacgactgctgtcgatgccccaacaacccagcaagatagataacggcccagatggcgatgacgacgattgcggctgatgacgtgcgatgacgtgcttgatagtagtcagcatttgcgcagtacagtgtctgccgctggtaattagggtgtccaggtgtccatgggtgaacgccgctcagacgggccaggccgcccactccggcatattagcagcttcctttgttcacgagcgccaacaacacactgataacaaaggcatggtaaacgttactgtattacaattaatttcgatatcaaacatacctgtgattctttcaacatacacgttttctatatgtggtcagaggaatttaaacattgcaaatttcgagatttttaatgttaatattatggtggagatctaaaagcgcagcgattctatgggaaaattcctttttggctttcccgtgccataatttattatttgaattgccctactgtcttagataaaaataaaactgaaatgccataatcagaagttttcgtaatgaaactagcaaaaaaaaaaaaagaaaaaaccgataaccgctaattactccgagtaacttttgcccatcgccatgcccaaggggctattatcacagcgctcacttagaaatgcgttcccatacacatttcggatgtgattcaaattacaaaggccgtgatccagtccagaaacttggccacgtcggcatatataatgtactgattcttacagcaaagcttatggctagattccgcatccggtgtctctacg

SEQ ID NO: 39896 - DNA, 222 bp, DROSOPHILA
atgctgggcggagtgggagctcgtcgccgaaggggctcatctcctatggcgcgattgaccattagcaacatcaacggtctggatgacaatattgccatcatcggcgatggcgtcatccggcggagcacgcactacggctcgcaagggtctaacaaaaggcgccgggctccggaaagttttgctcttgtccagacgcgaccgaatctaggcgacctaatgtga

SEQ ID NO: 39897 - protein, 73 aa, DROSOPHILA
MLGGVGARRRRGSSPMARLTISNINGLDDNIAIIGDGVIRRSTHYGSQGSNKRRRAPESFALVQTRPNLGDLM

SEQ ID NO: 39898 - DNA, 6708 bp, DROSOPHILA
tcgaatcaatagaagaggatttccaatgtttataagaatacgaatatgaatcggatcggggatcttttggatgaaatgggttaagaacggttgcaggaatatcgctatctcgcttcgaatcgggacgtaattactatcgatgacaggtgcaccaaaggttcgtcccgacgaaggtatcggtggatacgatgcaagacccgattggtacagtagttgctagctgatttcagagcgtttcaggcgcagttttagttttttatgaatgttagaattgatgtggaaagtgtgtgttggatattaatgagaacggagcagtgcgacgatcgctcaacaagataagcaccgtttgtttttgggcccgtttccggcttccggttgctagttccggaaaaattgcaacgcctactttacgcgtacttttggcatggtgagtttttggcgcgctttcttcgcactcctggattgaactttgtaaacccagattctctgtctattttagttgccggcctttattgccttttttattttgcccactttgcgttgcgatttcgcttctcctcgcatgtaacggttcttgcaagccccctatcacacacttcgaaacgtgaagaagagcaaagagaggagaggcaaggtgaccgcaatttacgaatgctagaagagtgtgtgtgtgaaaatacggtactttacactggtggctgttaaaagtgaaagtcagagtcaaaattaaaaaatcctgaaatgaaataaagtgtatctgactaaaagcaccaaaaagaaaagaaaaagtaaaaaatataaaaatacacaaaatttataatacatatatatcaaaacaaaaaacaaaaaaacaataaaaaatctaaaaaagttttcgaattcgaaaggaaactaaaaaaataaaacataattttacattaacttaaaactagttctaagcaactgagcgcacggggcgagcactcgagccacataccctagaaaacccgatacctgggatatgttcagcacccgaatatccggcgatatgaagatctttgccgcagatgttgccgagagcagcgtcacagcaacatgcaacacgtccgtacagcagcagcagtcgcagcaacttgagttccggacacgaatgtccgccggatcgccgagctccaagtcgggacagtgtcatctgaagttcgggaagtacaacaataaaacggccaatctgctgcgccaggtgaatagttgccacagcagtaacagcagcagcaacacaagcaacaacaacaacgaggccatcaagggacaacaacagcagccactgcactactgcaacagcaacaacagtcactcgtgggcccgaaagaaatactttggcaatggcaacagcaacaacagtctgctgcagcagcaacagcaaccatcttcgttcttccagcggcagcagcagcaacaccaaatgcagatgcaacaggagaagcaggcgacgaacaacaacgatgcgctgatgaagaatcagaatgttgtcaacgcacacgtgtctgattgcaagtctagcgatagcaacaacaacagcaccagcagcagcaacaacaacagcaccatcagcagcaacaacaacaacactagcagcgccagcaacaacaacactggcagcagcagcagttgcagcaacagaacaaagccagccaaatggctcaatgagaacagtagcagcagtagcagcagcaacaataataatatcagctgcagaaataacaacaccagtagcattgataccaagcgacgcaactcatcagcgggcgcaactgccgcttactatcgcaagtcggaatcggaatccggaagctcggaaggtgcagcagaatcgacggaaacggaggcaactcgaacaggtggctgcaacagcaacaggactgcagaatcgtcgagtgcagatggtggcactcaagcaaccatgggtaagagccaggatcaggagcaggatcagacggtcaagcagaggccgcgacagcaacctctgagtttctggaaaactaattacccacagacaagcgccactcagcttaaagatgtaagtgtctccttagatatgctcttaactcagggcttaatccatgattacttacagaaggaaacggtagcagcagttgtgtcggcggccgctgtagcagctgcagcagcagccgcatcagcatcggagcaacagcagcaacagcagtcactgtccatcgagcataggcgcaactcgggctaccagcagcatcagcagcacaactactatccgtattactattcgcagcccaagcagttgacaatcgcctcgttcctgcagaaggaaatgcttccggatagcactgagaagtccagcagcaatacgggcggcagcaacatgattagaagcagcagcaacggcaacagcaacttctcacggcatcaatatggccatcagtcgacgggatctggctaccagcagcagcagcagcggtaccgcaatgcccagaatgtctatcagcagtaccagcatcagcagcaacatcatgcgcagcagcatacgcatccgcacttccggcgaaagcacagtgacaacggcagcggcatcaacaagaagatgcactacagtccaccgggaaagagtggggatccagcggacagatccgcatctggacagcaacagcaccaccatccacatcagcaacagaagaccatcgagatcttggccagtagccacttcaacgccatgcaccgccggatgcagggtgggaataataagaacggatactatcagcacagctataacccgatgacgggcgaagttggttccacgcctacgcgctccgagcaccaaaatatctataatcttacttatattcacgtggacacggaggcaaccggcgaggccgcatcagcagcgggatcaacaccggtggtcaagccatcgctgctcagcaagccgaacatttcgataacgccagcttcgagcacaacaccgacaactgtggacagagcactgctaccggcggttcgctccgtgtctgctccggcgtccggttctgctctgccggcgccagcgaaccacgtacgaaacatgtttccaccgccaccgctggctatgcttggtggccacggattgctgtcgccggtgaccacgacaacgcccactaaaatgattagctgcgcccagctggatgaggccataactgccgcggccgccagtggtgacaagttgtccacgagtcccagttataatcaggcggggcactacattatgccgccccagcagcagcagcagcagcaactatcgtcgcacccaatcccgactggaacaagttcacatccaccaccgccgcccccgccacatatgttcttccactttgccgacgggttctgcaatccgggtcagggtcaccaggcgccaccagctaccatgtggccacactctagctctccctgctatccggcttcgtacggatccagctgcggaagcggaactggagccggaacatcaccgcacaacaatgatgggaatgccggtgcactgcgaccagcatcgccagcactttcctcatcctcacttggcagtgagtcccagtggagcggtacaagcaatcgcagtcggtaagttcgagacgggctgaggtcaggtgaagccaagctgatcattgggtcattgcatttatttccagcttgggccacaatggacatccctccatttcgccaactcccagcgcactgggatctgcccagctatcaccgcatttggccgagatgcgtgtgcagcatccactgcaccagcaacatcctccatcgcatgccagtcatcgtccgcatgggcagatgggcggacatgcaatgagctcctatgtgccgcaccgcccaccaccacccccacatccgtccatctcgtcgccgaacccgacgccagttgctactggagccggagggccttggtacgagatgatcctgccgccggatcgctacttggcccaagcgcgaaacattgaggtcaccgtgcagccagagaagcttatctgcatgtgcaagtacgacaatctgtcggcggaaatctggaagagattccgaggagcccagcaaacgcacaataagtttaagcttaaaatgcgtctctggcgctacttgtacctatggatgcatgtaagttaagctaatcgatgtgtgaacattattaatagtaatttaatatacagcaaccgatgtttgagaggtatcgcatctgcctagttggatccaccatcacgggcttcggaacggactcctccgacatcgatatgtgtctgctgcccgagcagggggtacatccccaccagcatcagtaccaccaacaccatcacttccataacgagaagcgaacggaggctttgatcattcttactttattcaacgcggtgttgaaggacacgggtaaggatagcgaattctgtatactgatttgggcacagagtgactgttgcttgcagaggttttccaggacttcaatctgatcgaggcgagagtgccgatcctgcgcttcaaggacatcagcaatggcatcgaggttgatcttaactttaacaactgtgtgggcattaaaaacacctatctgctacaactttacgcccaaagtaagatgtccttcagagtcttttcgtatttaaattcaattgtatattgaaaattcttcatgttcttgtcaatgaaagcagcttaaacagttctgaaataatttggtgagcgtttgagtgcctgtcctatatgtttttaaaagctatctagcaatcctttcaaaggatagtttacaagtaagtttagcaatacgagttatcgtctaaatccattaaatatgttcgatgtcaattgtgttccccactttgtttagagaatattctttaactcaaactatatccttgtagtggattggcgaacacgaccattggtggtgatcgtgaagctctgggcgcagtatcacgacatcaacgatgccaagcgcatgaccatttccagctactcgctggtgctaatggttctgcactaccttcagcatgcctgcgtgccccacgttctgccctgcctgcactccctgtacccggagaagtttcagctggggcagcaggattgcctggatctggatctcatcgaacccatcgagccctaccaggcgctaaacacccagacgctcggcgagcaccttctgggtttcttcaagtactacagcacctttgagtaagtcccgatccgatctagaagtagaattggaagtaattgcccattgttcgtttgcatacagcttccggaactttgccatctcgattcgaactggtggtgtcctgccggtttccacatgtcgaatggcgaagagccccaagaacgatgtctaccagtggaaggagctaaacattgaggagcccttcgatctctccaatacggcccgatccgtctacgatgggccaacatttgagcgtgtgaaggccgtttttctgatctcggcacgtcgcctcgatcacaccctcgacctggccaccatcttccgccccattcaccacgtgcccgagcactttccccagctgcagcagcaccagcagcagttcgagcagcagcttcaccatcccatatccggtcagcagcgaagtgctggaggaggaggagatggtgctaatccagtgcccagcacgttgaacccagatgcagcgtcgacctttgccgaaacgactgcagcgcatgtcgcctaattgtagccctttaaatggcaaacataaaaagaaagtacaacaactttatggtacttggaaacaagaatgaagaaactaaatggataggtaatatgtgcagcaatgttaaatcgaaacaggaaagcttgtaaattgaaattcaaaagaatccgaaccgaatcatccgtacggaaaagaacgtgaaagcagcccgactggaatcgaatttcaatacacttttacattacatacattatcttgttaaatgttattatattctcctatttatacctttaaacactcgaattgtttgctcgcattccattaattattgtaaacagccacggaggtgtgcgatgttcgttcctccagtggtgtgtatgtatctatttgaaaaacaacatgtcatccgaaaatgtaaaattgcaagttctgtaaattaaaaagcaacaaaacagccaagtgtctggaaactcgaatataaattcaattttcacgtgccccaaagagaaaattcttggcgcgaatattggttttttttttttcgcaagggaattctttattttgaatttcaaacaaaatgttccattttcttgatacaaagagtcgcatggaggaagaattaactgacaatatatagaaaatatatacgattttcatgtcgttttaaaaacaatgatcaggcatctgtaactgcattaatattattaataactaaccttttctgatcctgatcatttactccgttggttcagtttgttaatgttcgcctgtttttttgtggtgtttttttttttgtagtgtacctatgtagatcggtaaatcgcaatgcgttttcctatcaaccattcgatatccgaactgcgctggaagcctgcatccgcttggggggatccgccagcgttcccgagcgattataaatggtgtatccatgttttttaaatttgattttgtttcgtcttgattctttgtttgcgtgattttccttgtttttgtttgattttgttttcgtgtttgttag

SEQ ID NO: 39899 - DNA, 4122 bp, DROSOPHILA
atgttcagcacccgaatatccggcgatatgaagatctttgccgcagatgttgccgagagcagcgtcacagcaacatgcaacacgtccgtacagcagcagcagtcgcagcaacttgagttccggacacgaatgtccgccggatcgccgagctccaagtcgggacagtgtcatctgaagttcgggaagtacaacaataaaacggccaatctgctgcgccaggtgaatagttgccacagcagtaacagcagcagcaacacaagcaacaacaacaacgaggccatcaagggacaacaacagcagccactgcactactgcaacagcaacaacagtcactcgtgggcccgaaagaaatactttggcaatggcaacagcaacaacagtctgctgcagcagcaacagcaaccatcttcgttcttccagcggcagcagcagcaacaccaaatgcagatgcaacaggagaagcaggcgacgaacaacaacgatgcgctgatgaagaatcagaatgttgtcaacgcacacgtgtctgattgcaagtctagcgatagcaacaacaacagcaccagcagcagcaacaacaacagcaccatcagcagcaacaacaacaacactagcagcgccagcaacaacaacactggcagcagcagcagttgcagcaacagaacaaagccagccaaatggctcaatgagaacagtagcagcagtagcagcagcaacaataataatatcagctgcagaaataacaacaccagtagcattgataccaagcgacgcaactcatcagcgggcgcaactgccgcttactatcgcaagtcggaatcggaatccggaagctcggaaggtgcagcagaatcgacggaaacggaggcaactcgaacaggtggctgcaacagcaacaggactgcagaatcgtcgagtgcagatggtggcactcaagcaaccatgggtaagagccaggatcaggagcaggatcagacggtcaagcagaggccgcgacagcaacctctgagtttctggaaaactaattacccacagacaagcgccactcagcttaaagataaggaaacggtagcagcagttgtgtcggcggccgctgtagcagctgcagcagcagccgcatcagcatcggagcaacagcagcaacagcagtcactgtccatcgagcataggcgcaactcgggctaccagcagcatcagcagcacaactactatccgtattactattcgcagcccaagcagttgacaatcgcctcgttcctgcagaaggaaatgcttccggatagcactgagaagtccagcagcaatacgggcggcagcaacatgattagaagcagcagcaacggcaacagcaacttctcacggcatcaatatggccatcagtcgacgggatctggctaccagcagcagcagcagcggtaccgcaatgcccagaatgtctatcagcagtaccagcatcagcagcaacatcatgcgcagcagcatacgcatccgcacttccggcgaaagcacagtgacaacggcagcggcatcaacaagaagatgcactacagtccaccgggaaagagtggggatccagcggacagatccgcatctggacagcaacagcaccaccatccacatcagcaacagaagaccatcgagatcttggccagtagccacttcaacgccatgcaccgccggatgcagggtgggaataataagaacggatactatcagcacagctataacccgatgacgggcgaagttggttccacgcctacgcgctccgagcaccaaaatatctataatcttacttatattcacgtggacacggaggcaaccggcgaggccgcatcagcagcgggatcaacaccggtggtcaagccatcgctgctcagcaagccgaacatttcgataacgccagcttcgagcacaacaccgacaactgtggacagagcactgctaccggcggttcgctccgtgtctgctccggcgtccggttctgctctgccggcgccagcgaaccacgtacgaaacatgtttccaccgccaccgctggctatgcttggtggccacggattgctgtcgccggtgaccacgacaacgcccactaaaatgattagctgcgcccagctggatgaggccataactgccgcggccgccagtggtgacaagttgtccacgagtcccagttataatcaggcggggcactacattatgccgccccagcagcagcagcagcagcaactatcgtcgcacccaatcccgactggaacaagttcacatccaccaccgccgcccccgccacatatgttcttccactttgccgacgggttctgcaatccgggtcagggtcaccaggcgccaccagctaccatgtggccacactctagctctccctgctatccggcttcgtacggatccagctgcggaagcggaactggagccggaacatcaccgcacaacaatgatgggaatgccggtgcactgcgaccagcatcgccagcactttcctcatcctcacttggcagtgagtcccagtggagcggtacaagcaatcgcagtcgcttgggccacaatggacatccctccatttcgccaactcccagcgcactgggatctgcccagctatcaccgcatttggccgagatgcgtgtgcagcatccactgcaccagcaacatcctccatcgcatgccagtcatcgtccgcatgggcagatgggcggacatgcaatgagctcctatgtgccgcaccgcccaccaccacccccacatccgtccatctcgtcgccgaacccgacgccagttgctactggagccggagggccttggtacgagatgatcctgccgccggatcgctacttggcccaagcgcgaaacattgaggtcaccgtgcagccagagaagcttatctgcatgtgcaagtacgacaatctgtcggcggaaatctggaagagattccgaggagcccagcaaacgcacaataagtttaagcttaaaatgcgtctctggcgctacttgtacctatggatgcatcaaccgatgtttgagaggtatcgcatctgcctagttggatccaccatcacgggcttcggaacggactcctccgacatcgatatgtgtctgctgcccgagcagggggtacatccccaccagcatcagtaccaccaacaccatcacttccataacgagaagcgaacggaggctttgatcattcttactttattcaacgcggtgttgaaggacacggaggttttccaggacttcaatctgatcgaggcgagagtgccgatcctgcgcttcaaggacatcagcaatggcatcgaggttgatcttaactttaacaactgtgtgggcattaaaaacacctatctgctacaactttacgcccaaatggattggcgaacacgaccattggtggtgatcgtgaagctctgggcgcagtatcacgacatcaacgatgccaagcgcatgaccatttccagctactcgctggtgctaatggttctgcactaccttcagcatgcctgcgtgccccacgttctgccctgcctgcactccctgtacccggagaagtttcagctggggcagcaggattgcctggatctggatctcatcgaacccatcgagccctaccaggcgctaaacacccagacgctcggcgagcaccttctgggtttcttcaagtactacagcacctttgacttccggaactttgccatctcgattcgaactggtggtgtcctgccggtttccacatgtcgaatggcgaagagccccaagaacgatgtctaccagtggaaggagctaaacattgaggagcccttcgatctctccaatacggcccgatccgtctacgatgggccaacatttgagcgtgtgaaggccgtttttctgatctcggcacgtcgcctcgatcacaccctcgacctggccaccatcttccgccccattcaccacgtgcccgagcactttccccagctgcagcagcaccagcagcagttcgagcagcagcttcaccatcccatatccggtcagcagcgaagtgctggaggaggaggagatggtgctaatccagtgcccagcacgttgaacccagatgcagcgtcgacctttgccgaaacgactgcagcgcatgtcgcctaa

SEQ ID NO: 39900 - protein, 1373 aa, DROSOPHILA
MFSTRISGDMKIFAADVAESSVTATCNTSVQQQQSQQLEFRTRMSAGSPSSKSGQCHLKFGKYNNKTANLLRQVNSCHSSNSSSNTSNNNNEAIKGQQQQPLHYCNSNNSHSWARKKYFGNGNSNNSLLQQQQQPSSFFQRQQQQHQMQMQQEKQATNNNDALMKNQNVVNAHVSDCKSSDSNNNSTSSSNNNSTISSNNNNTSSASNNNTGSSSSCSNRTKPAKWLNENSSSSSSSNNNNISCRNNNTSSIDTKRRNSSAGATAAYYRKSESESGSSEGAAESTETEATRTGGCNSNRTAESSSADGGTQATMGKSQDQEQDQTVKQRPRQQPLSFWKTNYPQTSATQLKDKETVAAVVSAAAVAAAAAAASASEQQQQQQSLSIEHRRNSGYQQHQQHNYYPYYYSQPKQLTIASFLQKEMLPDSTEKSSSNTGGSNMIRSSSNGNSNFSRHQYGHQSTGSGYQQQQQRYRNAQNVYQQYQHQQQHHAQQHTHPHFRRKHSDNGSGINKKMHYSPPGKSGDPADRSASGQQQHHHPHQQQKTIEILASSHFNAMHRRMQGGNNKNGYYQHSYNPMTGEVGSTPTRSEHQNIYNLTYIHVDTEATGEAASAAGSTPVVKPSLLSKPNISITPASSTTPTTVDRALLPAVRSVSAPASGSALPAPANHVRNMFPPPPLAMLGGHGLLSPVTTTTPTKMISCAQLDEAITAAAASGDKLSTSPSYNQAGHYIMPPQQQQQQQLSSHPIPTGTSSHPPPPPPPHMFFHFADGFCNPGQGHQAPPATMWPHSSSPCYPASYGSSCGSGTGAGTSPHNNDGNAGALRPASPALSSSSLGSESQWSGTSNRSRLGHNGHPSISPTPSALGSAQLSPHLAEMRVQHPLHQQHPPSHASHRPHGQMGGHAMSSYVPHRPPPPPHPSISSPNPTPVATGAGGPWYEMILPPDRYLAQARNIEVTVQPEKLICMCKYDNLSAEIWKRFRGAQQTHNKFKLKMRLWRYLYLWMHQPMFERYRICLVGSTITGFGTDSSDIDMCLLPEQGVHPHQHQYHQHHHFHNEKRTEALIILTLFNAVLKDTEVFQDFNLIEARVPILRFKDISNGIEVDLNFNNCVGIKNTYLLQLYAQMDWRTRPLVVIVKLWAQYHDINDAKRMTISSYSLVLMVLHYLQHACVPHVLPCLHSLYPEKFQLGQQDCLDLDLIEPIEPYQALNTQTLGEHLLGFFKYYSTFDFRNFAISIRTGGVLPVSTCRMAKSPKNDVYQWKELNIEEPFDLSNTARSVYDGPTFERVKAVFLISARRLDHTLDLATIFRPIHHVPEHFPQLQQHQQQFEQQLHHPISGQQRSAGGGGDGANPVPSTLNPDAASTFAETTAAHVA

SEQ ID NO: 39901 - DNA, 3145 bp, DROSOPHILA
aattctagaattcccaaacttgaatgcaaatcgattgggatttaaaaaacaaactcaacgaggtatgaccattccatatttgagtccattattttcaatgttttgatcaaaataccgaatatttttttcacaaaaaatctggaaactacttttggcaaaaaactcaattttcaagttggcttttttggctataacttgtctaaaaatggcctcacagcaaaaagaaaagaagtcaagaagattacgcatggcaaaaaagcaatatttacggaagataatgtatttatatacctaagctaagctttatatggtaaactacctaagctaagctataataatgcattataaatttaccaacaagtcacatacagcattttgaatcttccgccaaatgaaatttccgcgtaatcgcgaataccccatatgtagtaactttctgacagaccgagtgcgatctggcagcaccgctcagaacatatgttcagttgtctggtggaaagaagaagcacagatgcggcgcctggtgcgaaattggaattgccgattgttatttaacgccaaatccggccaagaaattgtcagccatgccggaattcaccaggaggccaagaccaatgcgattcccagggaaaagaaagtgattgaggcggacaagaatggatacggggccaaacattgcatgagtctagtggagtaagtagcgcaaacttgtcgattgaagttatccgtataattgaacatggatctattccggataaccaggaaatacgactacgagaactacctgtgcaccttgctcctaccacgggaactgcgacgtgctgccttcgccctacgggcattcaatgtggaggtctccagatcggttagcggccatgtgagtggagcatcgaaattccttggggcttattttttaagttagaataacgtggcgccttaaattcagactccgttcagactctgttactccgcatcaatattattgtaagcataagtggcttatgtccgcatctcatgaatattattaccatttcgaacggtttcacaaatctcttaatttcttatgtacactgcaagagtataatttctctccttcctttaaaacggatagagaaattcgtagaataagcaacacttcgtagtttttaaacttcttatttctgtccagtaaaatcgtttatataatgacaaatatccttgcagcaaattgagccgcaaatagccaaaatgcgccttaagttctggcacgactccatagacaagtgctttgagccggattcccaaagatcgtacgtggaggaccagcctgtcctgcgcgaactgaagcacacggtgggcagtcgcaagctaaataaggtatatttgcgccgtctggtcacagcacgggaacgtccgcccacgcatgcatttgagtcgatacgcgagctggaggagtacacggaacagaccttctcttcgctattgctcctgctgttggaggtgggcggagtgcgtgacctaaatgctgatcatgccgcctcccacttgggcaaggcccaaggcatcgccaccctgctgcgatcgataccgctggcaggacgtcagcaggcgccctgcattccgctcgaggtgctggtgctgcatggcgtcagccaggagcgcatcattcgctctaagagcgacgacaagggtgtcgaggactgtatattcgatgtggccagtgccgccaatacgcacctaaagctcgccaggcagctgcacgataaggtgccgccgcaggtgcgcaagatcttcctctccgccgtggccacggatgcatatttggagcgcctccgccgtgccaacttcctgtgagttcctttgttttatattgctttgttttatattacgacaaacacaggagagaaccagcttctttttgtagttaagatgttatttttatccagttataagtacgatttgcctttattgagacttctttatttcaaaacctagctatagtttgttggttgttcagtattcatggagcggacccttctttttatcaatccccataataatataataattttcccatcttataggctaacccacaagagctgcgtaggccgcgacaccttactgccagcacgtttattctggaagtcgctgcttaatcggttctgatagcgattatgttagtatgtagtacgaaataaattcttcattgttgacttctttaataaaaatcactttaaaataagagctcttactttttctcgaatcaatagaagaggatttccaatgtttataagaatacgaatatgaatcggatcggggatcttttggatgaaatgggttaagaacggttgcaggaatatcgctatctcgcttcgaatcgggacgtaattactatcgatgacaggtgcaccaaaggttcgtcccgacgaaggtatcggtggatacgatgcaagacccgattggtacagtagttgctagctgatttcagagcgtttcaggcgcagttttagttttttatgaatgttagaattgatgtggaaagtgtgtgttggatattaatgagaacggagcagtgcgacgatcgctcaacaagataagcaccgtttgtttttgggcccgtttccggcttccggttgctagttccggaaaaattgcaacgcctactttacgcgtacttttggcatggtgagtttttggcgcgctttcttcgcactcctggattgaactttgtaaacccagattctctgtctattttagttgccggcctttattgccttttttattttgcccactttgcgttgcgatttcgcttctcctcgcatgtaacggttcttgcaagccccctatcacacacttcgaaacgtgaagaagagcaaagagaggagaggcaaggtgaccgcaatttacgaatgctagaagagtgtgtgtgtgaaaatacggtactttacactggtggctgttaaaagtgaaagtcagagtcaaaattaaaaaatcctgaaatgaaataaagtgtatctgactaaaagcaccaaaaagaaaagaaaaagtaaaaaatataaaaatacacaaaatttataatacatatatatcaaaacaaaaaacaaaaaaacaataaaaaatctaaaaaagttttcgaattcgaaaggaaactaaaaaaataaaacat

SEQ ID NO: 39902 - DNA, 1005 bp, DROSOPHILA
atgcggcgcctggtgcgaaattggaattgccgattgttatttaacgccaaatccggccaagaaattgtcagccatgccggaattcaccaggaggccaagaccaatgcgattcccagggaaaagaaagtgattgaggcggacaagaatggatacggggccaaacattgcatgagtctagtggagaaatacgactacgagaactacctgtgcaccttgctcctaccacgggaactgcgacgtgctgccttcgccctacgggcattcaatgtggaggtctccagatcggttagcggccatcaaattgagccgcaaatagccaaaatgcgccttaagttctggcacgactccatagacaagtgctttgagccggattcccaaagatcgtacgtggaggaccagcctgtcctgcgcgaactgaagcacacggtgggcagtcgcaagctaaataaggtatatttgcgccgtctggtcacagcacgggaacgtccgcccacgcatgcatttgagtcgatacgcgagctggaggagtacacggaacagaccttctcttcgctattgctcctgctgttggaggtgggcggagtgcgtgacctaaatgctgatcatgccgcctcccacttgggcaaggcccaaggcatcgccaccctgctgcgatcgataccgctggcaggacgtcagcaggcgccctgcattccgctcgaggtgctggtgctgcatggcgtcagccaggagcgcatcattcgctctaagagcgacgacaagggtgtcgaggactgtatattcgatgtggccagtgccgccaatacgcacctaaagctcgccaggcagctgcacgataaggtgccgccgcaggtgcgcaagatcttcctctccgccgtggccacggatgcatatttggagcgcctccgccgtgccaacttcctgctaacccacaagagctgcgtaggccgcgacaccttactgccagcacgtttattctggaagtcgctgcttaatcggttctga

SEQ ID NO: 39903 - protein, 334 aa, DROSOPHILA
MRRLVRNWNCRLLFNAKSGQEIVSHAGIHQEAKTNAIPREKKVIEADKNGYGAKHCMSLVEKYDYENYLCTLLLPRELRRAAFALRAFNVEVSRSVSGHQIEPQIAKMRLKFWHDSIDKCFEPDSQRSYVEDQPVLRELKHTVGSRKLNKVYLRRLVTARERPPTHAFESIRELEEYTEQTFSSLLLLLLEVGGVRDLNADHAASHLGKAQGIATLLRSIPLAGRQQAPCIPLEVLVLHGVSQERIIRSKSDDKGVEDCIFDVASAANTHLKLARQLHDKVPPQVRKIFLSAVATDAYLERLRRANFLLTHKSCVGRDTLLPARLFWKSLLNRF

SEQ ID NO: 39904 - DNA, 3629 bp, DROSOPHILA
ctgcttgctagctatcacaatgctagctgggcccactccagctcccgggcccaccactgttccgcctgctcctcctgtcgtctgctggcgatgaccaactccgcgtcgtttgttggccgccgccgtggccgccagcatcatggagctgccatcgccgagggatccagtgcccgctcctggtggctggcgtccgtcgaagatctcgtggccatcggcctcagcccgctgctgcgaatgctcggcgcccatttatcgatccgattcctgtcgattccgactccaagttccgcgtactcctggcccgaattttgtggttagctggcgctgtcactgttgctgtcctgggcccacctgctgcttcatttccagtggcccaagccagtcgatttacacctcaaaacaaatcgatgccaaagcctcaaatcgaatcgcaacaaagtctcattcaggacctaaaaatttcccagctgccagctgaaatgcgctagtgcgtttttcggtattaaagtacagataacgagctgtttccactgcacgcttgatgtcagctttcaaatagtaggggggtttacatattcattgaaattcggcttttcttaaaaaaaaaaaaaaacgaatataataaaagtgaaactttactaaataaatcataaaactataagctagtgatattgaaattattacaaaatgttcatattaaatagttgtatattgaaagcttcggttaggtattttaaatacagaaatactaattctttggttttaagatctagacatggagtttaaatttgaagccatagcttataacttttaatttcctatcatttcctagactttctgttgataattttaaatataaacactataacttttgtttgcaagctcttctaatttcgttgtctattgttttgaaatcgagctccacttggactgtataagtagggggatgtcgttggggttcagataagaccaggcgataagtggagagccctctcttccaatgcttccgtataagttcaccagtgttttggtggccgtcgtcgtcgttctgccgtttgaggtgctaattctcagcatgggatatagattctgttttggttttggttttggtttcgatttcagctcgagcaatattcagcaaagtcagttggctgacgaccgtgatcgcgatagcaacactttcactcaccagaacggattgcaatggtgagcagggaacagggctttgctggaataatcttatcgaggtgcaccatcgatccccctgcctatttgttttttaagtctacgcatatactattattattattttctgggactgccatttacaattttcctatattttatacaaaagtttaactaatgttggtctaggtcacgaattacaacgctaaagatgttttgtcaccaaaaatggaatttttcttttaatgctagaagttttaaaaagtgctatagataaatttcattttttgtacaaagcgccgaacttgttaagaattatatagtttttaaaaaaaatccattactagttttttgagtttaattattgaattaaatttgaattttcaattacaaccttaggccaaaccccagcacattttgcagctaagccaggagcagcggagcagcgttgtcgactctttcgaccgggtggtcagcgacatcgatggcgtcctgtggacctttgagcagagcattccgcgtgccgccgacggatatgccgctctcgagcagatgggcaagcatctgaccttcctgaccaacaacagcgttcgcacgtccgagcagtgcgtcaaactcttcgccaagatcgggatgcaggtgcacccggagcagatttggcatccggccaagtccatcgttagctatctgcagagcatcaagttcgagggactcatctacatcatcgccagccagtcgttcaagacggtgttgcgcgaggcgggattccagctcctggacggggtgagtggtaaataagttgggtgaagagtggtgctggttttcagtgctcctgaatttgaacaatccaataacctatctatgcatagttaaactatatttgatataccaactctgcctgtagcccaacgagttcatcgaggagagctacgccagcctggccgagcacatctttggcaaggagcccgtgcgcgccgtcatcatcgacgtggacttcaatctgacttccccgaagattctgcgcgcccacctgtacctgcgccatccggagtgtatgctcattgaaggcgccaccgatcgcctgctaccggtggccaaggaagtgaacatcgtaggtccgggagccttcgcctccatcctcgtggaggccagtggcaagcagccgattacgttgggcaagcctggccgcgagttgggtgatctgcttgtcgagcattaccaaatcgttcagcccagtcgggtgctcatgatcggagatatgttggcccaggacgttagctttggacgccagtgcggattccaaacgctgctcgtgctcagcggcggatgcagcaaggaggagctcctggccgagacggatccgcagcgcataccggactactatgcggacagcgtggccgatgtggcccagatgctgggcgaggcgcccaagtcgcgtgtctagacggcgtccggcggaggagatcgaaaaacgatatatccattggctatagctgtacctgggtacctgggtagctgatatagtgtcgtattcctaaccagatcacattctgtctgcgaaatttgaatcatagtaagcaaacagagttgacgaacttgggagttccaggaaaacaaaaccactgcaaccatttggtcgtaaaagatccatagatgtacagtgcatataaacaaataaacaatatatatgtatatagtctagctgaaacaatgcactatattttattagctaaaatatatgtacacaattactaatgacattagagacaagcgatcgaactttgggataccccgcaattcacagtgtaaagagatttaaggttgtgaacaaataaaaagtttagttttatttataaatttcgccaaaaaaaatatagatttaatgccttttaaaaaacaaaaaagagatgcaagttaattgaaacttttgcactaattatagtagataatgtctagattatagggtattcctcacttccaaagtcaaggaacacattgtgcagtgagtaatcggagtcactttgggtttccgcctattaccaacaaacaaacttggttaaaaatcagcagataagattgacaaatacttgaacactatcatcacaccgaatgcgccgagtcagagttactcgatgccggattattattgattgctatctggcccaggcaatcggccagatagtcgggcatctgggaatggtcaatcggcagtcgctggacatcctccagctttgtgccgccggtaaggacgaggagcgtctggtagccactggcgcgagcgaatccaatatcgctggccaggctatcgcccacgaagagcacgcggctgggcggaatttcccgatggcgttccagtagaagcttgcgcagatcctcgcccggtttgcccaaggttatgggctgacggccaacggcctgggtcaccacgtcgataaaggctccag

SEQ ID NO: 39905 - DNA, 984 bp, DROSOPHILA
atgcttccgtataagttcaccagtgttttggtggccgtcgtcgtcgttctgccgtttgaggccaaaccccagcacattttgcagctaagccaggagcagcggagcagcgttgtcgactctttcgaccgggtggtcagcgacatcgatggcgtcctgtggacctttgagcagagcattccgcgtgccgccgacggatatgccgctctcgagcagatgggcaagcatctgaccttcctgaccaacaacagcgttcgcacgtccgagcagtgcgtcaaactcttcgccaagatcgggatgcaggtgcacccggagcagatttggcatccggccaagtccatcgttagctatctgcagagcatcaagttcgagggactcatctacatcatcgccagccagtcgttcaagacggtgttgcgcgaggcgggattccagctcctggacgggcccaacgagttcatcgaggagagctacgccagcctggccgagcacatctttggcaaggagcccgtgcgcgccgtcatcatcgacgtggacttcaatctgacttccccgaagattctgcgcgcccacctgtacctgcgccatccggagtgtatgctcattgaaggcgccaccgatcgcctgctaccggtggccaaggaagtgaacatcgtaggtccgggagccttcgcctccatcctcgtggaggccagtggcaagcagccgattacgttgggcaagcctggccgcgagttgggtgatctgcttgtcgagcattaccaaatcgttcagcccagtcgggtgctcatgatcggagatatgttggcccaggacgttagctttggacgccagtgcggattccaaacgctgctcgtgctcagcggcggatgcagcaaggaggagctcctggccgagacggatccgcagcgcataccggactactatgcggacagcgtggccgatgtggcccagatgctgggcgaggcgcccaagtcgcgtgtctag

SEQ ID NO: 39906 - protein, 327 aa, DROSOPHILA
MLPYKFTSVLVAVVVVLPFEAKPQHILQLSQEQRSSVVDSFDRVVSDIDGVLWTFEQSIPRAADGYAALEQMGKHLTFLTNNSVRTSEQCVKLFAKIGMQVHPEQIWHPAKSIVSYLQSIKFEGLIYIIASQSFKTVLREAGFQLLDGPNEFIEESYASLAEHIFGKEPVRAVIIDVDFNLTSPKILRAHLYLRHPECMLIEGATDRLLPVAKEVNIVGPGAFASILVEASGKQPITLGKPGRELGDLLVEHYQIVQPSRVLMIGDMLAQDVSFGRQCGFQTLLVLSGGCSKEELLAETDPQRIPDYYADSVADVAQMLGEAPKSRV

SEQ ID NO: 39907 - DNA, 5215 bp, DROSOPHILA
taatgatattattcacaatggtgacaacattttcctaataactttaaatgagttacttgcaaaatcatgtggtttatttttgaaggggtggagcctacgatatttcgtattgagtaaggtgcgaataattgtcatcgtagcacgaataaactgaaaaatggaacgtgtaggccacaaatccggtctggcctttcactattagccgcttactaagagcggaagcaaacaaataaataaaaacccgtcaaaagccaaatgaaaatgaaaccacaaaatccacgaaggtcacgcggagagagttttgttttgggttttgggtttgggattggggaagacacgcctttgggatgaataatttcggatcagagacatcgtctaaattatagtggcaatcatagagatgccaaagcatttgttcacatggctgtttcaaagtaataataatagatgctagttacttgaactaatgattccaagctaaaaaaaattcaatgcaaatgatccattaagttgctactatagatctttgattattcaagtccatattgaatactgagtattgagtttgtaatcgaaaccaatttgaaacgtataaaactcaaaatgcacaaccccgtttttgttggccataaaaatctcaaggttcccaactccaattttcgattagcccaatccaacgaaattaaacagtcaaattatttacatattttacgtaagtataaatttattaggtaagaaattcgtatcggttgttattgcatgcaaatgatttgatttcgaatgccaatgatttggctatttggaatcgcttgtttttgtgcacagaaatttcatgcgaaatgagttggaaacattgacaacagaattggaacgcaaactaaaatgcacaacaaaaaaaaaaaatatatatatatatagaaagaaatatatagcagtgcagtgcagacgctggatgatgagatagatattaacaactaatcagtgctgggaatccaatcctctacagactggccacgggatgcagacgcagtggcttcgacgcctgccgcacaattcgcgacctgggacgcgccggtggcaagtacgcattgctctgtggctgcgactgtggcagcaatcgcaatggctgctgcacatcgtcgtagatcttaacggtctgcacatgactctccgcaccactgtgcgcattctgtgtgaccaccttgaccacctgatggcgtccctgcggctgctcattgctcgctcccagaattttgatcgtcttcacaccagcctgatcgagttgctccagcaccttgaaggtccgtgtggaatgtggcttcactatttgcacggtgcgcacacgggagctgccacgcagtgcgggtggtgccacgacgggtgccgttgccgccatggccacatttaccgccacctgaacgtccttgggcatgaatttctgcagcgattgctgcgccttaaagcttaacgtgggctgcagcttttgctggctctgcaccacgcggtggtagtggtggtgcaggtggtgctgtgcctgctgctggcggggcacagcgttgcttacgtaggcgggggcatagaatcgaggacgctttgattgctcacggtacatgggcgccacctcgatcacctgttgctgctgctggacatgatgatgttgctgctgctggacatgatgatactgctgctgctggcgtagagtgactggctgtgcatagcgtgcgaagggctgcacggtgttcatatagcttctcagcgagtgaatgtgcgtcacctgggtgggcgctggagctggcagagaaatggcaatgggagcgggtccactcacgtggatgggagcgcgaggagcggcagcgggcgctggcgctgcagcaggagcaacagctcgaacgggagcggaagcaggagcagcaactcgcagaggagctggagcaggagctggagccggagctggaaccggagcagcaactcggacagaagcaggagcggccactgctggtggcagatagccagaagccctgtattgctgttgataggcacttgaagtggctgtcgtctggactacggcaacaggggctggagctggagctggagcaggggcaggagcaaccaggggagcaggagctgcaatggaaacgggagcaggagccgcaactggcgatggagctggggcggtggcagttggaggcaggtaagcaggagccgtaaactgttgctgatagctgccggcagtagatgttgcaagtgtactttgaggagccaaagcttgttgctgctgcgacttggagcgaccatagacgatgtctgcgttttgctgttgctgggcaacctgcaactgagactgcaccacgatctgttgctgctgctgctgcagctgttgctgttgctgctgctgctgcagctgttgctgttgctgctgctgctgttgcaagagcaactgctgctgctcctgctgttgcttcagcagtttggtttgagtctgcaggctgtgcagctcggcaatggcggcctcggcattttcgggcttaacgaaatcatagccatcgggaagggcaccaggattgctaatggttgcctgtgtaggagcagcatacacctgttgctgctgtacctgttgctgctgcacttgttgctgctgcacctgttgctgctgcaactgttgctgctgcacttgttgctgctgcacctgttgctgctgcacttgttgctgctgcacttgttgctgctgcaactcttgctgctgcagctgttgctgtggctgctggtacgtgatctgagttggtgcctgaggacgtggttcatcgtagccaggtggcagatagccaggagcacgatactcgccggcagactgctgcacggatgcaacactctgtgcggtggcaacattttgaacggacgacacactctgcgaggtggcgacactctggctgagcgaaacgggcaactgatcgggattggagaactcgtagccaggtggcagatagccaggagcacggtattcctgaccctgttcctgaactgaaatctgctgctgttgctgctgctgaacggattgaatctgctgcacttgctgctgctgctgttgcacctcttgaacttgctgcacctgctgctgctgttcctgctgtggtggcagatatgttggtccttggaagaccttctgttgctgctgatagctgatggtagttggtagctggtagttggacactggctgagcaactgcctcgctggtggtgggtggcagatatgctggtgcctcgtagttctgttggctgtactgctgttgcacctgttgctgctgcaccacttgctgttgctgctgcggaatcacttgctgctgcaccacttgctgttgctgctgctgcacatactcctgttgctgctgaatcacttgctgctgctgttgctgctgctgctggacattgggtgcggcagccgtgggtggtagataggcctgaccactgtaacccaacgaggatgtagccggagctttgcgctggaaatcatgctggtagttcgaagggaagggcacgggaatagacgcaggagctgctgcaggagcagctgcagccggagtggcaactggcgctgtagctggcgcatcgggaaagttaaggaagctcaagtccaagctatcatcgttggcatgaccacttgcaccctgaccctgaggcggcagataggcgggtcccttggccgcaaaatgattgtgcacctcaaagatctgatagccggaattgccgtagttgctctcctggaagccaccgccggtcttgtagtattgctccttggtgatcagcggctgttgttgctgctgctgcagttgctgctgctgctgttgctgtcgcaacttgagcgatatatccgcttgggttaatccgcatagtgcacagatggcgagcgcaatgaaggcgccaaagaacttcaccgagaacgaatcgtaaaaaaacacaaaacaaatactttgagtcacagaaaaaaaaaagaacttatgtatattatcactgtcatatggatggatgaattagatgaatgaatgtaaatggatccttggctgaatggtaatccttagccatgggcaagtgccctgcttacattcatcttcacagtggtcgtgcttgagccctcgatgtccaaccgatcaatgatgcccccaatgacccagccacgcgttttatacaagggccattcgaaaactagtcggcgcatcttcattcacatcgatcgacatcttcatctctccatctccgcatcattttgcccccactgcttgtcgaaccaagcgagccaagctccaaactccaagctgcccagtggtcagtggacagagggggacctttcattagtttggggctagttaccatgggatgctgcgcaacattttcggatagttgcgctgtggccgctcgttcgcatttcgctcggatattcagattccgcttatgatgttatcgtcgctcagctacacgcagaaaaatgtatagttcgtacatatgtatattggcaaaaaaaaaaacaaagggggttaaagggtagtccctcaattataatcttcttaaaaatgtaaacaagttacttggagtaagctaacttcgaactgagaatggttcgatctcgatctgagtgtaattcgatttcttggctagattttgagaacgaaattcaaattcaaatcgagatcgctgagtacgattttttcttttccaacttacttcagtttctcgcagtgcatgccaactaattcccgaagccgtgtgctttcgggcggatgtaactaatacgcctgccgccaaaacgcctcggatatgggacatcagtcatcggtgcgtcagtgcgttctccgtccggattgcgcaatcctccggctcgttatcgtctgccttggatttcctgttattagctatttagctctgcatttgcatcggtctcggatacggatacggactcgaattcggattcagatacgcgtttcgcaaaatgcttgctaaaatatttggctgccattgccaaaaattattacacctgtcattagcaatgcgtgtcggctgatttcgttgggttttcattttcatttttatttcgattttgatttgtatttttttttttcgagggcctatgaattaaacattaaacattgataagcatgtcgcctcacctctgtcgcgaataaagtttcaaaaaataataccacctgctaaccacgatatattcgtag

SEQ ID NO: 39908 - DNA, 3042 bp, DROSOPHILA
atgaagatgcgccgactagttttcgaatggcccttgtataaaacgcgtggctgggtcattgggggcatcattgatcggttggacatcgagggctcaagcacgaccactgtgaagatgaatttctttggcgccttcattgcgctcgccatctgtgcactatgcggattaacccaagcggatatatcgctcaagttgcgacagcaacagcagcagcagcaactgcagcagcagcaacaacagccgctgatcaccaaggagcaatactacaagaccggcggtggcttccaggagagcaactacggcaattccggctatcagatctttgaggtgcacaatcattttgcggccaagggacccgcctatctgccgcctcagggtcagggtgcaagtggtcatgccaacgatgatagcttggacttgagcttccttaactttcccgatgcgccagctacagcgccagttgccactccggctgcagctgctcctgcagcagctcctgcgtctattcccgtgcccttcccttcgaactaccagcatgatttccagcgcaaagctccggctacatcctcgttgggttacagtggtcaggcctatctaccacccacggctgccgcacccaatgtccagcagcagcagcaacagcagcagcaagtgattcagcagcaacaggagtatgtgcagcagcagcaacagcaagtggtgcagcagcaagtgattccgcagcagcaacagcaagtggtgcagcagcaacaggtgcaacagcagtacagccaacagaactacgaggcaccagcatatctgccacccaccaccagcgaggcagttgctcagccagtgtccaactaccagctaccaactaccatcagctatcagcagcaacagaaggtcttccaaggaccaacatatctgccaccacagcaggaacagcagcagcaggtgcagcaagttcaagaggtgcaacagcagcagcagcaagtgcagcagattcaatccgttcagcagcagcaacagcagcagatttcagttcaggaacagggtcaggaataccgtgctcctggctatctgccacctggctacgagttctccaatcccgatcagttgcccgtttcgctcagccagagtgtcgccacctcgcagagtgtgtcgtccgttcaaaatgttgccaccgcacagagtgttgcatccgtgcagcagtctgccggcgagtatcgtgctcctggctatctgccacctggctacgatgaaccacgtcctcaggcaccaactcagatcacgtaccagcagccacagcaacagctgcagcagcaagagttgcagcagcaacaagtgcagcagcaacaagtgcagcagcaacaggtgcagcagcaacaagtgcagcagcaacagttgcagcagcaacaggtgcagcagcaacaagtgcagcagcaacaggtacagcagcaacaggtgtatgctgctcctacacaggcaaccattagcaatcctggtgcccttcccgatggctatgatttcgttaagcccgaaaatgccgaggccgccattgccgagctgcacagcctgcagactcaaaccaaactgctgaagcaacagcaggagcagcagcagttgctcttgcaacagcagcagcagcaacagcaacagctgcagcagcagcagcaacagcaacagctgcagcagcagcagcaacagatcgtggtgcagtctcagttgcaggttgcccagcaacagcaaaacgcagacatcgtctatggtcgctccaagtcgcagcagcaacaagctttggctcctcaaagtacacttgcaacatctactgccggcagctatcagcaacagtttacggctcctgcttacctgcctccaactgccaccgccccagctccatcgccagttgcggctcctgctcccgtttccattgcagctcctgctcccctggttgctcctgcccctgctccagctccagctccagcccctgttgccgtagtccagacgacagccacttcaagtgcctatcaacagcaatacagggcttctggctatctgccaccagcagtggccgctcctgcttctgtccgagttgctgctccggttccagctccggctccagctcctgctccagctcctctgcgagttgctgctcctgcttccgctcccgttcgagctgttgctcctgctgcagcgccagcgcccgctgccgctcctcgcgctcccatccacgtgagtggacccgctcccattgccatttctctgccagctccagcgcccacccaggtgacgcacattcactcgctgagaagctatatgaacaccgtgcagcccttcgcacgctatgcacagccagtcactctacgccagcagcagcagtatcatcatgtccagcagcagcaacatcatcatgtccagcagcagcaacaggtgatcgaggtggcgcccatgtaccgtgagcaatcaaagcgtcctcgattctatgcccccgcctacgtaagcaacgctgtgccccgccagcagcaggcacagcaccacctgcaccaccactaccaccgcgtggtgcagagccagcaaaagctgcagcccacgttaagctttaaggcgcagcaatcgctgcagaaattcatgcccaaggacgttcaggtggcggtaaatgtggccatggcggcaacggcacccgtcgtggcaccacccgcactgcgtggcagctcccgtgtgcgcaccgtgcaaatagtgaagccacattccacacggaccttcaaggtgctggagcaactcgatcaggctggtgtgaagacgatcaaaattctgggagcgagcaatgagcagccgcagggacgccatcaggtggtcaaggtggtcacacagaatgcgcacagtggtgcggagagtcatgtgcagaccgttaagatctacgacgatgtgcagcagccattgcgattgctgccacagtcgcagccacagagcaatgcgtacttgccaccggcgcgtcccaggtcgcgaattgtgcggcaggcgtcgaagccactgcgtctgcatcccgtggccagtctgtag

SEQ ID NO: 39909 - protein, 1013 aa, DROSOPHILA
MKMRRLVFEWPLYKTRGWVIGGIIDRLDIEGSSTTTVKMNFFGAFIALAICALCGLTQADISLKLRQQQQQQQLQQQQQQPLITKEQYYKTGGGFQESNYGNSGYQIFEVHNHFAAKGPAYLPPQGQGASGHANDDSLDLSFLNFPDAPATAPVATPAAAAPAAAPASIPVPFPSNYQHDFQRKAPATSSLGYSGQAYLPPTAAAPNVQQQQQQQQQVIQQQQEYVQQQQQQVVQQQVIPQQQQQVVQQQQVQQQYSQQNYEAPAYLPPTTSEAVAQPVSNYQLPTTISYQQQQKVFQGPTYLPPQQEQQQQVQQVQEVQQQQQQVQQIQSVQQQQQQQISVQEQGQEYRAPGYLPPGYEFSNPDQLPVSLSQSVATSQSVSSVQNVATAQSVASVQQSAGEYRAPGYLPPGYDEPRPQAPTQITYQQPQQQLQQQELQQQQVQQQQVQQQQVQQQQVQQQQLQQQQVQQQQVQQQQVQQQQVYAAPTQATISNPGALPDGYDFVKPENAEAAIAELHSLQTQTKLLKQQQEQQQLLLQQQQQQQQQLQQQQQQQQLQQQQQQIVVQSQLQVAQQQQNADIVYGRSKSQQQQALAPQSTLATSTAGSYQQQFTAPAYLPPTATAPAPSPVAAPAPVSIAAPAPLVAPAPAPAPAPAPVAVVQTTATSSAYQQQYRASGYLPPAVAAPASVRVAAPVPAPAPAPAPAPLRVAAPASAPVRAVAPAAAPAPAAAPRAPIHVSGPAPIAISLPAPAPTQVTHIHSLRSYMNTVQPFARYAQPVTLRQQQQYHHVQQQQHHHVQQQQQVIEVAPMYREQSKRPRFYAPAYVSNAVPRQQQAQHHLHHHYHRVVQSQQKLQPTLSFKAQQSLQKFMPKDVQVAVNVAMAATAPVVAPPALRGSSRVRTVQIVKPHSTRTFKVLEQLDQAGVKTIKILGASNEQPQGRHQVVKVVTQNAHSGAESHVQTVKIYDDVQQPLRLLPQSQPQSNAYLPPARPRSRIVRQASKPLRLHPVASL

SEQ ID NO: 39910 - DNA, 1585 bp, DROSOPHILA
ggggggggggggggtgggattggtggttggttgctccgtatttaccctggccaaatatacgtttaatcttcgggcggttggatgctcgttagatgccatggataggggtgctataaaagcctggttagaatagagataaaggcacagttccaagtaccactgccccaaagccgcaagatgcgattcctctgcgtactgatcctcgccagcctcctggcagtggctagttcaacttcatctacttcacctgcttcatctacttcacctgcttcatctacttcacctacttcgtccacttctccaacttcgtccacttctccaacttcgtccacttctccaacttcgtcgtcgtcgagttcctcatcatccacggcgaccaccactacaacgacagttgctcccacgaccaccaccaccacggaggcgtccagttcatcatcgtcgagcgataagaaagttcggcacacgaggcactacgtcaaccggcgtcacaggaaggacaagaagaccaccaagagcaagaaaaagaacagcaagaaaaacaagaaaaccaagaaagtccgacgcacccgtcgcagtggttaaatattttcttcctttcgaaatcgaaatcaacccaccgatcgcagaaaaaactatgattgcatcacatcgtaatatatctttttttttaatcaaataaagtaattgaaaaatattgaaaaatacatttgctgtttcgaaatgaagttattttaagtgaatatataataatattatatatataaaatccttgcagagaaaaacgataattgctgagttttttttttttagtttatgcatttattatattatatggtggaatcaattctagaatcgacctctcaaatgaattctatgacactttcggttatacaaatgaattaaaaaagatagatttttttttttttgtggtttttgtcttataggcttttttttgttttgtttgattttcgattaactaaggggaaaacatgcgacgacatgaaatgaacatcgtaataagatgcccacataaacgtagatatatgtatatactcatatatttaggtatgggttttaagtaaatgttctgccaatttgcgtatctatatgtctatatatatatatatataaatatatatatatatatgtatgtgtatatatgcgaaatcatatccgtagacttagatggctaaaatttgttgctgaaaatcgaaacataaagtgaagacgacagttgcaagtataaaaaatatttgtatgcttctcgtttctccttccacaaaacctttaattctcctctctccaatattttgttatataaaatgttcaattttcaatatccacaacctcaacctggccagcagtatgcgtgtgtgtgtgtgtgtgtgtatgtattttgtatctatgttttgatttcagcgacctcagttttatatctttaccctttttttcttatttaggtggaaacaggaagcggcaacaagagcaaattctcattgcttatctgcgattgatttttgattatttgtgtgatgggaatcttcttagtatgctcatctataatatataaatgtgtagatca

SEQ ID NO: 39911 - DNA, 408 bp, DROSOPHILA
atgcgattcctctgcgtactgatcctcgccagcctcctggcagtggctagttcaacttcatctacttcacctgcttcatctacttcacctgcttcatctacttcacctacttcgtccacttctccaacttcgtccacttctccaacttcgtccacttctccaacttcgtcgtcgtcgagttcctcatcatccacggcgaccaccactacaacgacagttgctcccacgaccaccaccaccacggaggcgtccagttcatcatcgtcgagcgataagaaagttcggcacacgaggcactacgtcaaccggcgtcacaggaaggacaagaagaccaccaagagcaagaaaaagaacagcaagaaaaacaagaaaaccaagaaagtccgacgcacccgtcgcagtggttaa

SEQ ID NO: 39912 - protein, 135 aa, DROSOPHILA
MRFLCVLILASLLAVASSTSSTSPASSTSPASSTSPTSSTSPTSSTSPTSSTSPTSSSSSSSSSTATTTTTTVAPTTTTTTEASSSSSSSDKKVRHTRHYVNRRHRKDKKTTKSKKKNSKKNKKTKKVRRTRRSG

SEQ ID NO: 39913 - DNA, 3597 bp, DROSOPHILA
ttccggccaatgggacagtggagcggggccaggcaatcagtgggactagtgggcaaagttgttggcaaactatatagagttttagccttttagatttttatgataataatctcgatatctgaataagaagtaaacttagatatgaagtgtagtaggaatattccatacttgaggaatatacataccatatatatgcgcacaatctacggtaccacagtgcgtggtcaggtggcgcagcataatgaggcgctgctcagtggtcagtggtcagtgggtgaggggtcttcgattgcggcaggtgaaatggcagcgtaaaagtcataaactgcccaatccatgccgtatgccatgccgatgagccgctgacggtggtgcattgctagcaccaccagtgccaccgattggtatgcacagtgggtatgtgccactccactgtgccgcgatgtccgctttataaatacaacagcgaccaaggaagttcatttcattttcttgtcggcgatcgcagcaaacggattaaacgcgaggcgaggcgatatattacatagtgtccaaatatacgcatatagaaatcaagtccactgaatcgaaatgaatctcttggccagttcgaggagcctccatcttctgatggtcttggctgtcatcttggtttctcatcgagctgaggcgggcttacgtttgcgtcacaccagtcgatcggtcacgccccccgccagcacaacgcccactttgacagtgacctccgaggatgccccgctacaagaggaatcggtggcggagagtgccccaacggccagtgtggttaccgaaccggaaacggaagtggaggtcacgaccggaaagcacaagcgtggcattctacacggccacgcccacctgcacggccaatggcccgcccgcacctatgccgcccactacggctatagcctgcagctgccaggaggcagtgccttcctggccgccgctcctccgcgccgccacttcgtcaaatacggccatggtctggtcaagccgctcgtttccggttccggtttgctgcccgccttagctcccgcacccgctgccctgctgcccgccgtcgcctcagccctgcccgttggattgcccaccggtctgcccggtggcgtggccagtgccattcccgccggagtcgctactgccttgtccaccggcgtggccaccgctttgtccaccgccgtggctccgccctcgtacgtcctgcgtcccggaaatgcggtcgtctcctcgtacagcgtcaactatccgcaccagcacctgcagaagcccgtggtctttcagtccgccgtaaagcctgtccacttccatgctccggctcatggccatgtgcatgccgtgcaggtgagttagctacataggaaacttgtggaatatcccgttgaccatttcattcttttctgttgcagcccacttatgtgcagacctatgctccgactgctccggcagtgcctgttcagcccgtgcagccagtgcagccagttcatcatctccagcccattcagccccttcaaccggtgcaaccggtgaccacccatctgcagccagttagcccaatccaaccggttcagccccttcaaccggttcaacccatccaacctacagtgaccttcggtgttccgtctcccccagctgtggatttgccggtgatccctcagttcccacaaccgcctcagttccccggtgtgccgacctttagcttccagcccgctcagccagcggtgccagcccaacccgctgtgcccgcccagccggcagttccagctgcaccagaagccccagaagtgccacaggttcccgccattccacagattccggccataccgcagataccccaaataccacaatttcccggattccctcaatttcccggctttccccagattccccagttcccccaggcgccagccattccatcacctccctccgttccaggagttccagctgtacccacggtcccggccttccccagtccaccaactagccaattctttccggctgctccacagccaccattgccgcagcagccacccacttttggccaaccagagtcgcaattccccggcggaattgtaccgctgccgggctccactcccgtccgccctgaatccggcacgggtatagcctcgccgcagattcccccacaatcacccgagccggagacgccgtcggaggtgccaccacagcggccatccgtccagcagccctggaagccggtattctatagtccacccaccgaatccgcgccagcgtcgccgaatcgaccctcgatcaccctgctcccgccatacggaagtgcgccagctgaaggtgagctcagatgacgttatggatatatattattatgctatatttcaaacgaatattttccaggttacctgccacccgtgggatcccaaccgtcggccctgagtgccagtagtgccggaatcggtggtcagggcggcatctttgaccagctgaccgatgccgagctggagcacattttcgcccaggccaacttggcgcagcagcagcaccagcagcagcagcagcagcagcaacagcagcaacagggccacaactaccaccactactgagtccaccactcactccacctagggatcttttcaaatttttttttgttttttttttttaagccttcgttcatttgtgctctacttgtattgtaaattatgttgctattaaataagttatttatcgaaaaattgaacagatcgtttatttattgcgtaataataataaatataataaataatttaaataactaattctattgcaaagtatatgcgagatatagacataatatcttagtttatttccttttggcacatacatattatctatttgaatttcattaggaaattccctttggctcggcgcattttcatttcctgagcttttccggcgcgcgcttttcccccaaagggcttttcaccttgaacttggcgttcgttggtttctttggagcttttcccgttcagcttttcattcataaattgccagccggcgcgctgaatgagtgcgttgtgtgcttggttgggtgaaaagtgggcggttgggcggtcggctgggcggcgccagtgggcggggcacctggaaaggccgcatgccacatgttgcaggcattcgctcgcctttttttcagctcagttgtttgttatcgttggcggcgaacgcgcgtctgctgcggaccaaaaatcgactatattccgactatataccgcgcatatatatttttggatccaccgatccgcgatcttacacattgaagtgcggcgaagttttattttgattttgattctttttggtttttttttgttttttttttgtgctgtgcccatcagagtctataattaaatattgtttattgcccgttgagacggtggaagaaaaaaaaagcgaagaactccctggatgtcaatagcgatcatgcgtacgtcccggaataataaacaatacccctttttttgtttgtgtgtatatttatcggtgcagttatagagagatgccagatatcccccgattccaatgtgtataggtttttatctactttattcgcaatgtttgtgtggcatt

SEQ ID NO: 39914 - DNA, 1353 bp, DROSOPHILA
atggtctggtcaagccgctctgccattcccgccggagtcgctactgccttgtccaccggcgtggccaccgctttgtccaccgccgtggctccgccctcgtacgtcctgcgtcccggaaatgcggtcgtctcctcgtacagcgtcaactatccgcaccagcacctgcagaagcccgtggtctttcagtccgccgtaaagcctgtccacttccatgctccggctcatggccatgtgcatgccgtgcagcccacttatgtgcagacctatgctccgactgctccggcagtgcctgttcagcccgtgcagccagtgcagccagttcatcatctccagcccattcagccccttcaaccggtgcaaccggtgaccacccatctgcagccagttagcccaatccaaccggttcagccccttcaaccggttcaacccatccaacctacagtgaccttcggtgttccgtctcccccagctgtggatttgccggtgatccctcagttcccacaaccgcctcagttccccggtgtgccgacctttagcttccagcccgctcagccagcggtgccagcccaacccgctgtgcccgcccagccggcagttccagctgcaccagaagccccagaagtgccacaggttcccgccattccacagattccggccataccgcagataccccaaataccacaatttcccggattccctcaatttcccggctttccccagattccccagttcccccaggcgccagccattccatcacctccctccgttccaggagttccagctgtacccacggtcccggccttccccagtccaccaactagccaattctttccggctgctccacagccaccattgccgcagcagccacccacttttggccaaccagagtcgcaattccccggcggaattgtaccgctgccgggctccactcccgtccgccctgaatccggcacgggtatagcctcgccgcagattcccccacaatcacccgagccggagacgccgtcggaggtgccaccacagcggccatccgtccagcagccctggaagccggtattctatagtccacccaccgaatccgcgccagcgtcgccgaatcgaccctcgatcaccctgctcccgccatacggaagtgcgccagctgaaggttacctgccacccgtgggatcccaaccgtcggccctgagtgccagtagtgccggaatcggtggtcagggcggcatctttgaccagctgaccgatgccgagctggagcacattttcgcccaggccaacttggcgcagcagcagcaccagcagcagcagcagcagcagcaacagcagcaacagggccacaactaccaccactactga

SEQ ID NO: 39915 - protein, 450 aa, DROSOPHILA
MVWSSRSAIPAGVATALSTGVATALSTAVAPPSYVLRPGNAVVSSYSVNYPHQHLQKPVVFQSAVKPVHFHAPAHGHVHAVQPTYVQTYAPTAPAVPVQPVQPVQPVHHLQPIQPLQPVQPVTTHLQPVSPIQPVQPLQPVQPIQPTVTFGVPSPPAVDLPVIPQFPQPPQFPGVPTFSFQPAQPAVPAQPAVPAQPAVPAAPEAPEVPQVPAIPQIPAIPQIPQIPQFPGFPQFPGFPQIPQFPQAPAIPSPPSVPGVPAVPTVPAFPSPPTSQFFPAAPQPPLPQQPPTFGQPESQFPGGIVPLPGSTPVRPESGTGIASPQIPPQSPEPETPSEVPPQRPSVQQPWKPVFYSPPTESAPASPNRPSITLLPPYGSAPAEGYLPPVGSQPSALSASSAGIGGQGGIFDQLTDAELEHIFAQANLAQQQHQQQQQQQQQQQQGHNYHHY

SEQ ID NO: 39916 - DNA, 2612 bp, DROSOPHILA
tcttgctgattttcacggggttgtttagaatttgacaaaaatcaataattataatccaatggaagtactttaatggtcagaaaacgcagctttgtgtgcgaattaacgtttgatatttgtttacagtatcactgaaacagcataactatatatatatatattaatttttgaacgaattgtgaactatatcctttctgaactttcaaggaagatgtgatctaaaattttattcagcacatgcgcctaggaatccagggctggcgaacttgttagtacatccatatgggatttggtttttaaatatacgtttcttttgccaagtttaataactaacgactcgtatttgcatgatttttttttttaataataataattaaatttataaagcaagcggttgattttttaaattggtagagtgctcgagagctctttaatataaaagttgtatatgtataaatattaataaattctcgccgggcttttactaacaaaaaatgtaatcatttaattttttaagattttccggtaagagaagtcttaaattgctaccgcatttataccagaaaattcgtggtccacaataatcgatttatcgataatatccgactgaacgaaaattcaaatctagtgtgcgaggaaatttagagacgaaagtttacgtatttaagcgtccagtagtcattgagttaagtgtagctacctgattcggataattaagtacttttacttttttgggagcacaacaaaattttgttctcgttcttacttttacacagcaaaattttataattttttaaaatttttctgccgggctgttcgacgaagcaaaatcaatttaccagtactacgacggtgagtgacgatgccaatcgctaactttctgtacacacgtatgttaccattccgagaaagtttctagataacaaacacggccattgcagcttacttgtataataaaacacatttctaacacgctttttacacgacaaaccgcggttcgatgtcaaaagttcgatgcaataagatcgaccactgcttgctgggcgcagttcgcggcattaagccgccctatcgctcggtgcgtaatgcccaagacggcgtgattagcaccttcctggacaagtacagtaggcccaattattttgccatccgcttggtgatacccgccgagttgccacccatcgatctggccgaaatacttatggacatgctaaagatgcaaatattgcgccgcaagaattgtatcgcgtcgtccaattgggtcaggatgaaatatatatgtcaatacggcagcaaagccgatgagacgttcatcatgcatgacagtgccatgagaaaactgcagcaggccattgaagagctcaccaatctgctcgatcaactgaagctggcgtatgagcccgtttcctatggacggatagccgtgcaggctcaacagttggataagcgggcccagatatggcagaatttgctcaacggccgcaatgagcagttggagcgccgtttagctcgggacatttcactcccatatcctcctgcaatagatgcccgcatgcgcatttcgaaaagttatcaagttatcaaccatatgcgcacttggcgtttcggctaaggtcagcaaattagaatttggtcgaatttgtttgtatatcaatatggtcactaaagatgctgctgtgatattttaccttgcttttggatatatatacatttctttggatagcatctacctggactgagacgttctactgtcatagtgattctgatgtcgtatgacttctatattaactttaaattaatcgagtgcaacgcatgtcgagattaataaataacatatcaacaacaaaacacaaactttgacttacctccgcgctgcccgaattgcaaacaaagagaatgatgttatccagccctctagtgtagtggaactgcttgtgcgtctgcttgctatatgtttgaccactgcttgcacagcgcacatgtatgttcgaaccatgttcgaaccatgttcgatggtagctcagtagcttagtgtagctcttctgtgcgaagcattttatttttcgtttgcccgtcgaagaaggcgaagcgaagagaaaatatctgccgcttcgaacgcacgctatcaatgtctaattctttacgtaataatcatttttttttttgctgtgtgactgaaacgaagaaatatacgagcaaaagtgaaaaatacgtggactacctgttgatccaaagatctcaacggatttagtgtgtgtgtgtgtgtgtgcgtgcgtgttttttttcggttcattgttttgtttgcaatagtgcaaaggaaaaagtaatcactttgccgtgttcggtgcacgtgcacgaaatatttataaaatatatattaaaaaaaaaaaacataaaattaacgatgttggagctaccgtttaccaccatacggcccaactgccggctaagacagaatcttggtattctgataatcctgcaatgcgttctcacttgctacaatttcaacctagaacagcgattgcccattgtgaagtacggacatccgcattcgcatttcggctactcggtggccacccacactattggcgaggccaatgggcccaacaaga

SEQ ID NO: 39917 - DNA, 612 bp, DROSOPHILA
atgtcaaaagttcgatgcaataagatcgaccactgcttgctgggcgcagttcgcggcattaagccgccctatcgctcggtgcgtaatgcccaagacggcgtgattagcaccttcctggacaagtacagtaggcccaattattttgccatccgcttggtgatacccgccgagttgccacccatcgatctggccgaaatacttatggacatgctaaagatgcaaatattgcgccgcaagaattgtatcgcgtcgtccaattgggtcaggatgaaatatatatgtcaatacggcagcaaagccgatgagacgttcatcatgcatgacagtgccatgagaaaactgcagcaggccattgaagagctcaccaatctgctcgatcaactgaagctggcgtatgagcccgtttcctatggacggatagccgtgcaggctcaacagttggataagcgggcccagatatggcagaatttgctcaacggccgcaatgagcagttggagcgccgtttagctcgggacatttcactcccatatcctcctgcaatagatgcccgcatgcgcatttcgaaaagttatcaagttatcaaccatatgcgcacttggcgtttcggctaa

SEQ ID NO: 39918 - protein, 203 aa, DROSOPHILA
MSKVRCNKIDHCLLGAVRGIKPPYRSVRNAQDGVISTFLDKYSRPNYFAIRLVIPAELPPIDLAEILMDMLKMQILRRKNCIASSNWVRMKYICQYGSKADETFIMHDSAMRKLQQAIEELTNLLDQLKLAYEPVSYGRIAVQAQQLDKRAQIWQNLLNGRNEQLERRLARDISLPYPPAIDARMRISKSYQVINHMRTWRFG

SEQ ID NO: 39919 - DNA, 3144 bp, DROSOPHILA
cgatgacgctgttccttgtcccgtcgcaatgcccgtttcgggattttgggggagctccgtatcttgatgcgtttgcacttgcaccgcctggcccccctctgctgcggtcgacgtcgccgtcgctgtcggcatcagatttgggaagaacaacaacaagagcagcagtaatccgagaagggggaggggcagcggtggattgctggacgatgaaggtggagaatgaaaaggagaaggggggcgatctccacgcccctctttcgtttggccgcccatttggatcgatgcgagtgattacatgccgggcgcaggaagcgcacatttaattaacaattttcgatttaagcaaacgcattataagcaacaacaataatacactgcgcttttttttttagtttatacaaaaaagtggtacgctaaatgtgaccgtcgaactatcgatagataataccgcccggttgtaaaaaaaaatacgcaagctataaaaattgtgcattatactgcactcgtgggatatatcgatagttatgcttggtagctggtgtggttaagtacccggctaattatggagtagaactcgactatttaaaaattcaaattgaaaaagtaaaaaaaattcttattgctaacaaaaagggtaatattctttcaatttttagctattatagtgggtatatagctagtgggtatataaagtacacgttttaggcgtaaagtctagacccatttaatgtcattaggaagggcatgtgttcagtttaaaataagtttattttgagccaactgggcggtttggtttggtccgggttcatgaccccgccgcgccgccgcacaaccaacgtaattatgcaaaaaaaaagaagcacacgcacaaacaaacattgagattacgaaaaacaggtttccttcttttaacttaaagctatttttgaatgctgcctaaacgatgtgggcgaggggatttcctcgggaagggttagaatgtaggggagctgaccagaccctacgccagcttgccattgtgcgcctcgcgatatttggacagcttgtccatgtactcgtcatgctgctccaaggtggccagcaggccctccgtattgactggcgattcctctggtccgtagttaatcaactgatcgttcagcgtggtcattgtgccgcccaatgcgtgcagaatagcatcgccggcgcaaatgtcccacttcttgatcttcgacgtgtgcaaataggcggtggcattgttggccaccacctggagcaccttgtagccagctcccgccgccgtcagcaggctgacattctcgccaaagatgcccctcgccagatccttggcacctgccgtgtgggatcgcgagactgtaatgatgggcgcctgattgtttggcgaatgctgcggatgcagattggataggtactcagacatcgagttgcccacccacgcccacgcggtttgtccattgaacgggctgtggatcacgccaatgatgggccttccggccactgccacgcacaccatggtggtcacgtactcgtatagctcctctgtggattgaaaaatgaaatttagctccagaacatgccattgtataatattaataactaaagaagccatcctcaccggtgaactccttggtggcatccaacggatctacccaaacagtgacatcctgggcatttacggtcacatccggtatctgtgcggtctcgtggaggaccgttggatctagatcatagccgtgtgcctgcttgcagtgctccttgtcctcctcggagaagatttgtacgcggggaaagattcgctgcaggccctgcttcatcacacaatgtgaccggccgtcggcatccgtgaagggatcattgacgccctcgtccgtcttgcccttgctgcgctccttcagctggcgactccgggccacgtccagtacctcgagaccgccacgctgggcggcctgtatggcggctattagcatcttgcgtagattgacgcggctgggattctcactgcgcagcatgccgtagatcgctggccgctcctcctgatggaaattgaggaagtagaccaggacaaaggtcagcaggatggccacaatggtggccggcagccggttgatgcgaatggagcgtccgttcatcttgtcttcgctcatctattatatgctagactatatactatattctattctattctatctatgcgtgtatcagtgtgctgtcgtatttgccagatcaccacattgagatcaacccagatgctgtcttgaaaaaaccctcgcaagaactgaaacgaaaaacacttgatgatggcgcgtcggtgggtgtggacggcgggggcgggggcacaggtgtttctttctgctctttgtggcgaggggggagcacaggtgagctatgctcggtgccgatctattcaatttcacgtccacgttgcgcgttttttcccccaaaaacagccccaaacaaaaccaaacaataacaaactagagctggcattaaatcgataggcgccatcgatacattcggaacagcgaatttatgttaagatcaataattgtgaagatcagcggtattaaattatttagttcacttaatgtactaacattaaacttaggattcgaatatgttgaccacaacgtcgtcgaaaatatcgatacttagctatcattgatactatttacgaaacgatattaccaagtaatatatagtttataccgtccattttcgatacactcaattatattagaaatttgattttgtgcttttatttaggttcactgatataataaaatcaacaagctgcaatattaatcgatgttccaagagacttatcgattttccaattctacgaccgtatcgatagtatcgaacagatatcgatgtggttccagctctaatagtcgtggatttcggaacattaatttgtattttttgcgtcgcgtcgccccagaaagtccaatccaacagcaaatcgcgcgttttccaaagaacaacaaccccgaaaaattcgaaaataataattttcttgttttttttttctgttttcctgcggcaaaaattccaatttttttcgtaacatctaaacaacaacaacaaaaaaagtgcgtgcgcgtgcagaagcgaaaaaaaccgaataaattgtgggcgaatcaa

SEQ ID NO: 39920 - DNA, 1068 bp, DROSOPHILA
atgagcgaagacaagatgaacggacgctccattcgcatcaaccggctgccggccaccattgtggccatcctgctgacctttgtcctggtctacttcctcaatttccatcaggaggagcggccagcgatctacggcatgctgcgcagtgagaatcccagccgcgtcaatctacgcaagatgctaatagccgccatacaggccgcccagcgtggcggtctcgaggtactggacgtggcccggagtcgccagctgaaggagcgcagcaagggcaagacggacgagggcgtcaatgatcccttcacggatgccgacggccggtcacattgtgtgatgaagcagggcctgcagcgaatctttccccgcgtacaaatcttctccgaggaggacaaggagcactgcaagcaggcacacggctatgatctagatccaacggtcctccacgagaccgcacagataccggatgtgaccgtaaatgcccaggatgtcactgtttgggtagatccgttggatgccaccaaggagttcaccgaggagctatacgagtacgtgaccaccatggtgtgcgtggcagtggccggaaggcccatcattggcgtgatccacagcccgttcaatggacaaaccgcgtgggcgtgggtgggcaactcgatgtctgagtacctatccaatctgcatccgcagcattcgccaaacaatcaggcgcccatcattacagtctcgcgatcccacacggcaggtgccaaggatctggcgaggggcatctttggcgagaatgtcagcctgctgacggcggcgggagctggctacaaggtgctccaggtggtggccaacaatgccaccgcctatttgcacacgtcgaagatcaagaagtgggacatttgcgccggcgatgctattctgcacgcattgggcggcacaatgaccacgctgaacgatcagttgattaactacggaccagaggaatcgccagtcaatacggagggcctgctggccaccttggagcagcatgacgagtacatggacaagctgtccaaatatcgcgaggcgcacaatggcaagctggcgtag

SEQ ID NO: 39921 - protein, 355 aa, DROSOPHILA
MSEDKMNGRSIRINRLPATIVAILLTFVLVYFLNFHQEERPAIYGMLRSENPSRVNLRKMLIAAIQAAQRGGLEVLDVARSRQLKERSKGKTDEGVNDPFTDADGRSHCVMKQGLQRIFPRVQIFSEEDKEHCKQAHGYDLDPTVLHETAQIPDVTVNAQDVTVWVDPLDATKEFTEELYEYVTTMVCVAVAGRPIIGVIHSPFNGQTAWAWVGNSMSEYLSNLHPQHSPNNQAPIITVSRSHTAGAKDLARGIFGENVSLLTAAGAGYKVLQVVANNATAYLHTSKIKKWDICAGDAILHALGGTMTTLNDQLINYGPEESPVNTEGLLATLEQHDEYMDKLSKYREAHNGKLA

SEQ ID NO: 39922 - DNA, 7516 bp, DROSOPHILA
tgcattccctgctctgtccaggcatcagcaaaattgtattatcttattatagtttatacacaccatctcttgttattgttacacaattaagattaaacctttgacgctaatcaaactgattgtcgctgaggcgtcgctgctgttactttccagctcattgttattttataggttgtgtaattcaatcagagttggaaagtatcatcgccgtcgacgtccagatagatgatcgccattcctcctccactcacaatccatgacgatgttgaacggatatcattgtattaatatggtaaaattactattatgaattgtatctactttacaagtagtttgttgaatgtgttcactgtctgtcctcgaaataaatgcaacatttgtaatctcttcttaaaaaaaaaatcttaaaatgcatcatttgggaatgaaacgccgggctaactttaagtgaacatttcatttatttataactaaatataaacttagcctacatttaaatgcattttgctttatcagtatttaaaacttatcaaatgagtgtaggacttttgggtggagatttgtgtggtgatttctatgacattgtggatataaatgatcgattgaccatctggttggatgaagttttctccggtgagtgtgagatttgttgatcttttgtggagtaatactagtcataataaatagggagtccttactataattacaagttcagttagctggctaggttttaagtgggcgaaacttaagatataagcccactgcccatatatatacatatatatatatatatacatacatatgcatattggcgagggtcagtgggttgggtacacatcttggtactaaaatactttgggactggcacgtttaatcttttggattgccggccaagcggggttgttgcgggatggtaaggttatacatcttgtgtatatctatatatatatatatctataatctatatacaactaactagggttgggctgagtgagccgagctagctgggaaaggggcgtggctcgttggccgccctgggatcgatgtacgagatcacgctgctctggctgctgtcatcctctatcgtctcgttgagattttcgttgtgggaattgctcagtggcttcgcttccatctccatctccttctcgcgatcgcgctctctttctctttcgaagcgctcgacggcctcctgcttgtttctcaacggactgcggcatttgatggcctcgtacagctcgtcaatggaggtgtcctggtcatgatcgtgatggggatcctgctcggcatcacctaccaccctctcgccacccgtggcggccacgaactcatcgtcgaactcgttcagcacatccacatctgcatcgctggcattcgaggattgatagcagcggaaatcatcggttagtgttagatttagatcgttgtccgcctggggagcatacagtccatggcttcggatgcttatctccgagttttggtagttcagatcgctctcgttcgtcggactgccggaaagcaggcgaccatcgtcctccgtatccaccgtagccgtcggatgatgccccttcagctgactgagattgctgctggagcaggagtaaatctggcgcaactgctgctcctccagggtgctgccctcgttgacggacaactggctggactcttgctggtcaccaaggctatccaatccgggcgcgttcccaccaccgccgccaccaccagccagcatctcactgatattattcagcgacttggactgctgctgctgactgaagcggataaggacactgggaaagtcatcgtccaactgaatgctattactggtggtaacctgcagcgagttggacacgtatatctcatgcttctgcagcagcggctcttcaaggctgacttccggcaagcccaaactattcatggcctccaagctgggctgtttgacgggcgtggaactcatgggttgatgggatgatcctcgatttcgaaacaggctgctcatcccgctagctggtggcagagtattggcatacaatggagcatgttcgtcaagtgaactggcgtcttcctcctccagttcatgctccggttcctccatcgtcgccggcgtctgaccatgctcctcctcctcctcatcctcttcgtcgtcgtccagctcgtgcagcgtttcatccagcagggaaggtgttctagtgcgtccattggctctcagtttgatcacctcatgctgtggtgtcaatgtctccggtatgttggtgtaaatattggcctgcatgatcttcgacgccgacgaggcgctggcaggcacaaagcgcttaaactgcatggaatctccgccggaactcatagcacccatgttgccgtgttccttgggagctccagccatcggtgagccctgattcttgtagtgcagattggtgttatttatcttgctgccgccggccagcattgtcatcgcattgtggtgcctactgtacagctgctccgaactggcatcgctcaggctgtgctggctgtggagctgcatttgcatttgcatctggagctgcatctgcggcattgtctggcgctgcagctcgaagttgttccgcttggccaggcgcttctgcttcttgaagaactttcgggccacgttaatctggttgggattgtagaagatctccgccgaaggtatgagatcgtgactggagccatggagcagagcgttcagactgtgcggtggcaccggtgctccaccggttgagccagaaactccgccagccgctggaccaccgcctgctcctggctgaccgctggtattgttgattatagtaacgccacctgctccgttggcctgaagcagctgctcctgctgactcctcgtttgactcctagtctggctgcgcatgcttctcgaacactggctattcgaacgcgagcccgccgaattgttggcctcgtacaagctgccgggtcccggattcgccttataggccacaatggagttgctaatcattgccgttcctggtccaggcatcatactcgatgggtgtgcacccctcgcctggctgccattgttgtaggtcaccagtttggcgggtatgctgcgtccatctctgccctgcgaccaagcttggcgcgcatcgtttctgctcaggttgtagaagattagcaggaaaatgcccaaaacagaacagcagccggcgaatgatagcacatagagctcctgaccaccattcacgtaggcagcggcggacaaccaggcgccggcatacagaaccagaaaaatgaagtgaccacgcaaatgcgataagttcgagcgttcgaaatcgtctacaatgctgctcaatggattgctcagcgtgctgtactgctcctgcatgtgatcctgctccttgcgaccaccatgattgccagagccgcctccaatcgccgctgtggtggcactaccattcgcatccagccaatccagatcgatgtgctccgttgcctgcgtattgttgtccgaatactgacgattctgctgatgttgcatttgcagttgcaacacattcaccgcctgctgactcagctggtaatagatgcacaatgccaaaatgccgcagaaaatgacaagaatgacggctggcacaagtagtgcattcagtgtggtggaactgtgcaggaaacaatagtcataggttgcgtactccgccagattaacagcactgctaatgccgcagatgagcagcgcaatgccccagcccaccagatagatgccgagaatgggttttcgctctcgctcccgctgcggttccatatcctgacccggacattgtccctgaccggatgttgtcgtcttggtcaatcgcttgtacatgctactcaggctgacacaaacccacagtagtacgcacagtccgagatagtgcatcagcaatcccaatagacggcactgcggctgactggccgtttgatagatgcccaacgagaaggccagcgccagtgcacccagggccaaccaggtgttgaccagagcatgccgctgcactctgttgattcgcactgctcggccgaaaacagcaaaggtcaccgcattgaaggcgcagcaggcgaagagtagaccgcaaccggcgtacacagcagccggtggatgtcggaaacgtgcgcccgactcctcgctacggaaatcattcaaatactggctgcgctgcagcaggccatagtatccggtgcgactgcaactgaacatgaccagagtgcgatgctggtagtgctgttggcaaacgctcgtctcccagcgctgctcatccgcatcccaccaggcgggttgaggcgcactcagtggattgtgatacggatgagctctcagcatcactgtaaccctttgctggtacacatcctcttccggatctagctcgttatcggcccgaaactgcagcgcctcaccatcgctgctgtacgccagtattcctatgatggcagaagacagggattcattgtggcttcctcgcagatttggcaacaatttgccattcctgtgtagcgagatcatcaagcggagacttcggattgtcgttgtagccggcaaagtggttgagctattgccaatcacgctgtatggcagctggattgcggcatcgatatcgccatgctcgtacatgggtatcgtatcgttggcactgttgcattggaagcctcgaggactttgctccaaccaaacgcatgacaggctaacgaaggcatccaaactgatgttaaagaactcgacgaataggttacgctgctgggcaagcgatcctcgccagggtatcatctctgcgggcaacggttccgcctgtgtgctggccaaggccaggcgcatggccgaggattccaccacgtggagcagccgctgcccagttccctgctcggattgtgcggctcgaaagagatgagcgggcaggttaagcaattgcgaaactatgtccatcagcaggtgacttatctcttgctgttgctgcggctgctccagttgatccaagtacttgaccaacgtgcgtgcaatgtactccaaatccatgggatctcgtatgcgattcagctgcgtctgcgcttgcgtaaagttgtgcaaacgtcgtgcaatctccagcgcattctgacccttagtcagcgtaagattcaccttggcgaactgctccagtatgcgtgtcgtctcgctgacgtacacacaactttccgtatccaaatttagccactcacccgatggtccgcactcatgcgaagctcggcgggcttgtgtggcatcgctgggctcctccacgcactcctgcagcacagtctcgcctcgcatcgtcctgggccagtggtaggtgcccttgttcgtgtgcaccacgcgagcttcacagtacagcgtccccttggctaccacatgcagaacgatggcctgcgatagattcgcctgctggctgcgcagcgtacaatcccacatgcctgtgtgattctgggttaggctggcaatgcgcagtatcgattgcagtatgcccgagtccgtggaatggcgagtctctagattcacatcgccgaagactttggtgggatcctgataaataatatcctccgtggagtttttggctcgtatcttctcggaccaaccccagaacacataggcctttgtcggcagatcctcgctctccctgggcacaccaatggcaacgcgtggggcgtggcacttgagctgcagctcatcgccctcaaaggccacctgattctggctgggaattagctcgagcaacggttgcagcagcgtctcacaatggaaatcctttcccacgcgcagtttctttagcggcataccacgaaagttgcccggcgattcgcattttggtggcggctgtagacgcacttcacgactgctcgaccaggcgatcaaccaaattaatccgcaatcgcaggccaagggatttccagacaggtcgctgtaagaagatgatatcactgtttttgccaggattagaatggatatccaacttacagcaacttaagcttgggcatttggtcaaaggtgccctcatagatgtggctaatggcattgccggccagcttcagcttctccaaatgcgccagactatccccgaaggtgtctttgtccagttcggtgagcagattgaacgacaaatccagacgcttgagttccgtaaagtttcgaaaatcctcggcggttatcagtgcaattgaattcttgctggcattgctataaatataagtgagttatttgcattttagaggaaccacagggggcaactatcgaatcacttacatgctgacaatactggtcacatcctctccaaagtccaactcccgccagttggttatctgctgctcatcgcagcgaatcttaaggctgtgtatgttttccgctgtgctccggcagctgcattttcgtgggcacgatgacgctgttccttgtcccgtcgcaatgcccgtttcgggattttgggggagctccgtatcttgatgcgtttgcacttgcaccgcctggcccccctctgctgcggtcgacgtcgccgtcgctgtcggcatcagatttgggaagaacaacaacaagagcagcagtaatccgagaagggggaggggcagcggtggattgctggacgatgaaggtggagaatgaaaaggagaaggggggcgatctccacgcccctctttcgtttggccgcccatttggatcgatgcgagtgattacatgccgggcgcaggaagcgcacatttaattaacaattttcgatttaagcaaacgcattataagcaacaacaataatacactgcgcttttttttttagtttatacaaaaaagtggtacgctaaatgtgaccgtcgaactatcgatagataataccgcccggttgtaaaaaaaaatacgcaagctataaaaattgtgcattatactgcactcgtgggatatatcgatagttatgcttggtagctggtgtggttaagtacccggctaattatggagtagaactcgactatttaaaaattcaaattgaaaaagtaaaaaaaattcttattgctaacaaaaagggtaatattctttcaatttttagctattatagtgggtatatagctagtgggtatataaagtacacgttttaggcgtaaagtctagacccatttaatgtcattaggaagggcatgtgttcagtttaaaataagtttattttgagccaactgggcggtttggtttggtccgggttcatgaccccgccgcgccgccgcacaaccaacgtaattatgcaaaaaaaaagaagcacacgcacaaacaaacattgagattacgaaaaacaggtttccttcttttaacttaaagctatttttgaatgctgcctaaacgatgtgggcgaggggatttcctcgggaagggttagaatgtaggggagctgaccagaccctacgccagcttgccattgtgcgcctcgcgatatttggacagcttgtccatgtactcgtcatgctgctccaaggtggccagcaggccctccgtattgactggcgattcctctggtccgtagttaatcaactg

SEQ ID NO: 39923 - DNA, 5394 bp, DROSOPHILA
atgccgacagcgacggcgacgtcgaccgcagcagaggggggccaggcggtgcaagtgcaaacgcatcaagatacggagctcccccaaaatcccgaaacgggcattgcgacgggacaaggaacagcgtcatcgtgcccacgaaaatgcagctgccggagcacagcggaaaacatacacagccttaagattcgctgcgatgagcagcagataaccaactggcgggagttggactttggagaggatgtgaccagtattgtcagcatcaatgccagcaagaattcaattgcactgataaccgccgaggattttcgaaactttacggaactcaagcgtctggatttgtcgttcaatctgctcaccgaactggacaaagacaccttcggggatagtctggcgcatttggagaagctgaagctggccggcaatgccattagccacatctatgagggcacctttgaccaaatgcccaagcttaagttgctcgacctgtctggaaatcccttggcctgcgattgcggattaatttggttgatcgcctggtcgagcagtcgtgaagtgcgtctacagccgccaccaaaatgcgaatcgccgggcaactttcgtggtatgccgctaaagaaactgcgcgtgggaaaggatttccattgtgagacgctgctgcaaccgttgctcgagctaattcccagccagaatcaggtggcctttgagggcgatgagctgcagctcaagtgccacgccccacgcgttgccattggtgtgcccagggagagcgaggatctgccgacaaaggcctatgtgttctggggttggtccgagaagatacgagccaaaaactccacggaggatattatttatcaggatcccaccaaagtcttcggcgatgtgaatctagagactcgccattccacggactcgggcatactgcaatcgatactgcgcattgccagcctaacccagaatcacacaggcatgtgggattgtacgctgcgcagccagcaggcgaatctatcgcaggccatcgttctgcatgtggtagccaaggggacgctgtactgtgaagctcgcgtggtgcacacgaacaagggcacctaccactggcccaggacgatgcgaggcgagactgtgctgcaggagtgcgtggaggagcccagcgatgccacacaagcccgccgagcttcgcatgagtgcggaccatcgggtgagtggctaaatttggatacggaaagttgtgtgtacgtcagcgagacgacacgcatactggagcagttcgccaaggtgaatcttacgctgactaagggtcagaatgcgctggagattgcacgacgtttgcacaactttacgcaagcgcagacgcagctgaatcgcatacgagatcccatggatttggagtacattgcacgcacgttggtcaagtacttggatcaactggagcagccgcagcaacagcaagagataagtcacctgctgatggacatagtttcgcaattgcttaacctgcccgctcatctctttcgagccgcacaatccgagcagggaactgggcagcggctgctccacgtggtggaatcctcggccatgcgcctggccttggccagcacacaggcggaaccgttgcccgcagagatgataccctggcgaggatcgcttgcccagcagcgtaacctattcgtcgagttctttaacatcagtttggatgccttcgttagcctgtcatgcgtttggttggagcaaagtcctcgaggcttccaatgcaacagtgccaacgatacgatacccatgtacgagcatggcgatatcgatgccgcaatccagctgccatacagcgtgattggcaatagctcaaccactttgccggctacaacgacaatccgaagtctccgcttgatgatctcgctacacaggaatggcaaattgttgccaaatctgcgaggaagccacaatgaatccctgtcttctgccatcataggaatactggcgtacagcagcgatggtgaggcgctgcagtttcgggccgataacgagctagatccggaagaggatgtgtaccagcaaagggttacagtgatgctgagagctcatccgtatcacaatccactgagtgcgcctcaacccgcctggtgggatgcggatgagcagcgctgggagacgagcgtttgccaacagcactaccagcatcgcactctggtcatgttcagttgcagtcgcaccggatactatggcctgctgcagcgcagccagtatttgaatgatttccgtagcgaggagtcgggcgcacgtttccgacatccaccggctgctgtgtacgccggttgcggtctactcttcgcctgctgcgccttcaatgcggtgacctttgctgttttcggccgagcagtgcgaatcaacagagtgcagcggcatgctctggtcaacacctggttggccctgggtgcactggcgctggccttctcgttgggcatctatcaaacggccagtcagccgcagtgccgtctattgggattgctgatgcactatctcggactgtgcgtactactgtgggtttgtgtcagcctgagtagcatgtacaagcgattgaccaagacgacaacatccggtcagggacaatgtccgggtcaggatatggaaccgcagcgggagcgagagcgaaaacccattctcggcatctatctggtgggctggggcattgcgctgctcatctgcggcattagcagtgctgttaatctggcggagtacgcaacctatgactattgtttcctgcacagttccaccacactgaatgcactacttgtgccagccgtcattcttgtcattttctgcggcattttggcattgtgcatctattaccagctgagtcagcaggcggtgaatgtgttgcaactgcaaatgcaacatcagcagaatcgtcagtattcggacaacaatacgcaggcaacggagcacatcgatctggattggctggatgcgaatggtagtgccaccacagcggcgattggaggcggctctggcaatcatggtggtcgcaaggagcaggatcacatgcaggagcagtacagcacgctgagcaatccattgagcagcattgtagacgatttcgaacgctcgaacttatcgcatttgcgtggtcacttcatttttctggttctgtatgccggcgcctggttgtccgccgctgcctacgtgaatggtggtcaggagctctatgtgctatcattcgccggctgctgttctgttttgggcattttcctgctaatcttctacaacctgagcagaaacgatgcgcgccaagcttggtcgcagggcagagatggacgcagcatacccgccaaactggtgacctacaacaatggcagccaggcgaggggtgcacacccatcgagtatgatgcctggaccaggaacggcaatgattagcaactccattgtggcctataaggcgaatccgggacccggcagcttgtacgaggccaacaattcggcgggctcgcgttcgaatagccagtgttcgagaagcatgcgcagccagactaggagtcaaacgaggagtcagcaggagcagctgcttcaggccaacggagcaggtggcgttactataatcaacaataccagcggtcagccaggagcaggcggtggtccagcggctggcggagtttctggctcaaccggtggagcaccggtgccaccgcacagtctgaacgctctgctccatggctccagtcacgatctcataccttcggcggagatcttctacaatcccaaccagattaacgtggcccgaaagttcttcaagaagcagaagcgcctggccaagcggaacaacttcgagctgcagcgccagacaatgccgcagatgcagctccagatgcaaatgcaaatgcagctccacagccagcacagcctgagcgatgccagttcggagcagctgtacagtaggcaccacaatgcgatgacaatgctggccggcggcagcaagataaataacaccaatctgcactacaagaatcagggctcaccgatggctggagctcccaaggaacacggcaacatgggtgctatgagttccggcggagattccatgcagtttaagcgctttgtgcctgccagcgcctcgtcggcgtcgaagatcatgcaggccaatatttacaccaacataccggagacattgacaccacagcatgaggtgatcaaactgagagccaatggacgcactagaacaccttccctgctggatgaaacgctgcacgagctggacgacgacgaagaggatgaggaggaggaggagcatggtcagacgccggcgacgatggaggaaccggagcatgaactggaggaggaagacgccagttcacttgacgaacatgctccattgtatgccaatactctgccaccagctagcgggatgagcagcctgtttcgaaatcgaggatcatcccatcaacccatgagttccacgcccgtcaaacagcccagcttggaggccatgaatagtttgggcttgccggaagtcagccttgaagagccgctgctgcagaagcatgagatatacgtgtccaactcgctgcaggttaccaccagtaatagcattcagttggacgatgactttcccagtgtccttatccgcttcagtcagcagcagcagtccaagtcgctgaataatatcagtgagatgctggctggtggtggcggcggtggtgggaacgcgcccggattggatagccttggtgaccagcaagagtccagccagttgtccgtcaacgagggcagcaccctggaggagcagcagttgcgccagatttactcctgctccagcagcaatctcagtcagctgaaggggcatcatccgacggctacggtggatacggaggacgatggtcgcctgctttccggcagtccgacgaacgagagcgatctgaactaccaaaactcggagataagcatccgaagccatggactgtatgctccccaggcggacaacgatctaaatctaacactaaccgatgatttccgctgctatcaatcctcgaatgccagcgatgcagatgtggatgtgctgaacgagttcgacgatgagttcgtggccgccacgggtggcgagagggtggtaggtgatgccgagcaggatccccatcacgatcatgaccaggacacctccattgacgagctgtacgaggccatcaaatgccgcagtccgttgagaaacaagcaggaggccgtcgagcgcttcgaaagagaaagagagcgcgatcgcgagaaggagatggagatggaagcgaagccactgagcaattcccacaacgaaaatctcaacgagacgatagaggatgacagcagccagagcagcgtgatctcgtacatcgatcccagggcggccaacgagccacgcccctttcccagctag

SEQ ID NO: 39924 - protein, 1797 aa, DROSOPHILA
MPTATATSTAAEGGQAVQVQTHQDTELPQNPETGIATGQGTASSCPRKCSCRSTAENIHSLKIRCDEQQITNWRELDFGEDVTSIVSINASKNSIALITAEDFRNFTELKRLDLSFNLLTELDKDTFGDSLAHLEKLKLAGNAISHIYEGTFDQMPKLKLLDLSGNPLACDCGLIWLIAWSSSREVRLQPPPKCESPGNFRGMPLKKLRVGKDFHCETLLQPLLELIPSQNQVAFEGDELQLKCHAPRVAIGVPRESEDLPTKAYVFWGWSEKIRAKNSTEDIIYQDPTKVFGDVNLETRHSTDSGILQSILRIASLTQNHTGMWDCTLRSQQANLSQAIVLHVVAKGTLYCEARVVHTNKGTYHWPRTMRGETVLQECVEEPSDATQARRASHECGPSGEWLNLDTESCVYVSETTRILEQFAKVNLTLTKGQNALEIARRLHNFTQAQTQLNRIRDPMDLEYIARTLVKYLDQLEQPQQQQEISHLLMDIVSQLLNLPAHLFRAAQSEQGTGQRLLHVVESSAMRLALASTQAEPLPAEMIPWRGSLAQQRNLFVEFFNISLDAFVSLSCVWLEQSPRGFQCNSANDTIPMYEHGDIDAAIQLPYSVIGNSSTTLPATTTIRSLRLMISLHRNGKLLPNLRGSHNESLSSAIIGILAYSSDGEALQFRADNELDPEEDVYQQRVTVMLRAHPYHNPLSAPQPAWWDADEQRWETSVCQQHYQHRTLVMFSCSRTGYYGLLQRSQYLNDFRSEESGARFRHPPAAVYAGCGLLFACCAFNAVTFAVFGRAVRINRVQRHALVNTWLALGALALAFSLGIYQTASQPQCRLLGLLMHYLGLCVLLWVCVSLSSMYKRLTKTTTSGQGQCPGQDMEPQRERERKPILGIYLVGWGIALLICGISSAVNLAEYATYDYCFLHSSTTLNALLVPAVILVIFCGILALCIYYQLSQQAVNVLQLQMQHQQNRQYSDNNTQATEHIDLDWLDANGSATTAAIGGGSGNHGGRKEQDHMQEQYSTLSNPLSSIVDDFERSNLSHLRGHFIFLVLYAGAWLSAAAYVNGGQELYVLSFAGCCSVLGIFLLIFYNLSRNDARQAWSQGRDGRSIPAKLVTYNNGSQARGAHPSSMMPGPGTAMISNSIVAYKANPGPGSLYEANNSAGSRSNSQCSRSMRSQTRSQTRSQQEQLLQANGAGGVTIINNTSGQPGAGGGPAAGGVSGSTGGAPVPPHSLNALLHGSSHDLIPSAEIFYNPNQINVARKFFKKQKRLAKRNNFELQRQTMPQMQLQMQMQMQLHSQHSLSDASSEQLYSRHHNAMTMLAGGSKINNTNLHYKNQGSPMAGAPKEHGNMGAMSSGGDSMQFKRFVPASASSASKIMQANIYTNIPETLTPQHEVIKLRANGRTRTPSLLDETLHELDDDEEDEEEEEHGQTPATMEEPEHELEEEDASSLDEHAPLYANTLPPASGMSSLFRNRGSSHQPMSSTPVKQPSLEAMNSLGLPEVSLEEPLLQKHEIYVSNSLQVTTSNSIQLDDDFPSVLIRFSQQQQSKSLNNISEMLAGGGGGGGNAPGLDSLGDQQESSQLSVNEGSTLEEQQLRQIYSCSSSNLSQLKGHHPTATVDTEDDGRLLSGSPTNESDLNYQNSEISIRSHGLYAPQADNDLNLTLTDDFRCYQSSNASDADVDVLNEFDDEFVAATGGERVVGDAEQDPHHDHDQDTSIDELYEAIKCRSPLRNKQEAVERFERERERDREKEMEMEAKPLSNSHNENLNETIEDDSSQSSVISYIDPRAANEPRPFPS

SEQ ID NO: 39925 - DNA, 3701 bp, DROSOPHILA
gaataataaaccacaaaaaaaaaaagatgccattatataaacgtaaatatgtgctggcttatatatgtacataatatttatctataatacagtatacagttaactaagataagctcttttcctcgctatcgctgccgttgttttgttttgcagttctagatacgaaaaaaaaaacgaattaaaccaacggatccgaggttttcgtattttcgtagatatatacttgttttttttttttatcaaggaaccccctatttttcaacatcaccaccatcatatcgttttcattcactccaaaaaaaaaaaaaaaaaaaaaaaagacccgataattattatagcgaacgaaaagcgaagaatacaaaaagacttctccgagtaacagaacctcattttagtgataagataaaattctaattaattaatagccttttaagcaaacgcatacactgaaagaaaagacctgcatatgcaaggtggaaaaaccattagctgataaggcgcgggattaccgttcttgagcctatatatcatctcatcatctttaaaacaagatgaaacttagtggtaattcgcattatcaagtcagtagttcaagggattttctttgtttttttttttctttttatatttaatagatatgcgtattgtaaaagtcttattattatagtctttttctatagttataatggtcttgcagttgataaactaaacggtataatactgctctagagcaaaatagattggttttttttttttttaattatgccacatttcatctacgcgtagcacccgtttctccctgtgtatatgcaccaacttgcttatctctttcgctgccattcagacctgccctcattcactgctcttttatgctttcgataacaacaacacaaacaatcattaatgatatttaaaaacgaaaaaaaaaaaatagtgtttaatattaaatttactaggctgctccactttgttacttgtccgttttgccaacccgaattctttagtctagtttgagatttccctggtttgtgacgtcatcgcgggcgcctaccttcttggatcgatcccgctgacgatcaccaagctgcgtggcggccattagttcgctgatctgccgctccctctcacgttcgcgatccccccgctcgtaatcctcctgaagcatctcctccgcatcgcgatcatcctcatcgcgatcctgctcatcgcgatcctcgtcgtcatcctcctcctcctcctcctcgtcgctgagactgctgctctgggtgctgctcttcctggcgagcgcaactcgaactccattcacgatgcactcgccaccatcgagggcagaaatggtggatccacaatagtagagattgctgcaactgcttgctgcactgacatccgattggccatcgtccttgccacatcccggcgacattcccgccgctcccgatccaccgtgtccatgtgcgccatgtccaccgctatgactgtgatgtcccgcctccagggaacaacgccgctgaccacgcgcccgctgcagacgaaagtattccatttcctccatgctaatgccgcaggcggttatgtcatccgaatagtcgctaaccacgacggatggtgtgcgcacatagcgcacgcccagcggcagtccactgacgcccagttcgctgtacgagctctgggtggattcacgtcgcgatcccggtgcggctaccactcgctcctcgagcagcaccttggtgggcacacccacgctcggattgccaccgccggtgggcgatgtcagtggcgaatctggcagggctgtgggttcggccagtggcagtagggccggtcgcaggggtaaatccgttacggtcagtgtcatccgacgttgtggcggcaacggcacatccatgccgccatcgtccacgtccagacccagggcggaatcactactggcacagcgtgtgaccttcattttgcgctgcctcggcgataggctgttatcctcgttgtcgctgctatagggactcagtccgccgccggtgacattacagccctcatccgaattggatgcagtggctccgggcagtgtcttgggctcgccctcgttgctcagctgctgctgctgctgctgctggacaatcatggcctggaactgatcgattagctgttgcaccggcttgcctcgttccgtcttgcagctgggataagcactgcggtagttggtggtgcgagtgattctagtggtgctgcttgtctcgctatcgcgggctaatccacccacttgattgccgaaaaattgcgctttcaactgcgccttgcgtagggccaactcggagatggatgccacctcacatggataaccaatgtcacttcgctgattggatgtggccgcaattgggtttgctctagctctgactgtagctgctactttggttctggctctggctcgggcactagctccaatctgctccgctgtccgctgataactgaacgccgttgcctctgccgtcgtccatttattttcaattttaaccgttctccgcgttgtcgtcgttgttgtttttccaattgttgttgcttttgctgtcgttttcgttttcgccctcgctgccgacgctttcgacgtcgacgtcgacgtcgttatctttggcatgacatcgaattggaaagcgggggcgtcagacgttcgcgaaaccgttcccgtaccgccgtcgcacgcactcatctcacatggatggattggctggatcgcgggtagaggtggggtgggtaaaggtatgtatacaccaggttagcaaagagttgggactaatgaagtaagtgtgagattcgttagaacagcaaaaatgaaataggaatatgcaagaaagtgtaatgggattggtgataagaaagatgttgtaagcagaagaagttgaaaaaagtgcagaaaatggaaaatggaaattcgtactattttctgtatactaatttactaaggcttatataaagaattcaatggtaagagatggtaaaaaaatagctagaatggtaaatgttagaagcgagtgaaaagtgaaaggctggcggatagaacgatagtagaaagcataaaaacagtgaagatttccgttaagaatgagtgtgtgaagatagttaaaagggaggatgggaataataagaaaaaggatagtagaaagagaaactagtgaagagtagtggatgatggttgggtagtgattgggagtgactgataaggaaagactcaaaagtgaaatggtgcttatggtgttggaaaacgatctgtgtgttccgtcgaaacgcgctactaacgctggcgtcgaggcaaaatcgagtggaactataggtgaaaatgccactggaattcccggcaaacattctacgtccgcactttccgaatggcacctgtgcgctgccgtcgccgaactgaaatcgctttctgcggctctgcagctctgcccgttttttccagcgggccggcgggaggggcgaaaagaatcgagaagagcagcgtggggggcggggggaggggagtctcgtggggcgagaatgggcgaggggaggaggctcgaagaattgtatagaagaatcgttgagccgcggagtggagtggcgcatcaacggagagcagctgttgtgggggcgggcggccgttctgccgttcttatttacttgtattgttgatagttttcttcgacaaatttgctgtgccttacttaattttc

SEQ ID NO: 39926 - DNA, 1701 bp, DROSOPHILA
atgagtgcgtgcgacggcggtacgggaacggtttcgcgaacgtctgacgcccccgctttccaattcgatgtcatgccaaagataacgacgtcgacgtcgacgtcgaaagcgtcggcagcgagggcgaaaacgaaaacgacagcaaaagcaacaacaattggaaaaacaacaacgacgacaacgcggagaacggttaaaattgaaaataaatggacgacggcagaggcaacggcgttcagttatcagcggacagcggagcagattggagctagtgcccgagccagagccagaaccaaagtagcagctacagtcagagctagagcaaacccaattgcggccacatccaatcagcgaagtgacattggttatccatgtgaggtggcatccatctccgagttggccctacgcaaggcgcagttgaaagcgcaatttttcggcaatcaagtgggtggattagcccgcgatagcgagacaagcagcaccactagaatcactcgcaccaccaactaccgcagtgcttatcccagctgcaagacggaacgaggcaagccggtgcaacagctaatcgatcagttccaggccatgattgtccagcagcagcagcagcagcagctgagcaacgagggcgagcccaagacactgcccggagccactgcatccaattcggatgagggctgtaatgtcaccggcggcggactgagtccctatagcagcgacaacgaggataacagcctatcgccgaggcagcgcaaaatgaaggtcacacgctgtgccagtagtgattccgccctgggtctggacgtggacgatggcggcatggatgtgccgttgccgccacaacgtcggatgacactgaccgtaacggatttacccctgcgaccggccctactgccactggccgaacccacagccctgccagattcgccactgacatcgcccaccggcggtggcaatccgagcgtgggtgtgcccaccaaggtgctgctcgaggagcgagtggtagccgcaccgggatcgcgacgtgaatccacccagagctcgtacagcgaactgggcgtcagtggactgccgctgggcgtgcgctatgtgcgcacaccatccgtcgtggttagcgactattcggatgacataaccgcctgcggcattagcatggaggaaatggaatactttcgtctgcagcgggcgcgtggtcagcggcgttgttccctggaggcgggacatcacagtcatagcggtggacatggcgcacatggacacggtggatcgggagcggcgggaatgtcgccgggatgtggcaaggacgatggccaatcggatgtcagtgcagcaagcagttgcagcaatctctactattgtggatccaccatttctgccctcgatggtggcgagtgcatcgtgaatggagttcgagttgcgctcgccaggaagagcagcacccagagcagcagtctcagcgacgaggaggaggaggaggaggatgacgacgaggatcgcgatgagcaggatcgcgatgaggatgatcgcgatgcggaggagatgcttcaggaggattacgagcggggggatcgcgaacgtgagagggagcggcagatcagcgaactaatggccgccacgcagcttggtgatcgtcagcgggatcgatccaagaaggtaggcgcccgcgatgacgtcacaaaccagggaaatctcaaactagactaa

SEQ ID NO: 39927 - protein, 566 aa, DROSOPHILA
MSACDGGTGTVSRTSDAPAFQFDVMPKITTSTSTSKASAARAKTKTTAKATTIGKTTTTTTRRTVKIENKWTTAEATAFSYQRTAEQIGASARARARTKVAATVRARANPIAATSNQRSDIGYPCEVASISELALRKAQLKAQFFGNQVGGLARDSETSSTTRITRTTNYRSAYPSCKTERGKPVQQLIDQFQAMIVQQQQQQQLSNEGEPKTLPGATASNSDEGCNVTGGGLSPYSSDNEDNSLSPRQRKMKVTRCASSDSALGLDVDDGGMDVPLPPQRRMTLTVTDLPLRPALLPLAEPTALPDSPLTSPTGGGNPSVGVPTKVLLEERVVAAPGSRRESTQSSYSELGVSGLPLGVRYVRTPSVVVSDYSDDITACGISMEEMEYFRLQRARGQRRCSLEAGHHSHSGGHGAHGHGGSGAAGMSPGCGKDDGQSDVSAASSCSNLYYCGSTISALDGGECIVNGVRVALARKSSTQSSSLSDEEEEEEDDDEDRDEQDRDEDDRDAEEMLQEDYERGDRERERERQISELMAATQLGDRQRDRSKKVGARDDVTNQGNLKLD

SEQ ID NO: 39928 - DNA, 2438 bp, DROSOPHILA
aaatatgactcacaaatcactttctctgggagaaagtttagggtcattaaatacgaaaatttaatacaaattgcataagcaatatggatcttcattgtcgcaagatctacatataatgaatctttcttgctaagcttcctgggaagagaggatttcgttaagatgcgctctcgtctgctgaatcttgcgaatcttcccgaatctcaaggcctccgcccacacgcaattctccgcctccgcttcccgctcccatttcgcttatcagttgaacgatctcattttcacacgatccacgctttacgcatgagcggcttctccctgtctcgctctctctcactcgctctctggctccctctctctctttctctctctcgatcactatctcagatgctagtgacgtcaatgggatggaagtggagctttgcgactggaccggtccaaaagtccaagccagcgctgtgctttcagccaataaatagccagacgataaaaccacataattctcttattttaataaaaatatttgtattttatacgatatatgtttataaaaaatatctatcacatctagttgccacagtcataaatacaatacaaatgtaataagaaaatttaagtccatctttagctaacattttagtttcatttaattatactgttttttagctgtaatttctgacaacactgattgaaacccaatagcagattaagagcttcattttagcgaagacaagctccccagttggagctttcgtggaaaaaatttaaaagcttaataacgattgtggggataacagagttatgggtttttaaagagtaatactagctcatctagaagttattcattgtaactagcagtaatttttgataagatttaaaaatatctgcataattacaactagttaattaatgtaggttgtacatacacaaatataaagacatttattataaataccctcaatatgatcttacagtcatatactcttcgcaacgaagtattttataaattcgtcgataaatacccgaatccgccatggcttaccttcttcttcgccgcctcggcggcactaatcacgtagagatcgacgatgcccagaaggcagtcgtcgcagcggcacacatcctcgccgaaggccagcgaacccaggctgctggtggagtccaaggagtcggtgcgtcgcaggcggctaaccacgcccatgcccatgcccaggcccaagcccaggcccagggtcagtggcatgggcagtcccatgccgccgaccgctggcggattgggtgatgttggcgagggcgtgggcgtggccgagccggaagcggtaggagttgcggtagcggcggagggagcgccgcccgctgcggcagcagcctcaatcttgcgtgccagcagctgctccatgagcgtccgcggtcgcgacgaggatggatacagggccatgtccgccaggcgattgccacccactgcggctgttgcacctgcaacgggcccttctcctagccgctctcctcctgccgctccctctgccgctcctcctggtcctcctccgtccacctccgcaggcggcgagttctttgcctaagtctttcgtttgccccttcgcgatacgatatgtttctaattccaatcgagattccgataatctctatttttagctaagcgatagttggcacatacctgcaagaagcataaagaaattgatgtacataagtaaaaaattcaaaataaataattagtaaaaatctataataatataaagagcctttgccattgttgtagtatatattcataattcaagcatttcacccattcattccagtttatctccgcctcgaaactaaactttcaaataaatcattttaatcggttttcggttgacattttcaatttcaatattgaactccgccacccaaatagctgaaaacacacacttatcttgcattgacttctttggacaagctataatttatgggccacaagagattactttaattgatcagccattaaaaataatccatagttcgcccatacacaaaatttacgacctccaatagtttacaaaaattcaaaattaatgactaacatctatttgggctgacaggcccttgtatttatgttgtatgattaacgttgagttgaattaatcattttaatacattttctacctttgtgtttttttttgtattcaaatctcttttggtttaatttccgctgctgattgctaaattatgtttatctccagttggccatttcccaatcgccgctaatcactgcaatccattttgtgtccgacttgagatatcttataaattcgccaaattagtgtaatcaacgcaatcttcggcggccgacacgaaccatatcaatatggaatattgaattccgtcaacgatctgcgaactgcgatctgggatctccgcacccaggccaatcttatctt

SEQ ID NO: 39929 - DNA, 438 bp, DROSOPHILA
atggccctgtatccatcctcgtcgcgaccgcggacgctcatggagcagctgctggcacgcaagattgaggctgctgccgcagcgggcggcgctccctccgccgctaccgcaactcctaccgcttccggctcggccacgcccacgccctcgccaacatcacccaatccgccagcggtcggcggcatgggactgcccatgccactgaccctgggcctgggcttgggcctgggcatgggcatgggcgtggttagccgcctgcgacgcaccgactccttggactccaccagcagcctgggttcgctggccttcggcgaggatgtgtgccgctgcgacgactgccttctgggcatcgtcgatctctacgtgattagtgccgccgaggcggcgaagaagaaggtaagccatggcggattcgggtatttatcgacgaatttataa

SEQ ID NO: 39930 - protein, 145 aa, DROSOPHILA
MALYPSSSRPRTLMEQLLARKIEAAAAAGGAPSAATATPTASGSATPTPSPTSPNPPAVGGMGLPMPLTLGLGLGLGMGMGVVSRLRRTDSLDSTSSLGSLAFGEDVCRCDDCLLGIVDLYVISAAEAAKKKVSHGGFGYLSTNL

SEQ ID NO: 39931 - DNA, 2269 bp, DROSOPHILA
gttatcacaaaaatagtgtccactttttaaataaataagagattaaggttttctaaacaaactgaacatgttttaagttttttttcgccttttttctttaaacttagaaaatattcagcataaaaccaaatgaccaactgttttctgttgctgaaaacgctagcgaacaataattatcacttttttttgtacatttcgcctttgtgaaaatttgcaaaaaatgaggaagattcaatttttttaaaaatgcgatatctaagattgggtttttttcaataacttggctaaaaattgactgacagctaaaagaattacttttttttactcctaattacctatactaactataaatattactttttaacggactttgtaaaattaatttttggccaaatttttgcattttttgtaagaggtaacatcatcaaaatttgcaaaaaatggcgaaaaattagaattttcctttttgaatacagttcgattaggaatttaattacgagtttaacgaggtatgacattccatatttgaacaattttttacgaattttttcgccaaaaaacggataatttttgccgggaaatcagaagaacgaatatttgaatatatttgaccttcaacctgaaatatttttattttgcttccaagcacttttgacaatcataatggtaagttaattgttaagcagagagcaattaattatttttttttttaattgaactgtagttatcgctattgtttctcccgcagctgtatatgcatgtacttgttttccggatacatcgaactgccgacaattggccaatcgtgaatatcacaggcatttcccacccattttccattgcaacagcaactcggctgggttttcattatggcaagtgcgtttttcagccaaccaataatcatcgatctggacccgggaattggaaatggctatgtgaattcgaatcacagccatcgaaagtcaccgacaatgacatttgcaacgccctcaatagagagtcaaccgtcaccggcatagaaatctggctccgacttgggatttattgtagaaacgtagctgtctagcttttgtgccgctttggtctgcctttggccgccatgattcagcagaagcaatctctttttgcagctgttgttgcgactgatgaacaatatgaatagagcgtttttctgtacagcttggcaagcgagctcaggtagaaacgaactttaagtgctcactttctggcatcacgaagatggattgctctttctgcaacttttgccataagaaggccacttaataagagggatcagaatgaatccctgaatgaaataacataacaacatattgcgcatacgccatgttgtacctgatgcattttttttaaagccctttctttttggaaattggaaattttctttgtgcgcgttaccaagaagtgcgaacagtaaggtcccattgtaagggaccaattatgtatggctaggccaccattgtgtgtgaactggagtaatcgtatccgttggcaacgggcgcaattagcagactgataatgataatggcgcgagcccaatgtggtcgctatgagccatccaagtcggttatgcccggccgattcagtaaacaaaatggcaaacaaaaaaaaactaacgacgtaacgtgcgcagcagcgatcagatcgcaccacttgactttgagaaagggttctgtttccagtaggttccacgggcagtaaataaactgcctcgcagctgctgggccacatgtacatatgtagatagccagataaaatgtacaaatgtatgtatgtatataacccggaggaactggttctggtgaaagagattcgatccgatacgccgaagacacctcgttggatgcgacgcgaactacacgtaatagttgaaacgctgcgatcacaaaagggggttcaaatcaggcagatcgtatatatttatatacatatatatctgggtataccggtagagtcaagacccgtttaatatgcgagacatccacgtcgactagaggactctcgcttgcgcttaacattgaaatggatgggtggtgatggtggcaaaacgggaattgtgcactcggttactgtgtcaccaatccaacagctgttgtctgcactgcaataaaatgccacatcaaagtaacaaagttacagaatatgtggaacaactaataggtaactacaagtacatgttaacagattattaaccgggtttaattagacatcacatgtagatttgtatactgtgcacaagtcactcgtcatt

SEQ ID NO: 39932 - DNA, 189 bp, DROSOPHILA
atggcaaaagttgcagaaagagcaatccatcttcgtgatgccagaaatcgcaacaacagctgcaaaaagagattgcttctgctgaatcatggcggccaaaggcagaccaaagcggcacaaaagctagacagctacgtttctacaataaatcccaagtcggagccagatttctatgccggtgacggttga

SEQ ID NO: 39933 - protein, 62 aa, DROSOPHILA
MAKVAERAIHLRDARNRNNSCKKRLLLLNHGGQRQTKAAQKLDSYVSTINPKSEPDFYAGDG

SEQ ID NO: 39934 - DNA, 3008 bp, DROSOPHILA
cgggcacacctattttccaaaaggatttcccagcatttgcggcaaaatgaagcaacaacaatgttgcaaaaacaaaaaaagggatggctaaagaaaaagaaaaagaaaaaaaaataaactaacgccaagttggctctttgttatttgggcgtttggcaagtttctacgttgccttaccgtttttataccttatacccttgcagtgggtattagaacttggattaggagtttccggctcagtgaacgagatatttgtgaacctaaacctaaaaagtcatttctgcataagctgtctgcctcaacgcggatttgttcgggacactataaaatcaatagggatgaattttttgcctaccatcgtcttatttacattgtgttggatttagcaaggtatgtatgtacaatacatatgtttggatcaatatgtcattatagcccaaatatgctgtgtgtctacctttatcataattcgaattgggcacccagcccaatgatttctggtgtaaattctttaacattgattttaaaaagaaaaaataacagtctattagcctaaaattgtttaacctttaagggtatacatagcttcgttcctctgagctagtcctagttattttttggctctcctacttgtcgtcgtgtcgtcgtcatacaaaataaatggaatatcttcgcgttctgctccttcaggcacttcctcatcctccagtggtttttcccacccaacttttcctgcggttccatccgtcatgccttgtacttcttacccattttttttttgctgttgttctctgttttagatgaaaagtgcaaacgggctggctggggagtctgttgcaacttatgcaaaatatttgcaccgaaaagggtctgctaagagcgttggcgtgcacataaattatttatgagcatgggacaaattgaaattagcataataagcagacaatacagaaatcactggtttgtttttccctcaactcgaactttaattggatgcattttactggaggcgcgctcgcttgcgttcctcgtagcgagccaaggctgccgctaggacctcgcccacggtcctcttgcgccagaagagtgtgcgatccacaggcggtttggtgactctcggcacgggtagatccttttcgttcacttcggcattggaatcatcctttttggtgggggattgttgcgaggcctcgggttctttgggtttaacgggctctgaactttccggagccttgtccttatcctcctttttgatctgggacagcttattcttttccttctcattctccttctcgtcttcttcatcgctggagtcgtctatgctaaaatcagaatcggcatctatgttgttggtcaaatgtgcctgcgctggtatgctttccgtttgatccgttgacttcgtggcgtccgaggctgcgtctgatttgctcttagtctgctcctcttcatcctcggaggggcgacgtcgccgatagcttcgatgcttgacagcctctgccttaatgggtttgtatgccacctcgtcggtggtgggcgccgtctttggcttgacgacatcctgctgggcgggaccgcccaacttttgttcgtatagatggcgatagaagccgtccagatccttttgcttggtcacatcgccaatggcctcgaggtactcatcacgctgctcctgctcctgcatctggcgtatggactcgagcttcttgcggtaggcggcagtcacgtaggtgtccttgtccttatacatctcgccctcggcttcgcgatccttctgcacctgccgttcgatgcgcagctccttctccagctttctgcgctcggcatgctccatcagccggccaatgtactttggtttccgcggctcctggctcttcgtctgcttggcctcctcgcgtttgctgtccatgtcatcgtacagctcgtcgtactggaatatggttggatcctcggccagggccttctcctgctgccggcgggccacgcggcgttccattagactaggacccatggatacgccgccggttcttggctgaaattgaggagcagctgggtcatcatcggtctcggagtcgctgttctcgtcgaagatggagggcctttcgactcgttttagaggtactttcttctgttggccgggtaaaataaggccatatctgcacggtgttgaaacgggtccttaaaaaactgctcaaattgtttatttttaacaaattacttactgttttgccattcttgtttatttatgaataattagtatgaccgtctgaagcgaccacaaaaatccctcaatggtgcaaaactgctgacagcaacgctttaccggctaaaagaaccgttgtatatcgataggaggaccattcgatagtattaagataatagtttgaaacacggatagtatcacaaaattcgttatttcaatgtgaaactactttaaaacttgtgctttaatcaacttgtatttaattgtgtttcaatggaccaatcattactttattttctgttttattgccaaaccaaggctcttaccccttgaaatcatgttagtgcaactctagagacgtaaaatacacatacaaatatggcgaaatattgaaacaaattaaaataaatttaaatataaataaattgttatgttaataaagcgtttaattatcacttaaggcctgctgttttttttttatttatttttttacgccaatggaaacatcggtccttagtctggctacgcagaaaaatatagacgggatcatgatgctcggggggatcagagaaatatcaaagattacttctgaagccgttcaagtctattcacatgcatagtggcagttgggctccaaataattggaagcgattttagtcaagccagcaaccgcggcctgcgtccggctaactatcgataggcacgttgagcgtagacacattcgacaaacgcggccacactgttctgcgtctttttccttccgtttccctttcttttccctttttcacgtttgcgtgagtacgtgtac

SEQ ID NO: 39935 - DNA, 1008 bp, DROSOPHILA
atgggtcctagtctaatggaacgccgcgtggcccgccggcagcaggagaaggccctggccgaggatccaaccatattccagtacgacgagctgtacgatgacatggacagcaaacgcgaggaggccaagcagacgaagagccaggagccgcggaaaccaaagtacattggccggctgatggagcatgccgagcgcagaaagctggagaaggagctgcgcatcgaacggcaggtgcagaaggatcgcgaagccgagggcgagatgtataaggacaaggacacctacgtgactgccgcctaccgcaagaagctcgagtccatacgccagatgcaggagcaggagcagcgtgatgagtacctcgaggccattggcgatgtgaccaagcaaaaggatctggacggcttctatcgccatctatacgaacaaaagttgggcggtcccgcccagcaggatgtcgtcaagccaaagacggcgcccaccaccgacgaggtggcatacaaacccattaaggcagaggctgtcaagcatcgaagctatcggcgacgtcgcccctccgaggatgaagaggagcagactaagagcaaatcagacgcagcctcggacgccacgaagtcaacggatcaaacggaaagcataccagcgcaggcacatttgaccaacaacatagatgccgattctgattttagcatagacgactccagcgatgaagaagacgagaaggagaatgagaaggaaaagaataagctgtcccagatcaaaaaggaggataaggacaaggctccggaaagttcagagcccgttaaacccaaagaacccgaggcctcgcaacaatcccccaccaaaaaggatgattccaatgccgaagtgaacgaaaaggatctacccgtgccgagagtcaccaaaccgcctgtggatcgcacactcttctggcgcaagaggaccgtgggcgaggtcctagcggcagccttggctcgctacgaggaacgcaagcgagcgcgcctccagtaa

SEQ ID NO: 39936 - protein, 335 aa, DROSOPHILA
MGPSLMERRVARRQQEKALAEDPTIFQYDELYDDMDSKREEAKQTKSQEPRKPKYIGRLMEHAERRKLEKELRIERQVQKDREAEGEMYKDKDTYVTAAYRKKLESIRQMQEQEQRDEYLEAIGDVTKQKDLDGFYRHLYEQKLGGPAQQDVVKPKTAPTTDEVAYKPIKAEAVKHRSYRRRRPSEDEEEQTKSKSDAASDATKSTDQTESIPAQAHLTNNIDADSDFSIDDSSDEEDEKENEKEKNKLSQIKKEDKDKAPESSEPVKPKEPEASQQSPTKKDDSNAEVNEKDLPVPRVTKPPVDRTLFWRKRTVGEVLAAALARYEERKRARLQ

SEQ ID NO: 39937 - DNA, 3012 bp, DROSOPHILA
tatatatgaatgcggatataaaagaataatattgtacagcacccataaaaagtacatttaatagagaagtaaaccgaaccaattattgtgtgttatttaaatttttgacaataatattgctttcgtcactaataattaatcaacatggctatcgtgaacatattaattcgattgtaacgatgttcagcacattaaagtcgaatatcgctcatacgccatgtatgcttgcataagttttaccttcaaactttttctcatggctttcattctcaccatccaacgcctttgaattgaaagtctctgtctatatttgaatttcgatccgatgccaatggcaaccttggcgtcctgttcaaaaccctcgagacctcaaaagggttaaggcaggcaaggcaacgcacttgcagatgcactgtgtttttgcactcaaatcgagagcactcaattagaaacgttaagctaacgaccgtttcgattcgattcgattcgattcgactcgattcgatcgacggtacgtgaatccgagggggatagctatatatacatatatatgaacaatataggccgcacccttcttcgatctgcgacgacaatcggaaaaaaaaaaaagttccattccagttcgtatcgaattaatttgcctaaaatgtggcacaaatctcaattgcagcagtgcacatcaataaacaaaaacgccagaaaggagcaaaaaaaaaaaaaaaagaaacgagcaaaggagcaaaggacatgtgagattgatgacacaatcgaacaggtaagagcgagacaaacacatgcggcccgccagcgggcgcgacagagaggcaaacggatggtgagaggggcccgctgactgccaaatggaaaatggatttcagtattaatttcgctgacgacgacgacggcaacgacgaggacaactacgactagaaggttgtggatgaggatggggacatggatacggaagatgacgaagtggagcgaaggcacgttggcaacatcaaaagcgaggcatatccgtcttgacattccgtccgggctgcagatgcagatgcagatgcagatgctgatgctgatgctgatgctgtaggatgctggcggtttccgggggtgttacattttcggtgcggaggggtaggggggggggggtgtagatatcccgaggatacggggatacgggcatacacggggcatccagtggcgtctgtccacgggtattcggcattccgagaaatggaatgggatgggatgatgacggaatgtagaaatgaagaaccggagcaaaactgcggtttgccatcactgcaatgagccggaccccggagccggaatctaacttcaatgatgggaaaagtacaaggtaggggcgaaaaacaacaagaaaaattcacgtgggtaagccgaaagtgatgatgatggtggtggtgatggtgatggtaccgcagttccttccttaatccaaggtacaaggtacaaggtacacagatggaagatatggtggtatatcagaaagtttcatttacaatctcttataaaccatatatatataatgctagagaatagttacttttatagataatattaacaaatactacttatattaaataatactaatatattcatcatttgctatacgatttcgtttgcattttatttagtttacagacacattataaccaactgcaacagatgaaggttaagacattctacactttgtactaaagtactaaagaattcgcgttttcaatgatacataagtacgttggaattaaaggtttagcatgtgattttagcacatattactgtatgctttgtataaagtctgggatggtatataatggtatgcttcagtgccaaagaaggtcgtaaacactggtccaaagtacctgggagcaaccgcctagacactgtccatcactgatcctaaccatgtcagccgtgctcgccgcgctttcgctgctttccgttctcctttcgcgatgcctccgcttcgctccaccctcctggtccattggttttcgcttttatggcggcgggcacacctattttccaaaaggatttcccagcatttgcggcaaaatgaagcaacaacaatgttgcaaaaacaaaaaaagggatggctaaagaaaaagaaaaagaaaaaaaaataaactaacgccaagttggctctttgttatttgggcgtttggcaagtttctacgttgccttaccgtttttataccttatacccttgcagtgggtattagaacttggattaggagtttccggctcagtgaacgagatatttgtgaacctaaacctaaaaagtcatttctgcataagctgtctgcctcaacgcggatttgttcgggacactataaaatcaatagggatgaattttttgcctaccatcgtcttatttacattgtgttggatttagcaaggtatgtatgtacaatacatatgtttggatcaatatgtcattatagcccaaatatgctgtgtgtctacctttatcataattcgaattgggcacccagcccaatgatttctggtgtaaattctttaacattgattttaaaaagaaaaaataacagtctattagcctaaaattgtttaacctttaagggtatacatagcttcgttcctctgagctagtcctagttattttttggctctcctacttgtcgtcgtgtcgtcgtcatacaaaataaatggaatatcttcgcgttctgctccttcaggcacttcctcatcctccagtggtttttcccacccaacttttcctgcggttccatccgtcatgccttgtacttcttacccattttttttttgctgttgttctctgttttagatgaaaagtgcaaacgggctggctggggagtctgttgcaacttatgcaaaatatttgcaccgaaaagggtctgctaagagcgttggcgtgcacataaattatttatgagcatgggacaaattgaaattagcataataagcagacaatacagaaatcactggtttgtttttccctcaact

SEQ ID NO: 39938 - DNA, 462 bp, DROSOPHILA
atggaccaggagggtggagcgaagcggaggcatcgcgaaaggagaacggaaagcagcgaaagcgcggcgagcacggctgacatggttaggatcagtgatggacagtgtctaggcggttgctcccagttagattccggctccggggtccggctcattgcagtgatggcaaaccgcagttttgctccggttcttcatttctacattccgtcatcatcccatcccattccatttctcggaatgccgaatacccgtggacagacgccactggatgccccgtgtatgcccgtatccccgtatcctcgggatatctacacccccccccccctacccctccgcaccgaaaatgtaacacccccggaaaccgccagcatcctacagcatcagcatcagcatcagcatctgcatctgcatctgcatctgcagcccggacggaatgtcaagacggatatgcctcgcttttga

SEQ ID NO: 39939 - protein, 153 aa, DROSOPHILA
MDQEGGAKRRHRERRTESSESAASTADMVRISDGQCLGGCSQLDSGSGVRLIAVMANRSFAPVLHFYIPSSSHPIPFLGMPNTRGQTPLDAPCMPVSPYPRDIYTPPPLPLRTENVTPPETASILQHQHQHQHLHLHLHLQPGRNVKTDMPRF

SEQ ID NO: 39940 - DNA, 4118 bp, DROSOPHILA
cccaagaacttgcataaacttattaataaacgcgatatgtctgtatataaaatacctaataaaaacgtgtgtgcttgcttggctgcgtgtgtgtgcgcgtacgtgtgtgtgtgtgtgcgaatatgtgcggcgtgcgagctccaatcagaatcgtatcaaaaattcaaagctctttggccgctagacgcaattaaggaactgacaacaagaactgaaaccgcaccgagatggaaaatgaagtgctggcagtatttaccgactatatgtttttcttgcgggcaaaagtcacgatgaagcgggcagcgattaagttttaaaaatatcacgtctgcagccctcgcagccaaactttcgatagacggcgatagatcgatagaccagcgatttgcaccaacactggaaagctcagagcattcaaaaacaaactaatgtgttttataaatagctctttttaaatatcgattaattgcgatcttaactaactttcgtttatttctattaattatgaacttacttctgtttttaaacatctttgctctttgcttgtttttcgtgtaaggctttaaattcacttaaacaattttgctggctttgtgcgcatcttcatatatcactgaaattgattgttataggagtgtcccattgaattagttttgtgtcgattcaatcctggcccgaaaatgtatgaacaagctatgccctacattttacccatagtctacttaggtttgtttatatagtattcttttcaagttcgttatgatagctcttagaaaataagatttctgtgaatatctcctccgtataaaagaatttttatcaatagtttggtaagcttttttttctcttctacaaaaccttttcgcatgttttatttcactcgaaacttattgctattcaaaaaaatgggttttctaacgctagaattatgtacagagtgcatttggaaaaaatgatgggtagtaagccctagaaagccatggctacgtgctgatgcccatgatggattcgatggagaaactcagcttgggcttcttgccactgccggtggaggcagtggtgactgcgggcgtggtcatcgctggatttgtgggcgggatcgttagcggtatcgtcggcggcatcgggtgataaatgtgctgctcctgatgaacgggtgcgcaggcggcggcggcggcggcaacggtggcaaagtacaaagcgttaccgcccagcgtcgcctccatgacatggttcagttccggatcggcgaatgcccgccgtttgcgcatgcgctccatcaatggcgagctgaacgtgggaaatcgctgtttgtattctgaaagagaacgaaccaaaaggaatggttgaaattagtgagggttttggtgggggcgttatcactacaaattgccgcgattcgttatgaatgggtattccaaattgaaacaatttattattgggtaatccgagacacgcgtcgcctgaccagacagcctggcaccgtttttttttttttgtttttttgtttcaacttcggaccggtttcgggatctccacttattcggatggaaccagatggaaaacccagaaagaagtcaattgctgttgccacatttggctctttttgtgagtcggatgggtttttccgtttttggtcgcgtctcagcttaccgaatgtgactcccctcaagtgattggaaaatgtgcgtacactgcacacacacatttcgaagcatccgatttcaattgtttttcgtcagtcgaataattgctgttgttattgttgggcatcagtcatttcctgtccacgaccacgaccacgtccatggacagaggaaaagagacggaagatgggcggcgggagacaggagactggagaccggagaggatctccgattacgaacggaccagacagtctggcaccgtatgggaaagcgtgtgagtagggaatgtacttatcatttcagctgtgtcgtctactttacgacatctaataatttccaaattggaaagtgtctatttgattgcggactcatagatagatatcctttttgatatgtacataaatccttatttatgtagtcccatactaaccttccatggcggctgtgatatgcaatgtggattgctgcaaactgcgtagtctctgcttgtagatcctcttttgggccatcagagcctgtcgggtggccgaggatgaagatgagttgctaacgcaagatgtgggatgcgaatgcgaatgtggatgtgaatgtgccggcggtggtgaagtggagctgagggagtcctcgccctcgctgctgctggagttgttggcactggccgttgttacgcccgtggattttgtagatgatgccggtggcctccagagcctccatggtttgctgacgtcgcagggccacctgggcggccatcacccgctggcgatcgacgaccagttggcaattggggcagcagcattcgcgccaacggcacagacgcttgtgacccttgacacaggagatgacgccgtgattgcgacacctggcgcacttcggcgtccgcaggagacgtcgctcccgctggcaaatcctaacactggcgtccttgctcatcctcgcttgctgatcgactaaaaggatgtggaacggggcgcgaacatttaagcactggcaaccgcagctacttgtcgccgtcagactgtctggcagcgtcaagtggtttccgtcgtcgtcgtcgtcgttgtgtccccagggtatccgacgcccacgaggtgtactagcatgaggtacaacacagcgagcatgcaagggatcggactcgggatcggttccttgcctgccattggctgctaatcgctggctctaaatatagaagatccaatggccgcacagatgtctcgcatcagcatgcaaaagatacattcgactacaggaggaactcattgaaagcgatttcaaagattagtaatatatacatatatagcatatatatataggttatggatcacttgcttaatcaattacttggggcatcttaaagaatttaagaaggtaaaagtatctgtgaatcttctatggttctttataggcatgtttcactatacctttccaatccgtacatctttgtttggactccgtgtttcgtcaaagtgcatattgatttctggcctgtcttcgtttaatatctttattcgtttatttgagtcaatttcggtttacgtgtataacaatttgtagcattcattatcttatatagcacgtacacacatatatatatatgtatatatatatttccgtataaatacaaattcaactcgagtttagccatatcgtttcattagctaatagtacgtaaaaaaaagaaaaaaaaattctcagcgatttatatactagaagtttttaggtgaaaggactttccatttaatgccttttaaatgccttctttatatattttttgtgtaaatatatacatatatgcttatatatacggtgcagcgcgtttcacaagtaacaatcttttaaatttcggaacaaatgatggccaactgttggcgattgtcaaataatttcgaattcagccagctgtttttaattaggatatgtaatcgaacttaccgcaaaaagttgtcaaatgggaaattgtgttcttcgaaccgaatgaataaatgctattatctcacttcatacaattgtgaaacgcactgtccctctgcatacatatatgtattttatatccatttagtaagtgtgattcaaaaacgttactgagttctattagaggattacattgattaaagcttgagctagaaatgtgccaggttttcgattcgattggttggttggtcaaaatgcaggtgcgactaggaaagtactattcgtgtattcgagtgcgttctattatggtctcaggatcatatacattatgatcatcatatattataaggttgtagcggacaatcggttcatgttaaaacgggaccaacaacgaacttttgtttaatgtttggtaattataattacttgtgtttaacatggaatcatatggtaaatgcttgcaaagttattgtcctttactgtttaaaaaacgttctctaaattgaaatctatgtgtgtattaacggtgcgtgtatatatataacattcgcttaaaaaagt

SEQ ID NO: 39941 - DNA, 979 bp, DROSOPHILA
atgcactttgacgaaacacggagtccaaacaaagatgtacggattggaaagagccagcgattagcagccaatggcaggcaaggaaccgatcccgagtccgatcccttgcatgctcgctgtgttgtacctcatgctagtacacctcgtgggcgtcggataccctggggacacaacgacgacgacgacgacggaaaccacttgacgctgccagacagtctgacggcgacaagtagctgcggttgccagtgcttaaatgttcgcgccccgttccacatccttttagtcgatcagcaagcgaggatgagcaaggacgccagtgttaggatttgccagcgggagcgacgtctcctgcggacgccgaagtgcgccaggtgtcgcaatcacggcgtcatctcctgtgtcaagggtcacaagcgtctgtgccgttggcgcgaatgctgctgccccaattgccaactggtcgtcgatcgccagcgggtgatggccgcccaggtggccctgcgacgtcagcaaaccatggaggctctggaggccaccggcatcatctacaaaatccacgggcgtaacaacggccagtgccaacaactccagcagcagcgagggcgaggactccctcagctccacttcaccaccgccggcacattcacatccacattcgcattcgcatcccacatcttgcgttagcaactcatcttcatcctcggccacccgacaggctctgatggcccaaaagaggatctacaagcagagactacgcagtttgcagcaatccacattgcatatcacagccgccatggaaggttagccgccgccgcctgcgcacccgttcatcaggagcagcacatttatcacccgatgccgccgacgataccgctaacgatcccgcccacaaatccagcgatgaccacgcccgcagtcaccactgcctccaccggcagtggcaagaagcccaagctgagtttctccatcgaatccatca

SEQ ID NO: 39942 - protein, 227 aa, DROSOPHILA
MHFDETRSPNKDVRIGKSQRLAANGRQGTDPESDPLHARCVVPHASTPRGRRIPWGHNDDDDDGNHLTLPDSLTATSSCGCQCLNVRAPFHILLVDQQARMSKDASVRICQRERRLLRTPKCARCRNHGVISCVKGHKRLCRWRECCCPNCQLVVDRQRVMAAQVALRRQQTMEALEATGIIYKIHGRNNGQCQQLQQQRGRGLPQLHFTTAGTFTSTFAFASHILR

SEQ ID NO: 39943 - DNA, 1999 bp, DROSOPHILA
taaataaataatttaagcagatcaaattaagttgccgcatgggtaacagtgcgttgatcaaataataaaaacatcatcatgaataaaaaaaaaaaaaaaaaaaaaaaaaaaaaaaacccagttgaatgtatttaaactatatttataaatattttttgagttaaatggctttcgttctacagttcagcttttcaggaataccatgcagtccataaataatacataaattttaagaatttttatggcattggccatgagacgttaattatttgcttgagtgtaaacaaattcgaaattactttaaattactttaaatgattcgtaaatgggtggtattctcgaattttttttttataatgcaacttaaataaagcatttgttctaagacccgttctgcttgtattttgaaaatcattggaaggaactttgaaatgaaatgagcgcagtcatttgaattgaagattatttaatacagtctactgcttattgtcgttcttcgtagccttcttaatcagatccagagaaattcaatggagcaatcggctctagctccgtctggttgttgaccagtgaatcatcggagttaagggacaacaaatcgagttcagtcaagtcctgtgcctccagttcatcatcgtcactttccagatctatgcgttgctggtaaccgccgatcaatgtagacatatgttcaccactatcgtttttcctgccatagccgaacttgctaaacttgccaatcttcttttcgcgcaattgcttgggcgtcaggacgaccggcttccaggtgagatccagaatggacttatggcccacatcctccagtatgctctgattggacagctcgcgacccttgtaggacagccgactgaagcccatgggcacggacatggctcgcccgatccgtgccttcaggttggccaccgttccgaagcgatccacatcgtaaaccgtcttcttgccgtcgctcgtctgaactagaacttgcatcttacgcatcctaatccagatatatatatatatatatatgtatctggcacgtcgaactgcaacttttttcgttttatacacaagctctaagttttgcttcgttcggataaaagtttgctcttggaatcccctatcaaactgtcgtcgtcatgcgaatgctagtgcgagttaaatttaatggcatccttgattaccttatttgatttcctttgtcgattctccaatcgaatttcataaggagcaattggcaaccctgaagttgatatattcggctattccaatttaataaaaattcattttcgcgctttaacccacaacagttgcatattctttgaatagtcactatttttgatttcgacgtgaaagtaaaatattttcaatcaatacaggtagagaaaactcataagagcggggctccactgcccagcggccacgtggcctccaaggaccagaacgtgaatacattgagcaaatcgatccttggcgaggtactaagaaaagcctttaatgtgaaggcgtgacccgttcagcgcggtttgctctcctccgcgattcatatgaacctctgacgaattcgatgccataattttcagctgccaaggtcgtctttcaaaaataaatataaaaaattaaatgtttccaactttttaagttagtaagttaaataattagcaatagaaattaactattttttataggataatcatagcgaaatttctgaaaatgcacgaaatgaacagctgatcaaaagtgaagtgtagtgcactctattgagccattatcgtggcaagtatctttgtgccaactgttgtgccaccttgtacggacagcgtacacttgtgacagcgaatgcatcttagagatacagatacatccgaagacaaggcactttggctggcacttcggcccagttttatcagctcaacagttgaacaaaaacaattcgctgaccgatatggaaggtatagttgtgtttcttgttcttgttggtattttctgttattggccc

SEQ ID NO: 39944 - DNA, 492 bp, DROSOPHILA
atgcgtaagatgcaagttctagttcagacgagcgacggcaagaagacggtttacgatgtggatcgcttcggaacggtggccaacctgaaggcacggatcgggcgagccatgtccgtgcccatgggcttcagtcggctgtcctacaagggtcgcgagctgtccaatcagagcatactggaggatgtgggccataagtccattctggatctcacctggaagccggtcgtcctgacgcccaagcaattgcgcgaaaagaagattggcaagtttagcaagttcggctatggcaggaaaaacgatagtggtgaacatatgtctacattgatcggcggttaccagcaacgcatagatctggaaagtgacgatgatgaactggaggcacaggacttgactgaactcgatttgttgtcccttaactccgatgattcactggtcaacaaccagacggagctagagccgattgctccattgaatttctctggatctgattaa

SEQ ID NO: 39945 - protein, 163 aa, DROSOPHILA
MRKMQVLVQTSDGKKTVYDVDRFGTVANLKARIGRAMSVPMGFSRLSYKGRELSNQSILEDVGHKSILDLTWKPVVLTPKQLREKKIGKFSKFGYGRKNDSGEHMSTLIGGYQQRIDLESDDDELEAQDLTELDLLSLNSDDSLVNNQTELEPIAPLNFSGSD

SEQ ID NO: 39946 - DNA, 2670 bp, DROSOPHILA
ttcacatttacggaaatgcgagatatacatcagcgtatagtaacaatttgaaggaaaagctacaacaagccatgaataaccatcaaggactatttttccctggctgatttagtgacttggggagatttccgcgagattttccgggcccacttgggaaccgccaacgtaaaatatcaaggatgcttatcgacaaataaattctttgccctgtcaaatgccctgcaccatcaccagcaccatggtccacaggccacagttcacagtcaatgtgggtggcacaggctcggcggtggtatgtggcaggatataataaatagcctgacatagtaatgccacacagacactaactcacaaatgtcgcactgttattgctgttgttgttggcccttccagtcctcgaccgaaaagttgacgcctataaaacggatatggatgtgcaccaaactgtggcatacttttctgacccccacccgaccgagtggcactaccaccatccactaccacttccactcgcagtcgatgtcgctccaaaagtgttgacaaatttatgagcttgttttgctttttcgcaatttttgttcggctgattgaaagttttctttattttgcctccgggcaaattgatgacaattggagagcgggccagacagcttaatcgttcgtgttctatatttagctatatattaataaaggctttgattgatttcgaaagtaaatcaaagggccgacacagctgcatagttcaaattgatcaaagtaaccctgtgctggcaatattcggtcacactgttttgcacgcaactaatgttcaactcaaatatgaatgctcactcttatttattgtataatcggtgaaatatttactttattgctttggcatagtttacaattaattcacacttgctttgcttctatgttctttgaaatagtgaaaaaaaaaaaaattctttaaagccaatttgctttgcttgtgcgcatggccacattggcagcagcaacatcagttgcgcctggcgtcacagttgttgacggtactggccagtcggcaggccttcagctcgcgatcgaaccagtagccgttggggcagttctggcgcttcgacctctgacggttgcacacgtagtagcggcgacagtgacgcacgtcggcgaggaaggttccgtcctcctggccacggcaatcgtggcgcgagatcagcacctgggcaatagcaactggattgtctatatcgggctgttcttcatttccgtcgacaattggcccagcgttgtcgctcttgggtgttgtgcaaacggttgtggtgcagggcttggtggtggtgcacggtggggtgcagggaggagtggtggtgcatggaggtgtcctggtgcaggggggtggtgtcctggtgcatggaggaggtgtcctggtgcatggaggtggtgtcctggtgcatggaggtggtgtcctggtgcatggaggtggtgtcctggtgcacggtggtggtggtggtggtggtgaaggtggtggtggtggtgggcacgttgtagtaatgcacggaggtggtggtggtgggcatgttgttgtggtgcacggtggtggttctggtggtgggcatgttgttgtggtgcacggtggtggttctggtggtggacatgttgttgtggtgcacggcggtggtggtgggcatgttgttgttgtgcacggatccgggggaggagtacacggtggggtatcggctctaggcggatgtgccaaagcctcatgaccgccggcgatagtcgccaaaactaatccaatcagcagcaagtggtctaggataaagcccaaaaaaaaaaaaaataaaaataagaagaaactccttgtttttttttttttttatggaggatcttggatcggagctacccacaaactctcatgttgcgttcgataatgcctctgcagtttcaacttctctgctggttagcgaatgatgttagctgcactcggggctctttttatatcgcccagttgcagattttatctggctgtggaacagggaaagcacttgagatctgttgagtggtacatggtccatgatccccgaggttctcggcactctgctaattaaccaaaattggtctggttgtaggttttggggtatcgtgttttgttcatgtaagcaaaatgttttgttttttacttcgcagttgttttattttttgctgtaatataatacttattctttgaggggaaaacaatcatgcttaatgttcgttttcaaatatatattgttacatatgtcattttttagacttaatactgtgtttttttgaaagagttttcccacagtgatctccattcgaacatacactgatggcattgacatttggcccggttcatttggccattccgtacgcaatctgtaaaatagttgaaattgcctgttaactgatttcgcaggcccggccccccatttgctttctgttcctttttttttttttggcaattgcttcttgactccgggccagtgcaaacaagagatttcggtttatggccccggaccggaagtgttaggccaagtggccatgtggccaagaggccatgtggccaagagcggatgagtggacaagtgttggccatttggcagtcgataaaaatggcaaagagcctaagggggcatctgtgtgtgggtatgcgtaataatttcg

SEQ ID NO: 39947 - DNA, 621 bp, DROSOPHILA
atgcccaccaccaccgccgtgcaccacaacaacatgtccaccaccagaaccaccaccgtgcaccacaacaacatgcccaccaccagaaccaccaccgtgcaccacaacaacatgcccaccaccaccacctccgtgcattactacaacgtgcccaccaccaccaccaccttcaccaccaccaccaccaccaccgtgcaccaggacaccacctccatgcaccaggacaccacctccatgcaccaggacaccacctccatgcaccaggacacctcctccatgcaccaggacaccacccccctgcaccaggacacctccatgcaccaccactcctccctgcaccccaccagcgacaacgctgggccaattgtcgacggaaatgaagaacagcccgatatagacaatccagttgctattgcccaggtgctgatctcgcgccacgattgccgtggccaggaggacggaaccttcctcgccgacgtgcgtcactgtcgccgctactacgtgtgcaaccgtcagaggtcgaagcgccagaactgccccaacggctactggttcgatcgcgagctgaaggcctgccgactggccagtaccgtcaacaactgtgacgccaggcgcaactga

SEQ ID NO: 39948 - protein, 206 aa, DROSOPHILA
MPTTTAVHHNNMSTTRTTTVHHNNMPTTRTTTVHHNNMPTTTTSVHYYNVPTTTTTFTTTTTTTVHQDTTSMHQDTTSMHQDTTSMHQDTSSMHQDTTPLHQDTSMHHHSSLHPTSDNAGPIVDGNEEQPDIDNPVAIAQVLISRHDCRGQEDGTFLADVRHCRRYYVCNRQRSKRQNCPNGYWFDRELKACRLASTVNNCDARRN

SEQ ID NO: 39949 - DNA, 2405 bp, DROSOPHILA
ccaatgccctgcacacacacacacacgcacatacacacagatacttacccacacaaagacttgtggcgatgtgtttgtgcggtgctctgggctactttgcatgggcttaacgattgttgtttatgtgcagtttcagttactgttgccgttgccattacaatcgcagttacagttactgttccagctgcagttacagtcacagttgctcaaacagaaaaaccaagaaaaaaaaatatataaaattctagagggtgaaagcgcgggaaagtcgcgggctggcgctttaatacaaaatttgcattgcataccttttgaaagtgtggccttttagcagttacaagccgtggtgttctctagttttttttaatccttttgctgggttgaaggttaaaatcggtctagtttcaatacaaattaaagcgttaatgatcgtttcgtttaaaaacaagttaaaatcaagtaatgaatactcacaacacctcttcttcttctataaaactttctaaacagaatattattcaaaatataatattcccaaaagtgaagtgagaaggcgttcataggtctgcatgcaaacatacaaaagtgtacgtatatgcaacaaatatgcaactacaacatgccggcatatatattcactttaaaaaatgtatgcttacctgtgcgctcttgttgtgcttttcctcgtttttagttttactacccccgaaaaattatgcacattattatgtagacaaaaaaaaaaagagcaccaacaagtccgctgggcgcataaattttaatgctcatgattattattatcatactaaaatgtaatgctgccatccaaaaatgacagcgcgcacatataaaatatagaaatatctatgtatatatatacgaatatagccacttgaaagtgcatactcagtgttttccatttccccttaatttccttctagcttctgccggcagtgagataatcgcaaatcgttcggcttcagctggcgaatcgttgataatgctgtcgaatttcaccgttgccacgccgcctcccgccccaagattcaccagtccctttcgggagcaggatgtggctgagggggaggagttggcgggtggagggcaggtcgattggttggacgagcagcatccgctgaccatttcccgaccgccaagagcaggacgcagcgagcggcaggcagaagaggatcaggtggaccgctgtcgtctctttgtcgagggggatcccaccaagaatgagctgtacagccccgagtatcccaacttgtatccgaagaacatcaactgcacccgggtgataacaggtgagtgctattcactattcactattactttatgcaactttagtaggtatctaagctgggctatttattattcatgggtatctacagagaatatttagcaaagtcaatgccaatgaatcatttatacaggtatgtgaacgattcgtgatacacatatctgctggcaggttgtattcatgacaggatctgaaactgaaacttcatcccttggcttatctacggctaagcaattaacaatcagtctggcagagaatccgagcagtatcagtggcattatctgtatctgtatctgtatgccacagttggaaagacaaatacgaactttgatggaagccaattggcagtcggcttccttcttagcgaatgtgggtgtgagtgtgcacttagagaaatacgaggtcctttatctaaaagggtaccgcactaaacatacactcatcttctgtaaaatcaacaaaactatatattcggcatgaagctattctatgagaagtgggatatttgaacaaatgtgcttagttagaatgcgaaatcaatcggaccaacactcttttcttcacgtgtgagtggagtggagtgcaggcctcgtaaaagtttatatggcaagcacttggcgacgagcgagctactgcaaataattgcaaagtctttggccaagtcttggcagccactgctgctgttgacattaccagatgtcagtcagtgagccagtgagtcagtcagtcatttggttttgggtaagacaaggatggggagggggagagggggatgggatttggaaaagctggaggggagcgaagtgaaccagtaaaccggaggcattagatggcgctgatgcgtaagatgctccacacagattccacatggcagggccgttttgtgtggcccatttaaaagcgttagcgcgttggctccccgtattccattcgcatttaccccagttgcccagagccaccagttggcagtcaccagttgccatatcccagctacccagctaaccagctacccaacatcccaactcccagcttcccagtttccatttccctgggctccataatacgatgcctcgattggggaattggtatggaaaggggcggg

SEQ ID NO: 39950 - DNA, 318 bp, DROSOPHILA
atgctgtcgaatttcaccgttgccacgccgcctcccgccccaagattcaccagtccctttcgggagcaggatgtggctgagggggaggagttggcgggtggagggcaggtcgattggttggacgagcagcatccgctgaccatttcccgaccgccaagagcaggacgcagcgagcggcaggcagaagaggatcaggtggaccgctgtcgtctctttgtcgagggggatcccaccaagaatgagctgtacagccccgagtatcccaacttgtatccgaagaacatcaactgcacccgggtgataacagagaatatttag

SEQ ID NO: 39951 - protein, 105 aa, DROSOPHILA
MLSNFTVATPPPAPRFTSPFREQDVAEGEELAGGGQVDWLDEQHPLTISRPPRAGRSERQAEEDQVDRCRLFVEGDPTKNELYSPEYPNLYPKNINCTRVITENI

SEQ ID NO: 39952 - DNA, 2672 bp, DROSOPHILA
acaatgtaaaagcactctgcggaatataaaaatctctcgtcgtttcaataattaaagacccaaattagttaaatagtttaacacactaccgcaatgcattgaagagcatcgcagcttcgtttacccaagaccaaacgagactagccataaaattccccttaaagtcctaggcactgaggtgagctgttgttaatcagtttctcggctcggggccatttgacttcaagtaagcttgggctcttggaggggatctatccacctgggccaacggatggatgtgaaagtggatgtagaagtggcggagggtgttgcgaggtaggagtggggtcaagtgccatgactaccatggaatgataaagtatatatttgccgactaacgtgttggctttgtcccttcgctccggcatctaattacagcgccaaagggacaaatcatacgcctggactttcgcaactcgtttaatatcgaggccaaggaggggtgcaaatttgattttctcgaagtaagtactagtagctggcaaaatgcacagaggcaacacagcgtttaagatacgtttaaagaatgcctattctaggtataaaaacatttttaactatttatatatctctctattacttttgcaaaagtatcgaaacatctacgtaaaaaaggaaataatagaattttttggcatatcaaatattttcttgccgtgtaacaaaacccgacataaccaacttaaaaagggtcagcgcataaaaaagacaaactttgctgcatgctgaagccggggtataaaaaaaaaaacggaggcaaaacaaaaacttgcttagttgctcggcttttctcggtcttggccggacttgcaaagttttcgatttgtttcctttacgacttttccctgttacttggcctgtgttgctgctgaaggtgcccccccttttttttgtttcaccgaaaaatgacaagttttaattgaatgttgtctctgtgctgcaagtcttaagcctgatttgaatgcgctgctcgagcgaaagcggtttagaccccaaagacgaactgccagtctcggcttaggacggcgagaatgacgccaaaatctctgtaactaactagctgtatccttgtagatacgagatggccagtacggtttctctacgctgattggcaagttctgcggcaccgactttccgccggagatcacctcgaaggagcggtatttgtggcttcatttccactccgacgagaccatcgagtacaccggattcagtgcggtctatgagtatctggacaggagtcgggatgcgcccagcaccgatctcaactgcaccatcgataagggcggcttcgagggcttcatcaactccacggatgttccggccgagatctgggagcaggtcaatcgcaataagatcgcgctggactgcatctggcgcattcaggtcaaggagaattggaaggtaatatttgtttgctagaaattataaattatagaatataaatctaaattcatataagaaatacatagggctttaaatactttaagataaagcaattgatatctatctctcccattcacttaaatagatatttctcaagtttctggacttcaagctgagcaagccgaacgattgtcaaaccaacttcctggatatattcccggagcagacggtgatgccactgaggtgaggtccttttacagtgccgcttaatcacatttcattgaacttcagcgcggcagtgataaaattgccatcgcttggctggcagaatgcagtcggtggcgtatacgtaatatcggtggcgtatacgcaatgccgcaaaccaatttccgcattgccgaaatggtgagatcaaagccctcgccggggacccgggtaaaatttcaatttattaccggccaaaagtaaattgtacgcgagcggaagtggcgtcgcctttgactcgcacaaccaatctcctcgtccttcgtccctttgcaccggtcgcaacgagtattttaccatctcctgactcactcactcactgactggctggatgacttactgaatgactgactgactgactgactgactgactgaccgactgaatgactgattgacggactgaaggactcgccacggcatcttcgacacgcattgacatccgcttttaacgcgccaatagatttccacttgttgccgctgctcgggacaacactcaaattgattgactggcgttttcagctcggtttgaagaaaatgccaaatggaaggcgggaaattcttcagtgtgtgctccgcatggccggggacaaagtgttccctgtcttttttagccactgatttgatgcctttgtcgctttcatttaaattcatttttcgcaacaatttatcgcacacgacgggtggtacgagcagattttccccaaaatgccagtcggcgcataatgcgttgaaatatcgtaaagaaaatacccgaagccatacagacagaccaaatgaacataaatacaatattcagtgaacgtcatcatttaagccatattataaattatttatttatcgattatgtgtgtgtgtgtgtgtgtgctatcgttggccaaatatttaacgaatggcaaatatatggcccgaggaatcctgatactcactcgttgactgcacgtcaaggacttatattgtggcagaaatgccttggcaaagtaata

SEQ ID NO: 39953 - DNA, 480 bp, DROSOPHILA
atgcgctgctcgagcgaaagcggtttagaccccaaagacgaactgccaatacgagatggccagtacggtttctctacgctgattggcaagttctgcggcaccgactttccgccggagatcacctcgaaggagcggtatttgtggcttcatttccactccgacgagaccatcgagtacaccggattcagtgcggtctatgagtatctggacaggagtcgggatgcgcccagcaccgatctcaactgcaccatcgataagggcggcttcgagggcttcatcaactccacggatgttccggccgagatctgggagcaggtcaatcgcaataagatcgcgctggactgcatctggcgcattcaggtcaaggagaattggaagatatttctcaagtttctggacttcaagctgagcaagccgaacgattgtcaaaccaacttcctggatatattcccggagcagacggtgatgccactgaggtga

SEQ ID NO: 39954 - protein, 159 aa, DROSOPHILA
MRCSSESGLDPKDELPIRDGQYGFSTLIGKFCGTDFPPEITSKERYLWLHFHSDETIEYTGFSAVYEYLDRSRDAPSTDLNCTIDKGGFEGFINSTDVPAEIWEQVNRNKIALDCIWRIQVKENWKIFLKFLDFKLSKPNDCQTNFLDIFPEQTVMPLR

SEQ ID NO: 39955 - DNA, 3294 bp, DROSOPHILA
aaaagaacaaggccaaacaaaagcagacagaatcagagccagacaaactcacttgatggccgtcatcagcaggcccagaaggcacgacttgtcacgtctttgtggccccatctccaattccttctctttcgaaacacctatccccgtctcttttcccacaactgtctctttacgtctctttcccgcccgctgactatgtgtgtgtttaatgacaggacagctgcaatctgttgcaatgatatctatgaattatggcacaaactctcgcaaattgagttttatttccattgaagtggatattcatttgcatatcactcatacgccaagtgcgcagtgccaagccacaaattggccgagctgctgcaagtggcaaatcgttgacaatacaatccaaatggaataaactattcctacaacccacttccatccaccggattgagttctcgcaccggcttagccttcaggctttgtgtccattcggtctttgtcttggttaccaggaaatccagtgagagacatgattaaattatcgttgacttttgttgcaccaaaccaccccccccaccacccccagctgccagcaatcgaatcgaagacaagtcgagtgggaatcgggtgtatatatacgtacatatcaagtcagtcacttggcatggagttgctcccctcggctaaatcagattagttgctgggactcctcggggacttattgtgtgcatattgcaaatatacttttgtgctgagccgattgccttggctacaattttggtattaaaaaatgatcagaattgcatttatatttttgatagttttcaatgcgatttatacagggaattactcaacggataactgagatttctgcacttttatatacgtcattcgcaatctttattgagaaaattacattggaattgagtcggttatacctttattgttgtttttcgtatacaaattgaagttaagcaatttacatttttctagcaaacgatttacgaactcaatggcttatgtgaattcagaagctgttgcaaaacttttgaaattatctgcttcatctgttggaaattccttaaattcaaagcgaagctcgacaatttgacagttactgaagtttactgtttgcttccatatgtgttaatgtttgctatcgtcaacacatccaggggattaccttaaaatgtcaacctacgtttgagaaaagctcttgcaactacaatttacaaaactaatacatttaaaattatttaattgttaacttgctccttaagaaaacattttatacgttccaaaatctgaatggcatttaataaatgcatattatcatttgattatacttattaagtagccagagttgccatcataatgcatgtagcaagtgacgcacaccctcctctatctatctcgctctcgctcgctcacacacccattgccacatgcatcagtagagttgtctcgctctagagttgtctcctctcaatcttctcttggttaaatcggtgatgtgaaaagctcacactctttctctgtctttaaatcaacttctctctctctctctctatctatttctccctctttctttctctctctctctactctatctttatctctccctttctctctctctctctctctcttctgcctgtcttctctttctgtttgtgcttcatccacaggacgtgcccgcgttgagtgacggaatctatcacattgattcctttatactggaagcgcccaagagcgcgattttcgtgggattacagaatgatttcatgtgcgatttctcctactcatcggacgggcaaatggcgcccaacttggggcatgagacccgagatgaggaggccgcagttggtggcgattccgactttgattcgcagatggactcgccgaagcagacgtgtgactgtgatttcgagttggatgtgaacgatggcgaacaaatggaggaagacgatgaagaggagctggaggaagagcaggagcaggaccatcatgtggaggatcaggagtacgacgatggcattggtttcagttgtgacagcgacagcggactcacactgcccgaggacgatgatgagtttgtactggtcaccggacagtgtctgcccagcaactccagtcactcgtgcagcagttcgatgcaatgcagcagcggttctagtggcagagaggtggctactagctcctcaaactccatggaactggacatggttctaacaccgccaccgccaccaacactgggcaagcccaagtccggtgtacatcccctcaagttcctgcacaaaatcatctagaaaagaaactcattcgaaattcattcgctcacgttctgcggtggtgaaggtggttcagtgaccacctgctgctgctgcatgcaaatctgcatcgacatcattaaaatcaggctggccgaaattgcgcaaaaaaaagaaaaaagaaagagaaatgcgatatcgaacccataccattgtgacccgaccttcgctttgcccacgtagttcgtgctgagttcaccgcaaaccagaaatcagaacaaaatcaaatccttgatccttggggggatttgcagttcgacgtcattttcccctcattagttaagctgctaattgtgtggcgggctatatcctagatatacgcccccttaggtaggaatacagttaacagtattatggatataacctcattaaaaggcttacagtttatagaaagtattatgcgaaaaatgatggcaaccaaggtggatcaaatataaataaaacgatttatgcattgagtcttggcgcaattgaataattttacagagccctgtgatccacgtttcttaaccctaagtagctattgaaattttaataatttaatgttctcattggacggacaatcgtgcaatgcaaagctaagtaaatagttaactgttggctaaacgaatggctgccaaaactaataccgcacaagggctatatacgagtatataactatatatatatataaatatatatataaatgaaaaataaatatcttacaaaattaaatgtgtaccgtgagatcatttgactgttaacttttgaaaccaattacttcttggcatttggtcagaggaaatgaaaccagaacggagataaagatactctcctgatttatttggcttgaatttccttagcgatttgcatcgaattttccctcatttttccattatattccatttgaatgagggaatattgtacaataaaaagaaataattggcaagggagactgaaaggtgcacgcaatgtttgccttgcatttcattatgaatgc

SEQ ID NO: 39956 - DNA, 630 bp, DROSOPHILA
atggcttatgacgtgcccgcgttgagtgacggaatctatcacattgattcctttatactggaagcgcccaagagcgcgattttcgtgggattacagaatgatttcatgtgcgatttctcctactcatcggacgggcaaatggcgcccaacttggggcatgagacccgagatgaggaggccgcagttggtggcgattccgactttgattcgcagatggactcgccgaagcagacgtgtgactgtgatttcgagttggatgtgaacgatggcgaacaaatggaggaagacgatgaagaggagctggaggaagagcaggagcaggaccatcatgtggaggatcaggagtacgacgatggcattggtttcagttgtgacagcgacagcggactcacactgcccgaggacgatgatgagtttgtactggtcaccggacagtgtctgcccagcaactccagtcactcgtgcagcagttcgatgcaatgcagcagcggttctagtggcagagaggtggctactagctcctcaaactccatggaactggacatggttctaacaccgccaccgccaccaacactgggcaagcccaagtccggtgtacatcccctcaagttcctgcacaaaatcatctag

SEQ ID NO: 39957 - protein, 209 aa, DROSOPHILA
MAYDVPALSDGIYHIDSFILEAPKSAIFVGLQNDFMCDFSYSSDGQMAPNLGHETRDEEAAVGGDSDFDSQMDSPKQTCDCDFELDVNDGEQMEEDDEEELEEEQEQDHHVEDQEYDDGIGFSCDSDSGLTLPEDDDEFVLVTGQCLPSNSSHSCSSSMQCSSGSSGREVATSSSNSMELDMVLTPPPPPTLGKPKSGVHPLKFLHKII

SEQ ID NO: 39958 - DNA, 5313 bp, DROSOPHILA
tagttaactgttggctaaacgaatggctgccaaaactaataccgcacaagggctatatacgagtatataactatatatatatataaatatatatataaatgaaaaataaatatcttacaaaattaaatgtgtaccgtgagatcatttgactgttaacttttgaaaccaattacttcttggcatttggtcagaggaaatgaaaccagaacggagataaagatactctcctgatttatttggcttgaatttccttagcgatttgcatcgaattttccctcatttttccattatattccatttgaatgagggaatattgtacaataaaaagaaataattggcaagggagactgaaaggtgcacgcaatgtttgccttgcatttcattatgaatgcaatttgaggtggtttcagttgggttgggttggtggccatcgagatttccaatggctgttcgctgtgttgcctgctgcctggcggatgcagttggtccttcattattctgtatttacgtattaacgcttccctttatgcaggccatcaagtgtctcttccccggcaggatttaactctcctgaccttcttcccctttcccattttccccttccccatcgacacacatacacatttccaaaatcgaagtattaatgaatgcataagtaaaagagaaagagagagagagagagagagagagagagaaagggaaagggagaaggtgggcaacaaagggaggcggcatcaggtggcagctggcttaattactccgccacgcccctttgccagcccactcccataatccacagtgcagtgggctttaaggatattatattacagacactctcgatagcgagaatcgagcttaagcccgctcggtcgcctcccttccttaccaaattaattgaaaatatttattgttatgcttattacatcggtctcttccctctctctctctccctctctctctctctacctctctctcttcgccatcattgaatcggttcaccatggaatcaccgcaggagcacatccgagagtcgaaggagagcaagctggacgagatgggccgcaactccaagggacgctcgcgggagaatatatccaggtgagtcttccccattcatctggattatcattcaaaatgtcgaaatcttgaatagacgatacttaatcgcattacgtatacgcagtgtgcattgtgcattgtgcagtcgtgttgactcatattaaactaatacccattatggtccgctagaagtaattagatattaacttggcgtaaataatgtaataaagattaattattttattatgtgaagcaaatgcctgtaaaatgccttatgttatccctgaaagatgactgaaaatccctcaatttaattatataattttccaaccgtctgcaggcaaaagcactcgcaaacatcgctgcagatcctggatgatgtatccaatcgatactatcgcgaggcggttccactatcgtcgcagtccagcaaggcggacttcaaggagaaggagcacagcattctgcgccgccatgccgatatgacgcaaacaagtctctgcggcgttggcgaggatgatggcgaatcctcatcgacgacgacggccacacacgagatgatgactaaggcggccatgtcggcggtgccctccaatgcatgcgacatgggctgtcagacgaggtgagttccagacccattcccagttcccagcacccagcaccgacagttcccattctaatcgaccctgtgtgtgcagtcaaatagatgccagaaaattgcaaagtcaacggcgggcaaacactaaaaacaatgacaatgcggagccgggcttaagtcctggaattcaggaagttacaacccgggcgggggtctatacatatacatatatgtacgttgctcgaacagcacaaatcgatgcaaatatttgtatttgcatgcgtctttattggatatagcgacaggtcctgcaatgttggagtttgtaggattcgggaatgtgggttagcaggatggaggaatggcaggatgccaggatgccacgatgccacgatgccagtagggtgatggtttggtgggctgatgggatgggttgacagccaggcaggcgggaaggcagacagacatacatatacataggcaatggcagtgtcgggccgacaggcggaatgcagtgacacaatgccgacgtgcccagatgaagatgattcatgccaccaaatagtgatgggaacaagtcactgtcacagccaaactgctacaggttgttcggggtgatttattagtgggttggcatttatcactggttgacagtgtacacatgagcgcgcacaaagatttaaatgccacggattagagagatttttattaagatacaaggaaaccagaacaatgaatttaaacgattgctttacgttttgaatctaacttgttttttaatacgcaattgctttgtgatttttttctaatttcacttgtatttatgtccacaattgttgtaccataactaacttattttaatttatgtaattgctgtatggttttgttttccaatttcatctgtacgaatgtaagctactaatatatagattaagacacaagcattgtaaatgagtatgtaaataaaagtgatttgtttttgatttagtaacttcttcttatattctattagttttcataacaatactgacatatttgcaactaaattatatttattgaacatttaatttaattttctttatacggacggtcactggtcagcactgccgaagtgttagaagtgtcaacgggatccccattttagagcatatggctctgatagccatctgacggattcaattcaactgattggcgctcaccattgttccacaatccctgtcccgcggctacacaatcacctttgtgctaaccagtgcctcttgtccgcatcgttcctctaagtcacactaaaaaaaaaaaaacactagtaattcgttcgtaatagggtatacaaaaattctgatggcttgcaaactgttgcatacttttgcgggtacttaaccaagttattgctctgatttctttagataggatctcgttagaattatttgaactgtgtcactaaaacctgatttcttgcagtgtcctcgcaaccaattgccgtcgtgtgtgactgacaaatattaaaacctttcactttgctttctctccactttctcttctcttctctcaccaatctacgcctgctcctccgctccattggcgcccacctcagggaatcgctgtttgtcaacagtcccggaattggaccgtcggcgggtcctggtgttggtgttgctgttggcatcggtatcgccgtcgctcccggcggcggtgttgccacgctaatgagacaaaagtccagctcctcatcgctgggcgttggtggtggcgctgggggcggggccatgatgatgccgcccccgccaccgcgattcttctccacctttggctatgagccatcgggatcgccggcggtggcaacgctgacaaggcgcagcatgcaccagcagcagcaacatccgcagatgccgcgccaagagtccatggagatggaggagcgacacagcggccgctcgcactacggcggcctgctggtgacctcgacggccaagcagccgcaggagatctgtcaccatcatcaccagcatcagcagcagcatcagcagcagcatcagcagcagcagcagcagcagcagcagcaacagcaacagcagcagcgcatgcaccatgcacatccgcatccgccgagtattgctgcacgtttgcctgcgatgaaggggcatggaacagtcatgggacagactacgatcctgcccggcggcaacaagcagcagcagcaacatcagcaaaagaacgaggagtccaaagtgtttatcgacatacggaattcagcgccagacgtgattatcatgacgtcccattgacatttaaggatggcccgccaatcagcaacaacaacaacgacggtagagagcacgaggagcaggaggagcagcagcagcagcagcagctgcagcaggaggagcagcagcaacatcggcgcaaagaggatgcgttgcagcaactggacatcggccaacatattaaccgcagccgcagcgtcgctgatgacacaacaaggacaccgaggaggcgcgttgcaatcagacaaaggggcggtggtgctgctggtgttttttcgctacgcccacccacgtccacgcccacacccgcacccacaaccacccaccatcgcccacacatccgcatccggttcgcattccgttgcactcgtttggttcttaaagcaaggtgaatgcgttcttttttaaactgctgcagtcacaagttttttcgtaatgaagacttcgaaactttatcagtaactattgttttaaaaaagtttttaaactcactatatagtatttgggaacttgcttatgagcgcagaatgtacatacagttgcgtttaatttatttatgttatttaatatttaatgggtcaccttcagctcataagctccttgaaaaacacttaattgtacatatttatttcaattgataactttgttaaatattcaaacatatattcgccgcaactgagtatatatgaatatatttagaatgcaggacgattgcatctgcaattacttttggttcgacctatgtacatttttattcgaaatttccacaccaagtgcaggatgtcaaatggccgaaatggttgggcaaaataaatggtgtaacagccaattgaagggcctttaagacgacataagcccactaatagctggacagcaactggggctgactgggcgagacaaatggaagatgtgtgtcggtccattggcctcggccagcccctttgcaatagccatctgggtaataggaggagcgaagggtcctggccaggagaaaactctaagagagagagagagagagagctgttccagttgttgtagccggcggaccgcaattgctggcgacatttgccggacattctacggctgcgacagcggcattttctgctcagaaaacaatgcgaacgcaggacacagatacggatggggatgcggatccggatgcggatgcgaatgcagatacaaatacgtggtagtgggagtgggaatgaatgtgggccggacagacactaagcagaccgctgacaacgtggcgtatgagcaacatgttccagaacattgttatcggactccattctagcattctagcaagcatacacacctttccacattttcacttttcccccaaaagccggtttgcagcttggaaaaatgctcgacaggaacttcttcatt

SEQ ID NO: 39959 - DNA, 1377 bp, DROSOPHILA
atggaatcaccgcaggagcacatccgagagtcgaaggagagcaagctggacgagatgggccgcaactccaagggacgctcgcgggagaatatatccaggcaaaagcactcgcaaacatcgctgcagatcctggatgatgtatccaatcgatactatcgcgaggcggttccactatcgtcgcagtccagcaaggcggacttcaaggagaaggagcacagcattctgcgccgccatgccgatatgacgcaaacaagtctctgcggcgttggcgaggatgatggcgaatcctcatcgacgacgacggccacacacgagatgatgactaaggcggccatgtcggcggtgccctccaatgcatgcgacatgggctgtcagacgagggaatcgctgtttgtcaacagtcccggaattggaccgtcggcgggtcctggtgttggtgttgctgttggcatcggtatcgccgtcgctcccggcggcggtgttgccacgctaatgagacaaaagtccagctcctcatcgctgggcgttggtggtggcgctgggggcggggccatgatgatgccgcccccgccaccgcgattcttctccacctttggctatgagccatcgggatcgccggcggtggcaacgctgacaaggcgcagcatgcaccagcagcagcaacatccgcagatgccgcgccaagagtccatggagatggaggagcgacacagcggccgctcgcactacggcggcctgctggtgacctcgacggccaagcagccgcaggagatctgtcaccatcatcaccagcatcagcagcagcatcagcagcagcatcagcagcagcagcagcagcagcagcagcaacagcaacagcagcagcgcatgcaccatgcacatccgcatccgccgagtattgctgcacgtttgcctgcgatgaaggggcatggaacagtcatgggacagactacgatcctgcccggcggcaacaagcagcagcagcaacatcagcaaaagaacgaggagtccaaagatggcccgccaatcagcaacaacaacaacgacggtagagagcacgaggagcaggaggagcagcagcagcagcagcagctgcagcaggaggagcagcagcaacatcggcgcaaagaggatgcgttgcagcaactggacatcggccaacatattaaccgcagccgcagcgtcgctgatgacacaacaaggacaccgaggaggcgcgttgcaatcagacaaaggggcggtggtgctgctggtgttttttcgctacgcccacccacgtccacgcccacacccgcacccacaaccacccaccatcgcccacacatccgcatccggttcgcattccgttgcactcgtttggttcttaaagcaaggtga

SEQ ID NO: 39960 - protein, 458 aa, DROSOPHILA
MESPQEHIRESKESKLDEMGRNSKGRSRENISRQKHSQTSLQILDDVSNRYYREAVPLSSQSSKADFKEKEHSILRRHADMTQTSLCGVGEDDGESSSTTTATHEMMTKAAMSAVPSNACDMGCQTRESLFVNSPGIGPSAGPGVGVAVGIGIAVAPGGGVATLMRQKSSSSSLGVGGGAGGGAMMMPPPPPRFFSTFGYEPSGSPAVATLTRRSMHQQQQHPQMPRQESMEMEERHSGRSHYGGLLVTSTAKQPQEICHHHHQHQQQHQQQHQQQQQQQQQQQQQQQRMHHAHPHPPSIAARLPAMKGHGTVMGQTTILPGGNKQQQQHQQKNEESKDGPPISNNNNDGREHEEQEEQQQQQQLQQEEQQQHRRKEDALQQLDIGQHINRSRSVADDTTRTPRRRVAIRQRGGGAAGVFSLRPPTSTPTPAPTTTHHRPHIRIRFAFRCTRLVLKAR

SEQ ID NO: 39961 - DNA, 3120 bp, DROSOPHILA
acatacgagcatccaaataaatacttgaaaaaatgcttcaaaatgtatggattaaatggatatggcgaaagagataagagcatagaatatacccttctcgccaaaaattttccttgcgagtgtttgtattcccatctaggcattcctaaaggaatccttaggactttataccgaagggtattgtgtgtgaggatttgtgagtatctgaatatctgaatgtgtgtaaaataagcccaaagcgatcgaataaaaattaattttgtggaaatgtgaacgcagttgttgtcttaattcccgggtggccgcgcttcaatcgctccaaactcagcccgaaaatatgccattagccggcagaaccggcccgaaagtagatgacacttgagtgtggatctgttggtaaacacggaaccggaggcaatcggatggcccaattagagggaaacacccgtattcgtattcacattcagctggaccgcaccgcccggaggtatcacaatccacaatcatggctgaaacgaataaagtacgtggtatcgcgaataaacaggttgtgatgggctttttaaagggtatgtaagtagcagggatgctttacagattttttaaacttttttttatgatagaaataccaaataggatatcgtattgtacttatttaataggaagaaagggatgaatattatttattttcccaaagtggactattattttttgtattcgtgattgatggttttttattttgggagaagtgcagtatttacgagtcactaacgttctatcttgtatctggcggataatcgggcgtgtatctgaatctggagctcgctgtgcgaaatgcaaattgtcgcgcgctttgctattgttttccatagatttatgcactcggtcgatgctgcggctaatttgtggtcagtcgtgtgagtggccagctcatcggagtcggtttggagtcccatataaaagtgaatcgcgccggaggggtcggtagtcagcgcccaagatgccatccaatcagtatcatctgctgcagctgcacctgctgctctgcgccttgctcctgacctctggccaaaggacaccggttcgcgttccgccgcgaaatctgcaggtgcccaacattgggggcgagagcttcgagagattcgacacccgatcggcatcgacgtcgagcagcggaagcagcgagagccaggagaccagcgatgagatgcgggagcaactgaagcaacttctgggcgaccagctggccaccgcctttgcccccttggccaccacgccattcaccaggcgacagccggccattgcatcacccagctcgggggcggctgcccgttcccagttcgccaccgatccggatcagggccaggaagaagagtccccggaccaggacggcgaggcggaagaggcagaagaggaggaggaagacgaagaggagcaggaggaggccactccgcaacctcagccactgccaccagctctaccgcaaccaggaggcgtcttggaggagctggctggtggtcaggtggacgaggagctggaggattataatgcctggcgcgacaatttctatgaactcaacgaagacggaagctatatctttgggtgagtttgctggccgaaaagccgttaccatgactattaaaaaggcgaattggaaactatagatttggctgtgaactaagccttcttctcatctttggcaagtagagtggggaaaacataaccattcacttaactcgaatttcagaacgtttatcttaataactatatatttaggacatttaattgatattattatttggccagctactccattccccatggcattcgtcgctgggagaagggctactattcggaggagcagcatggccgggtggttgagggcttctatgtccagccccgtcacgattcccagggcctgagatatgagcttcgatgctacagagccgattccgagggctatcagccgcgtccaggtaacgaattttccttagtccttatatagataaaatatgtttaaatacatatgtgcacatattattgcagttgagtttctgaggacgccgccaattgtgaggcgcgatgccataccgcgtgttaattgcttccaaaatgcttaaaaataatagacgaaaataatccgtaaataatcagaaaccaaacgttgaatgtgtgactttaaaatcaaataacacaaatcttaactaaagaaagtggtaactgccctaatttttttgtgcacgaatgtaaatatatgtatggaaaatgtccgcaatgtgtgaataatttcgatctaaactggtaagactgataaagttggcgctctagttttctaagaataaagacataagttccacacataaatttcaaaatattaagctatccgccacataaatggctgaaaatttatttgcttgaaattaggagagtccgaccgtattttggtatactttatggccaaattcctttaagcacgattgtttgggaataaaaacaggaaaccgtggtccataaagaacttgagcgcataagaagcataacaatcgcttaaccgacttctcggggcttacccgtacagtcatcacttccttgtttgctttggcgccgctttttgtttcattcattttattcgcctttatttttgccactgtgtttcagttgccttcggttggttctcggtttcaagtttaattcaaatggcattttaaaatactttttatttgtttttattgtcttttattttcgctcgcctcctcggtactccagttcgctctactacacagagagaaactgtagatcactaatcacagtttcattaaatctttaacaatattagataacatcaaaagatatatatatatattatatgatttggtacttgcagcccgaatttgccattctaatactcctaatttttgttttaccccacattttctctctgtgtacgcgtcccaccgtgggcaaacgagatttgtagctatgtgtgagcttggcgcggcttttgcggcgtccctgacgtgcagcagtattcccacagttttcaatttttggcgatttgttgcggcacttaacggttgtttgttagctgtcattgttgttgctgatgaagcgccttttgtc

SEQ ID NO: 39962 - DNA, 846 bp, DROSOPHILA
atgccatccaatcagtatcatctgctgcagctgcacctgctgctctgcgccttgctcctgacctctggccaaaggacaccggttcgcgttccgccgcgaaatctgcaggtgcccaacattgggggcgagagcttcgagagattcgacacccgatcggcatcgacgtcgagcagcggaagcagcgagagccaggagaccagcgatgagatgcgggagcaactgaagcaacttctgggcgaccagctggccaccgcctttgcccccttggccaccacgccattcaccaggcgacagccggccattgcatcacccagctcgggggcggctgcccgttcccagttcgccaccgatccggatcagggccaggaagaagagtccccggaccaggacggcgaggcggaagaggcagaagaggaggaggaagacgaagaggagcaggaggaggccactccgcaacctcagccactgccaccagctctaccgcaaccaggaggcgtcttggaggagctggctggtggtcaggtggacgaggagctggaggattataatgcctggcgcgacaatttctatgaactcaacgaagacggaagctatatctttggctactccattccccatggcattcgtcgctgggagaagggctactattcggaggagcagcatggccgggtggttgagggcttctatgtccagccccgtcacgattcccagggcctgagatatgagcttcgatgctacagagccgattccgagggctatcagccgcgtccagttgagtttctgaggacgccgccaattgtgaggcgcgatgccataccgcgtgttaattgcttccaaaatgcttaa

SEQ ID NO: 39963 - protein, 281 aa, DROSOPHILA
MPSNQYHLLQLHLLLCALLLTSGQRTPVRVPPRNLQVPNIGGESFERFDTRSASTSSSGSSESQETSDEMREQLKQLLGDQLATAFAPLATTPFTRRQPAIASPSSGAAARSQFATDPDQGQEEESPDQDGEAEEAEEEEEDEEEQEEATPQPQPLPPALPQPGGVLEELAGGQVDEELEDYNAWRDNFYELNEDGSYIFGYSIPHGIRRWEKGYYSEEQHGRVVEGFYVQPRHDSQGLRYELRCYRADSEGYQPRPVEFLRTPPIVRRDAIPRVNCFQNA

SEQ ID NO: 39964 - DNA, 2204 bp, DROSOPHILA
ttatatcaatcactcgattattaattatccagtcatctgaccaatgtatgtataaatgattttaccagctaaccatctcctacccatctgttgcatatatgaaattacgccaaccgctcaccgatacatattcaatttaattttgatattgcacaactttcaccattgacactaatggtatagcaatttaagctcgatgaagaggcaagtcacttaggaagtgaaggggatgatgttcactaaacagttctgtgacatccccatactgcacttaaccaaatgaattattaaatttgtttgtagatagtttcatctatattaccagaaccaattcgaccgggtagcaagcgttttttgatcaattttatacatgttttcatttcagggttaagaacttttgcggttcagctggcgagagtattacggcggagtcaaatatcctgcacttgcgcttctacgcagatcaaaccgcgattaactcgacatttggcattctgttcacggcgttccgggaacgtggagctggtaagttcaattcgcacaactccgtatcggaatcggaagacgaacccccgaatccaggagttcgaaaccagttccaagtgatggggccccctttgatggcgctggcaaatcccttgaattggcaacaaatggccggagcgccaaagtacaaaggaatgcccaaaaatcctgggggcaatccggtgctaagcttgccccaaatcccggcgagctaccaaccatacccccatccatttcagctgctcatttggctgacagttggagaatcacaaggaatgggagatgggctggagatggaggagcagtcgtttgtctaaccaactatcttcaccaggccaccatatcccatctaactgtctgtctgtattttggtctgtccgactgtctgaatgtctaaaggaaaaaacaggaggcggaggtcctgcgtgattgccgccagttgccagaggcaaaaggctaagcactcttttgtcattcaacgattgtcctttgtccccgggccagcattgtttacttttaggcagccaaagtcctcgtccaggaccttcgacaccagctccttctgctccagaaaccactcctgctcctgattcggctcctgctgctcctcctcccctcctccttcagctcctttagctcctccaactccttgtgcgccatctacttggaccgccagcatcggcaattattgttgttggttgagcgatttatgtcggagattacgtgcatttgccttgtggtctcgcccatcgtcgcctttcaatggctgcactgtggaaagtccatcaatttaaagctcacaattgatcgatgctttaagtcaaattgaattggcattccacttaatgccgaattgaattcggtccaccataagctgacaattcaattgcgtataacataaaatttaatgcatgcttaaaatgaatttaaagactagctctttgctaccttatataaatggaatatttatggagtatttgcacttggaatcaaataatcaaatttcatgtatattttagtaaaacgtgtaattagctattatatttatatcaattttcgtaaaaacaaaacttctttttatttaaaaagttatctctgcggcttggcaatattttgaaagcaataaaaactctctattcagtcatcgtgcttcgtgaataaaaaccatattgaattgactgttgagtgtccttcgaatgacaatatatttatatgtttttatgcagtcgcttcacactcaaatccagtggagagcactttcaattgtcgtcaattgtcatcgcattccactgtgcgatttgtgctttgattggcgttttagccattttacccattttagccgcttctctcgtccgctcactttaactgccattttgtgccaaattttttataactttctctaactctcaaactgtcgcaccatctctttttggcagcctgcaccgaggacgagtacgattgcgaggacgcgacctgcatatcaaaggatttgaaatgtaataacctagacaattgtaaatttcgatgggacgaggagggctgcacggtaagtgacacgcctatacagagaaaaccaaactgacaatcagttgtgtgccatgaaaatcgatgtaaagagtttaactgattttgtgctatttttaataccctatcactaagcagttaaaaaaaaaactttt

SEQ ID NO: 39965 - DNA, 204 bp, DROSOPHILA
atgctggcggtccaagtagatggcgcacaaggagttggaggagctaaaggagctgaaggaggaggggaggaggagcagcaggagccgaatcaggagcaggagtggtttctggagcagaaggagctggtgtcgaaggtcctggacgaggactttggctgcctaaaagtaaacaatgctggcccggggacaaaggacaatcgttga

SEQ ID NO: 39966 - protein, 67 aa, DROSOPHILA
MLAVQVDGAQGVGGAKGAEGGGEEEQQEPNQEQEWFLEQKELVSKVLDEDFGCLKVNNAGPGTKDNR

SEQ ID NO: 39967 - DNA, 3331 bp, DROSOPHILA
gggtatcggaaagatgggccaagtcgatagcaatgtgggacgatgacgcgactggtcaatgaaccatgtcgatggaagtcagttggggatcagaatcggaatcggaatcgggatcggtatgagtcgtcctgcatctgggcctgacacacttcggtcggcggccggcgcaacaaacaaataatcaaacaaacaaacggagtaaacaggccgaaggatctgacgcgtcggcccaaaaacgctgtcaaaatcacaaaagccaccgtgacgcctcacaaaaacccaaaaagcccgacaaaagaatcgttctcgttctcgaggggggggaagagattggtggtcagagatgtatgtttctcgaggggaataaagagacgcctctaaagggttaaccacagagcacaaaggcagaacaaacgccagagtaattattatgaatgaattttctgtattgcccttgttagtgctgtggccaagttccagaatatggattttctcaatatagctagaaaatatatggcaatctattctcgaattttggcttcaaaactctagttatatatatatatgtatgctatatatgggcaactactgatatattttaaatttagtatatggtatagtactgtcttgataaacacttcatatttatatgaaatacagccagttttggtggcaagaaagtgtagccacatcgggcagctctggttctgaagagccgtctgataaggaagaaaaataaaggagtgtgggtgttgaccaccaaagccattgccaaatcatttgggcaaaagaggggtttattatacttcagaaccagcctgttgtcggcctttcttcatttgccactttcttgttcctgcttttcgcatggacatttttcatctttagtgccgaaagacttcactcgagtggtctgcgtctctttcgctggccacgggtatataaaagccagcgtttcgccccaatgccacataatcaattattgaattctgtgtgcaacatgttccaacatttcaagcagatctatgctgggctgggtgtcagttctctgatggtcaccctggccatcctactgctccttcagcccgtggatgcacgctggactcgcagacccaggcgtaccaccacgccaaggagcaccacaagcataaccaccgcgaatccggatcgtcatcagcatgtgcaccactggccaccattggtggcaccaccgccacagcctcaaccacagccaccagtggttgtggtgcagaagccaagtcacacggagaccagtccccgtctcgtcgatagcttcgatcagagatcactggacgggcagtacgagttcaggtaaggtatattagaactctatagaacttcgagtgcttatatatatatatttatcacacagatatcagctggataatggcaacacgcgatatgagcgcgcctactggctgcccgtgggcaaggatctcgttctggccaagaagggatactattcggtgccactgccaaacgacaagtactccacggtgttctacaccgccgatcatcgtggctaccatgtggacatgcgtgagttccattgccccaaggtccattcacattcaaaaccgctaatgaatttatccaaaatgcagagacattatccgtagagcagccgctattgccgcgcagcctggaagtgcccggagtggaaagggatgtgggatcgggaatgggaatgggcaccggaatagccacgggtacggggactaagcgaaattcaataagcgacccggagcgtaacgagctgcctgtggaagtggaagtgaatgaggctgaggatgtggatgtggatgtggacgcaagtgatgctggcaccgagctggttcctaatgtaagtgccaccgggggttagctttcctcggcgattttcagggcccccatcatatgagtacacagggaaaatgtttcaaaggggataacctaacgaaactaaagtataaccttaaatactttgaaactaaccttaatatttaaaattaaactggtaacagttttacaactacatgtatttaatgggaactgtcagctacacattttaaaattgtcgaataatcatgataaatcgtgatttacttatacaactcatgtaggccatgcttaattcaattttccactgtgcatttgccccctttgctgcaggctgtaaaccaagtcgaaaccgaaaccgaaccatcaactttggccaacgacattttggcaactggagcaccagccgacagccatgatgatgatcacgatgacgatggcgatgaggatggggatgacgatgttgatgatgatgaaggcgcctcaaactgaaagcccgaacattagaggacatttcggcatacagagaatggagattgagactggcaggggaactggcacacacttggctgcctcgcagctcgctctacttgctgcaaatcaaattgaaaacaattgttgcagtcaccagtccgacacagttgagttggccagtagtccccatataccatgcagcaggatgagcaggagctggaggagaagtcaagtcgactccacttaactccatcgtcatcttcatcttggaattctaaggggaatgtgtctcaattgctcgcttgacagctccttttaggtcgctttctatgttttctgtttgcctcactctgtgtgtgagatggtattcttttttttttcaatatttaataaaaataaataataaatgtaggatataaacttgaagtggcttttaaatcaagcttgcaactaataacatagacgcactttcaaagaggagaaagagtggcatactgctattcaacggattaatatctttaattctctctttaacattgaacatatttagtcctttaccaatgtaaatgactcataaaaagttatttttaaaaagcgagaattgtcttgctagtgtattgctacgaaattacatcgtgttcagacaccgaaacgaggtacattgaagcaatttcaaatagtttagagaggtgtcatagccattttcaatggcccaaaggggccaaagaccaaaagcaccgtgtgtgtgtgtgtgtgtgtgtgtgatgatggccaaaagatgagacattatgaggcgtctgacaaaaacacattcgagcctcaatttgccagctgcctgccggctgtcttttgtgatgcctttggtgcgctgctgcctttgcccggtttcaatttaaatggtttctggaaaaacgccccaaattgggtggccgtactggtgaaaaggcgatgccaggcggagatttgttggcggcaaatcggtgagcattcataaaacttcaccatctctggacctgcc

SEQ ID NO: 39968 - DNA, 897 bp, DROSOPHILA
atgttccaacatttcaagcagatctatgctgggctgggtgtcagttctctgatggtcaccctggccatcctactgctccttcagcccgtggatgcacgctggactcgcagacccaggcgtaccaccacgccaaggagcaccacaagcataaccaccgcgaatccggatcgtcatcagcatgtgcaccactggccaccattggtggcaccaccgccacagcctcaaccacagccaccagtggttgtggtgcagaagccaagtcacacggagaccagtccccgtctcgtcgatagcttcgatcagagatcactggacgggcagtacgagttcagatatcagctggataatggcaacacgcgatatgagcgcgcctactggctgcccgtgggcaaggatctcgttctggccaagaagggatactattcggtgccactgccaaacgacaagtactccacggtgttctacaccgccgatcatcgtggctaccatgtggacatgcagacattatccgtagagcagccgctattgccgcgcagcctggaagtgcccggagtggaaagggatgtgggatcgggaatgggaatgggcaccggaatagccacgggtacggggactaagcgaaattcaataagcgacccggagcgtaacgagctgcctgtggaagtggaagtgaatgaggctgaggatgtggatgtggatgtggacgcaagtgatgctggcaccgagctggttcctaatgctgtaaaccaagtcgaaaccgaaaccgaaccatcaactttggccaacgacattttggcaactggagcaccagccgacagccatgatgatgatcacgatgacgatggcgatgaggatggggatgacgatgttgatgatgatgaaggcgcctcaaactga

SEQ ID NO: 39969 - protein, 298 aa, DROSOPHILA
MFQHFKQIYAGLGVSSLMVTLAILLLLQPVDARWTRRPRRTTTPRSTTSITTANPDRHQHVHHWPPLVAPPPQPQPQPPVVVVQKPSHTETSPRLVDSFDQRSLDGQYEFRYQLDNGNTRYERAYWLPVGKDLVLAKKGYYSVPLPNDKYSTVFYTADHRGYHVDMQTLSVEQPLLPRSLEVPGVERDVGSGMGMGTGIATGTGTKRNSISDPERNELPVEVEVNEAEDVDVDVDASDAGTELVPNAVNQVETETEPSTLANDILATGAPADSHDDDHDDDGDEDGDDDVDDDEGASN

SEQ ID NO: 39970 - DNA, 3061 bp, DROSOPHILA
tcattacaccagcttattagctttaatataatagtatatttagcatagaaaccagcaatatagattcgacggataaagatacctactactcacttcagtctttatatacatatatctaaagtgttttcacaaattaaaacaaccatattttctacagcctaataaagacatgaatttaattgcctattagttgttgaacagccattctcaacggttagcacaaaaggcactttatagcgattccctggccatccatcaattggctgcaaatcgattatgtctgccgtatcagtttcgaactgtgattgcttagccccacgccctttccgccacatccgccccctttccaccttaacccccggaatgccaacattatcgaaacccactggttaacccattgtgagcaatttggcggccgtgcgaacagcgccaaaagcaaacacacaaaagaggcgcaaccaaattgcccagttagcaacctgtccagcccctgccccgccccaaccgccccctttaacccattgagctgggcacaccgataagcatgtgtgtaagtagatgaaattaagattttttttatatgattaagcgtcgagaatttttgacggcaatggctcagagagatgtgcgtgcactgagcgaaaaaggtacgatttctgcattatattctacaaatatatatatatagattttatcaaaatatttcatgacttctgatagatacaaataaaatataaacgagcctcataagtcttaagcttctaattattttgtaatgcagttagctggcttattgctaggatttttaatggttaaatggcgcaactccttttctagccgtgtactcggctctcagtcaccctttcggatatcccgcttcagctcaggctaaagatcttcgctgcctcggtcgccgccgactgcgctgctcgcctcgctgccttctcgatgtcgactataaaaagccaatgttacactgtttccgaattaaaccgctaagaaaacatcgcgcgacagcacacacaccatccacctgcgtagcccaaacatcccacacatccatcccaccaccacccataaatcacattacatccacatatccacacacacattcacaccgatccgagttaaaatggccacttccggttcgatcctgttcgccatcttcctgctgagcgccaccctcatttccgcccagcagatcaaagagtcggcgcccagtgcgcgattactagatcgattcgataaccgatatcccgacggcagctacgagtatcgattcgagttggacgatggaaccgctcgctatgaacgtggatatttcgttaagatcaacgatgtaaagaccctgatggttgtgggctactatgcctatcggatgaccgacgggcgttacatcaccgtcttctacaatgccgatcagtttggctatcgacagaatcagtgtaagtatcggaattgcggttttcggtgtgaagtgatcacaaagaatttcaaagtgatgacaaggggctttcattcttagaaatattttatgtattaaacactaaaatattcataaataagcaaattattttcataggaaggatatgatttgtgtactttgttacccttttttttatataatttgatacactagatcgattatttcgagtgagagcacacgaatgacggctctttttgaacacgagtgaaatgattaatgtaaacgagccaaccattatcgcaactctttcagcgaaaattaataagacacgcaaacacccgtcgattattttcagcccaagagcacagatagccctccactcgaatctggtttatattaaattatattattttgctacgcccacagcgatcacgccgcaggaatatcccaatctgccgcgttccatcgaggtgcccatggtcagcgaggcatctgcggcatccgcggcatctgatggcgtctccagttcccagttccaatctcagtttcaatcccgtctggatgcccatggtaacccctccatcacgacgaccacgcccaggggggcggggacaaatcgtaggggccgctactgagagttcgtaattgcacaccatgcccattattattattggctccctacatcgttttttataccttattttattattttttttttttaattttgtgcccccgactactcgtattatattattatgaatttaatttctgtccacatttttgttgtgttcaatgaaatgggattaaaaaataataaaaatttattaaggcaaagcagcgaaaaattatgaatttattattgaagatgtttccagttgtttgtagctgttttgtggatctgttttttattgctgtccacgccccttcgcgcctccagccccccttaccagagttcgttgcgaagatttcgcgatttttcgaaagtcgccgacaatttggcaataaatttaccacaaagcgtttcgggcaataaaacatacaagtgcagggcggcccctcgccaccctggggttatatatatataaatatatatacatattggatctggacatatttttgcatttttaacacatttttggcgaggttctcgagccgagggcaattaagaaacgaaaacgaaaccaaacaagaaaatgtccagtgcacagagaaaaactataaggtattttcagcaaaaaaaaaaacaagttgacttaataaataattaccgcacttattgcctacataataatttcattgatcaattttattctgtgcagtagaattaatgtataaatctaagtatctgactttatatgtatatgtatatatctatgtatttatgaaattacaaaatacatttcatttggagtgtaagacagcagcgatttgaaacgaaatgggaatggaatctccgattcgcagctctcgagtgtgcgaaggttcatcataaatttattaagtgccgacaggatacctgggaaacgagttcaacgctcggctgacttgcggaatgaattcaactggcagctccatttttttttttttttttttgcatttttgattgtgggcccgactattaagccataaaacata

SEQ ID NO: 39971 - DNA, 654 bp, DROSOPHILA
aaaacatcgcgcgacagcacacacaccatccacctgcgtagcccaaacatcccacacatccatcccaccaccacccataaatcacattacatccacatatccacacacacattcacaccgatccgagttaaaatggccacttccggttcgatcctgttcgccatcttcctgctgagcgccaccctcatttccgcccagcagatcaaagagtcggcgcccagtgcgcgattactagatcgattcgataaccgatatcccgacggcagctacgagtatcgattcgagttggacgatggaaccgctcgctatgaacgtggatatttcgttaagatcaacgatgtaaagaccctgatggttgtgggctactatgcctatcggatgaccgacgggcgttacatcaccgtcttctacaatgccgatcagtttggctatcgacagaatcagtcgatcacgccgcaggaatatcccaatctgccgcgttccatcgaggtgcccatggtcagcgaggcatctgcggcatccgcggcatctgatggcgtctccagttcccagttccaatctcagtttcaatcccgtctggatgcccatggtaacccctccatcacgacgaccacgcccaggggggcggggacaaatcgtaggggccgctactga

SEQ ID NO: 39972 - protein, 173 aa, DROSOPHILA
MATSGSILFAIFLLSATLISAQQIKESAPSARLLDRFDNRYPDGSYEYRFELDDGTARYERGYFVKINDVKTLMVVGYYAYRMTDGRYITVFYNADQFGYRQNQSITPQEYPNLPRSIEVPMVSEASAASAASDGVSSSQFQSQFQSRLDAHGNPSITTTTPRGAGTNRRGRY

SEQ ID NO: 39973 - DNA, 5265 bp, DROSOPHILA
attgctaaatgatatatatttcataattggcttgccaacatatttgggcattcagctaatttcagttcaagttttatgttgcattttagcagcaaattgcacttgaaaagcctaaattgtttttcaataccaagtgcaattgttttgtttctagcacttcagtttttattgcgaagttttttttttttttctttttttgctgctccaccacttggttttccccattaaatcccacttggctccacgattcattcgccttcgaatttgttgttcgtttgcttctcatggaaattggcgcgtttatcttgcattattttgcgcacattcgcttcgcataactttcggcctctgttgcagtcagtgtttcgttggctcaacttgaactcagtccgtttgaaatgcactgaacgaaaaggggtagtgcaacacaaaataagaaatttaatataaagtgatatttttgggaaaatttaaccacatgtagttgcataaaatatctaagtatagaaatgtagaactatagagaataaagtattctaactgctacgaaatatatatatttttttttgcaacttctgctttaatatttttgtataaatgccacacctagctgttacatacctacccacatctcaaatatacccttctatgctaaggtgcaacggatatgaatacctataatggtgtccattagttgcctattaaaacgcccatttaagaccatttctttcagtgctcccgaggcttttgccagtgcttccgtttcctttagaacgaaagaatggggctgcaaaggacgaaggagagcaaaaggacgaactgcaactggcatttttggcgttcccggcacgcgctcactaattttattccttaataaaaactacaggcacaccacgcgctggaaggagaaagcgagagccgttcgtgcacgtagcaatagcatcctctctttccgccgcctcagcggtcgtctctctcttttcccccgggtgctgccatctcactcattggccccattgcggagctctgggggagggggaatggggaatggggtgatgctacctttggcgaggtgcgctatcaaactagcaaagttcattaaagtgataattacaaaggccgtaaaaggaacgacgtacggccaagacgacaaggaacggatatacggatatacgagctgcaaactgaaaaataacccaaaataaacaatggaagacaatgagagctctgccaaaggtttgagagggggaaaaacaggtgggggggtgggggtagagatcgtgagccgaggaaaagcgagtgcttccaaaccagttttagtagttatcactttataaacaggtagatattccggggatatatgaataatattcatacttactgtgaatacattgcaaaataattccataagaatttaattgccagacccaataaaaacccaaataaaaatatttaactacatattctgggaaaatcatggaaatcggggcaaaccgataaagtaaggtcggacatgaatttaaataatcataagccgagacccaaaaagtaactttgcacagctgccaacaggctgacgcccaaggaccaagaaaactttgcggcataaacaacaaacagggaaaatgcggcgagtgaggggagggggggggggggcggtgggtctaacggttggaaaatcgaggcaaggaaaagccataaactacaattgaaagaaacaacaaagacattgccagcagctacagcagaaggcaaaaagtaaataaataaataaataaatacgtacatatgtatgcagaaatgccaaaaggattgggcaaaagtgaaatactttgatatgcatctaaatggcatcatcagcatcatccttgcccctgcccttaaccctcgactgcccacgggttttttaagtgagaaaacaacgtgcactcagagaagctcaaactgattgtaagaataatgttaaatatagataataaaactcaataaaaatgattcaattaaaggaataaaatataatataatataatatagagctatgcacattagttaaactaaaactaatgctaaaactaaaaacatatatttttaaattaatttatttggctaaatactgaaacctgttatcataacatactttcattattctgtacctattaaaaaacacatcagatgtaccaaaatatctcagcaatattatcttatatatatcatatcatatctaatatctatagatagatagatagatatctatatctatatatctatatctatatctatctatatcatatcctttctcccagtgcagcagctgcacagcagccaccgaagatggcaatcagtagcactgcgattgagaaagcaacagcaaatagaatagaaatcggactgaacaacaacaacaacaacaacattgggtgcttgcaaaatctggtgaaataaaaatagtgaaaaaaacaaaatgccagcaatggacaaaaaacgcaaaaacaaaaaacatatactacgtaacaccaaaagcgacagacaaacaaaataaaaacactgcaaatcattttgtgggctctacattttatttcgccatttttttgcacccaacaaagtgaaccttgggtcgaaaaattataataaacaaatacttatacattttataactatatgcaagcacagctgaaattaaaaacttaactcacaagcaaaagatacaaatatatctgcgtatatatgccagtttaaactatttaaaaaatcttgtttaatttcacatgcaaacactaaataaaaatacaagttttctttacaatttattggaaactcttcagctaaaataagttataaaaaaaaaatgcaaaaaaaatatatatatgtttacttagtggttagcaccactgtgccgccaactggaaatcctgcccatcctcattcacatattggtcgcttttgtggctttgtaatgcaaatgtttgggcaacaaccctggctggtgatagtggagctcgactgagcgggcggcaggagggggcgtgggaaaatggaagaaaggaaaatggaatatacaatcactattgatggcaactctggacacactcacttctatagacattgtagccccgctcgtcggcaatatagtactgtgtctggatttggtttttaggtcctggaatgggcactgaattgtagccctcctgaacgttgatcaaccggtcacccactttcttggagtacagcttcttgtagttcaccaggccgttgctcatcaccaatctaggggggatttggtaacatgattgattagggtattttacttgtgtttaaaaattttacatatatgtacatatattcaaaaaccgtagtttgcatttagtttgaatatttgttttgttttgattaattaatgacaatccactcacttgtactcctcggtgccattggggtgtataacgtgatagttttgcacaacataaatgggcgtgggagtgggcgtgccggtgggatgactggtggtcaacgggcgaccggtggtcgacgatgtggatggtggcacttcgtcgaagaaataatcaagattctcctcttcaaagtccatttgcggaaatacaaccaattgatcctcgtacaatggccatatttgctcaataggtgtcccaatttgggtgggcttgggggtgatgctagtggtgctactggtggctctagtggtcctagctgtcgttgttgttgcttctgttgttgttgtagtggacagcggtggactgaagtcatcaccgtcctcgatgtcactgggccaaacaaccaattgtaattcatagatgggctggctgtccggtgacttcaagtggcgccgccagtctggatttgcctcaggcatctcctccaccggcttattaccactgcctggtaacgcccccctctccggcaacgccccctcattgtggcagcctaacgagtccattgtcgccgcatcgaaagtcaatttgcagtcgatgcgttggccatccacttgagcagcagtggcctccgtctccgattccagttgcagctcctccgcatgcgggttgtagttgtcggtggtgatggtggcgatggtggcgatggtggtggcggtggtgtccggattcgaatccaaatccgaatccgattcggagtacggagctgtaactatcccggcctgcagcaaagggattaatgtggccgccagtagcagcagctgcaggagtaccaactccggccggattctgtttgatgacatgtctgcgggcgcttttccttgccttttgcacgctgccaaaaggcccggacttgtatttatacgaatcaaaggcagtcagtcgctgcaggctgcagctgaattcaagttgactgaatcatcatcatcatcatcatcagcatcatcatcatcatcatcatcaccattatcgtcggctgcactctaaacatcgggaatatatatatatgcattatatatgtacaataccgttatacgccagaacggcaaataagctggctttgaaccactttggagaagagcccacaatgaaccagccaaagtggccttaacccgtgaagtaaataatgttgaacaaaaaatattttgtcactaaaataatggctttttagtattcattataatcgcattatttaatttgttctataaaagtagagaatgctattatattaaattcttgaaaaagaatattactcatacgcagtgtatgactttaatttgtttcaaactgctacgtttaagctggcaatgatttttattttttttttttttttaaccaggaatattatttagaataatgcataataatttataattttcaagcaataattaatttacatttatagttcctcacattacgtatacgcagcgttgcctactgtttgtatttctaattttcaattaccaggaatgttaaatactcttatcaccccgttcagcagccaagggttaaaatgcatcactatataatcatttaaaaccgaaaaatgatgaaaatcagtaaataagcatatgtactgaatgaatgatgggggagggggggtgagagggggagctcagatgcaggattgtaaaaatctttataatcgccacattgtgtgtaagctcgtaaatgtgctaaagggtatttggttcggagtttgtttgttccaggggtgatcgaagttcattggttcagttaccgtctgtgtttttatttagaacatgtgtttcattaacataattaaaattcaaatgttacttgcactgcttgaagtgat

SEQ ID NO: 39974 - DNA, 1054 bp, DROSOPHILA
aaaagcgcccgcagacatgtcatcaaacagaatccggccggagttggtactcctgcagctgctgctactggcggccacattaatccctttgctgcaggccgggatagttacagctccgtactccgaatcggattcggatttggattcgaatccggacaccaccgccaccaccatcgccaccatcgccaccatcaccaccgacaactacaacccgcatgcggaggagctgcaactggaatcggagacggaggccactgctgctcaagtggatggccaacgcatcgactgcaaattgactttcgatgcggcgacaatggactcgttaggctgccacaatgagggggcgttgccggagaggggggcgttaccaggcagtggtaataagccggtggaggagatgcctgaggcaaatccagactggcggcgccacttgaagtcaccggacagccagcccatctatgaattacaattggttgtttggcccagtgacatcgaggacggtgatgacttcagtccaccgctgtccactacaacaacaacagaagcaacaacaacgacagctaggaccactagagccaccagtagcaccactagcatcacccccaagcccacccaaattgggacacctattgagcaaatatggccattgtacgaggatcaattggttgtatttccgcaaatggactttgaagaggagaatcttgattatttcttcgacgaagtgccaccatccacatcgtcgaccaccggtcgcccgttgaccaccagtcatcccaccggcacgcccactcccacgcccatttatgttgtgcaaaactatcacgttatacaccccaatggcaccgaggagtacaaattggtgatgagcaacggcctggtgaactacaagaagctgtactccaagaaagtgggtgaccggttgatcaacgttcaggagggctacaattcagtgcccattccaggacctaaaaaccaaatccagacacagtactatattgccgacgagcggggctacaatgtctatagaaagctccgcaatggggccaatgagtga

SEQ ID NO: 39975 - protein, 345 aa, DROSOPHILA
MSSNRIRPELVLLQLLLLAATLIPLLQAGIVTAPYSESDSDLDSNPDTTATTIATIATITTDNYNPHAEELQLESETEATAAQVDGQRIDCKLTFDAATMDSLGCHNEGALPERGALPGSGNKPVEEMPEANPDWRRHLKSPDSQPIYELQLVVWPSDIEDGDDFSPPLSTTTTTEATTTTARTTRATSSTTSITPKPTQIGTPIEQIWPLYEDQLVVFPQMDFEEENLDYFFDEVPPSTSSTTGRPLTTSHPTGTPTPTPIYVVQNYHVIHPNGTEEYKLVMSNGLVNYKKLYSKKVGDRLINVQEGYNSVPIPGPKNQIQTQYYIADERGYNVYRKLRNGANE

SEQ ID NO: 39976 - DNA, 2183 bp, DROSOPHILA
ctctgtttaacaatgtcctggaatcagcatcctgctcagcatcccattgatttcggaatcaaaaatggattatcaaatcaggcaagcctagaatctgtaaggaactgattgctgcttgccgccccaggtatatcagcccttttaccatttgattcaatttaaatatttcgtatttcgtaattcgtattattcacatccttacatttttgcgacgcaacttgaagcaaaggaagtagatgttgcgggggggtgtgactatgtgtgcttttccaatttttttctttttgttccggaacggaaaggatggaatgatgtgagaatgggaggatggatatgctggttgggtgtggggcaaacagattgtgttcgatttgggggtacatacctcaacgcgaaccatttgggaggagagctcgttggcggcgtccaccttgaagaggcatgtgggccgcagttcggtgaatttgaataggaacatggtgatgacgatgatgccgaagagcacccacagggtgaccttcttatttcgatatggcagtcgcattctggcgatggtctaggtgtcgcagataactggcctttgattcggatgacggcgaatgacgatgatgtggtctactcctggccttctccaatctgatctgatctggtgtgtggggtggagtggtgtggagtgctgctctcttcttcccggaggcgcccactcgtcggtattttttcttatcccagctcctattgattgcgtctagttgctactccgcatctacgtttgcccaaagcttaaatatgtaaattggttttcttgaggtcctcaaagcgagagttttgctttggcttttgcttttgctatagcaaggcagttgctgttgctgttgctagtgccccgtttgccgtgttgctccttgtgatgccagctcctcttgtttgccaaggatgcggagggtgggaatatcgggaggatgcggtatgttgggtgttggacgggctggcggtgatgtgcctatagtgcaggatactgctgatgctgatgctgatgcggcggcggcttggcggtgccaccacaataactccgtccacggtcttggtggtcctgttccggtctgtgttctggtctctgttcctgtttctggtgctggttctggtcctgctgctgctcctgcttatgacgttgattgctttgcatcgcctcgccttttgtttgctcctttttggccagccagaagcagcaacaacaacggttggcttggccaacaacaacgcagcataacacaacagaacacgatcctggcaatcctggcagtgtcccgactgtccaactggcaatcctagcagctgccgcaggttcccctatttatcactcctcttgttctgccgccttctagtcctggctttccatttattgcattcttacaaaatatatatacacattgataacacgctgcaacggaaagagcaaagactacgttaagcatatttaaatggtttgccacgagttattgtttgccgccaagatatacgatactctgatgtctacgagaaaaacatcgctatggcaaacagattgcaacatggatgtggatttttttctatttaaatgatatacgctactttatgagcacaatttgtgtgctagttaatatataactagcatagctaaataattttaagcgtactgttttaactgttttttttttataccaatcgcagggcatttccacatcggtttacacaagtacacaacccagcgtatcacgttgccttctttttcgctggtatcgtgcaactttgaatgtttgccactcgactatcgacactcgactttcggcactcgaccgcttctgactggcaacctcaagtgactacgcacctcatcgactttggccgcgctcgtctttttccttttttccgcgacgacggattcccctgatgacggctgcaacttcagtttcagtttgtgccacagatatatgttgcttcagcttcagcttcagcttgagctacagtttcgggtccagatgtttgctcagttgttgacgaagagctgccagcccagcgacttaatgagccgaaatgccaaatagactggaaccaacgtcagcgatatatacacgtagtagctccaatcgccggttatttcctccgtcatacctgcagatggaaacatggcaaacatggaaatatta

SEQ ID NO: 39977 - DNA, 183 bp, DROSOPHILA
atgcaaagcaatcaacgtcataagcaggagcagcagcaggaccagaaccagcaccagaaacaggaacagagaccagaacacagaccggaacaggaccaccaagaccgtggacggagttattgtggtggcaccgccaagccgccgccgcatcagcatcagcatcagcagtatcctgcactatag

SEQ ID NO: 39978 - protein, 60 aa, DROSOPHILA
MQSNQRHKQEQQQDQNQHQKQEQRPEHRPEQDHQDRGRSYCGGTAKPPPHQHQHQQYPAL

SEQ ID NO: 39979 - DNA, 2438 bp, DROSOPHILA
gggaaacataattcagatatttatattttatgtacacaattacagatacaaaaaaaaggggggggggggggttctaagtgataaaccgacacgagtctctcaaaaaacattcgtacaaaaaaggcttaaaaagagttctaaactaaattaaaatgttttgttattttttttttcatattgtaaacgaggtcggtgagagtatgcaatggatttcctgcatcttcttcattgcaaaaacttctcgtttttttcttcagcttcttttggtggttatcattttatcttgcaacacatttattaatatttaggcatacagtgcgtttcttgactgtgagacgacatgggaaggaaggggtaaatgccaaccgtacgattaaacaaaagacgtatcatattttagtcgcctttaaattatttaaaaaatcgcattcaatcgaaagttcgaactaaattatatgaatgcaatttttcattaaattaagtagcttatcaattgaacacgattagctggtaatcaaggtaatagtaattgtactgaccatttcaatggaccaaattaagcaattcattgcacaataaatttaataattcaacgcccagcccgcattaaggtaaatccagttatgagatattaattaaggcataaattaaattactacgaattaaagggcgtagggcgaggttggcttttaaattggcatttctccctgcaactttaagtcttttcgtcacgaaacgttctttagagtgtaactacttattctgttgtttgtttgttaattgttttttttttcttttttttttgtaacttcacgaagcattaatacacgtacatatatgtatcaagcatgtaaaggtctcggctaatacaatttaaaattggtttcttgcaacagcagcagcagcaacagttatcattatcgttgtccttatcggcagccaagagagttagccagattcaatgcttgccacgcggcagtcttatgggtatgtgcggatatcatgtatccgccatggggtcctccatgatgttgttgttgttgttgttgttgttgatgttattgttgatgttgttattgttgctcccagctaatggcagctgctttatcgtaatgacatcctttggcttttgatgcaacaattgttgttctcgatccggttccgcttccctttccgactcgctctcctcctcacgttgctgctgttgctgctgccgctgatgttgctgctgttgcagatgctgctgctgctgctgctgcagatgttgctgctgtacatgttgccgctgtctgctgtgttgttctggtataattttattgattgtgtactgattattgttgttatccttattgttgctattgttgatgatggtgttcgtgttgtcatcctcgctggatgacatctgcagcacttgcttcgccttactctcccacagcattcgattggcctttaactgaaagtagagacagaaccgaaatgcgtattcaaattaagccactcataatgggcgcacttgtgcgtgaataagccacccactcccgccccaccaaaagcccagcaaatcgtgtatttcccgtgcaattgcagctgctgccgatggcctcctcattacgactaatgttgctgctgctgctgctgctgctgcaactgcggcactatgtggcatatagcatatgcatacatgtgccccctcttttttgactgccaaaacgtttgagtgcctgtcaaagcgaaaactttggtagcacaacaatttcgtgttcaactttgcgacgtcgcagttgtgcaaattaaagcgcaagaaaaacagttatggaaattccttagctgccttgggttcttatttcagtttctatgtacttttgtcagtcccacataaaatgtggaaaaaaaatcgacatatttactttagcataagttcttcaaagcgaactcaaaatggcaagttctcgtcagaagattcgtagaacattaatttttgatataagaacagaattttaaatgtgtttcgtaatttaactgtatgctgtatattctcctatttttagattctatcaccgcatctcattagttttaatgacttttctacgcacccttcaagtttagcgcaaattcagcatgaaaacaattcaaattcatttaattcgcgcattcagttcgttgttaaatattttagatttccatttgattgctgtttatctttcgctgtacaaatgcagctgaacgcaaactcttgtttttacaacgtgaacgtaattttcacaacattttctttctttgtgcggtttttcctttcgactcagttgctattttttttgcctttcgcccatccacctcctcatccacccacctcagggtattaacgtttcgttatttgattttaatttcaccgctgcaatgcaaggcaaggcaactgccgccgctcgctttttaatttt

SEQ ID NO: 39980 - DNA, 438 bp, DROSOPHILA
atgctgtgggagagtaaggcgaagcaagtgctgcagatgtcatccagcgaggatgacaacacgaacaccatcatcaacaatagcaacaataaggataacaacaataatcagtacacaatcaataaaattataccagaacaacacagcagacagcggcaacatgtacagcagcaacatctgcagcagcagcagcagcagcatctgcaacagcagcaacatcagcggcagcagcaacagcagcaacgtgaggaggagagcgagtcggaaagggaagcggaaccggatcgagaacaacaattgttgcatcaaaagccaaaggatgtcattacgataaagcagctgccattagctgggagcaacaataacaacatcaacaataacatcaacaacaacaacaacaacaacaacatcatggaggaccccatggcggatacatga

SEQ ID NO: 39981 - protein, 145 aa, DROSOPHILA
MLWESKAKQVLQMSSSEDDNTNTIINNSNNKDNNNNQYTINKIIPEQHSRQRQHVQQQHLQQQQQQHLQQQQHQRQQQQQQREEESESEREAEPDREQQLLHQKPKDVITIKQLPLAGSNNNNINNNINNNNNNNNIMEDPMADT

SEQ ID NO: 39982 - DNA, 4063 bp, DROSOPHILA
aaagttcctaagcaaaccttaaatgaaaataatataaaattcgtttcgttttgaattgattgctaaaacactggggcaaacaattgaatattggaatgtgtaggtgtgtaattcaaatggtatgaaaccttcgcaacttttacaaaacttaaatgttaaatctcgcaattgctagactatttgaacctaaggacagctatatgtatatttaaattgtttatctattcacggaagctcaacgaacagacatttcaaatcctcaattgaaattagatatcttgtgggcataaacaattataaacttttgctatggtttgttaataatactgtttgaagaacatattgtggttagttttattgaactattgtttaaaaactcttggagataatgcaaaacgatctgtcttctatgccgttctttcagtttaaaatttcacaaaacatttttagccttagttttaaattcttacaattactatactcgactgcctaagttttcgtttttcaaatattattacgaaaataatagattacctcaaataatacacatatttccaatcagaacaataaatagtaaacaatacactctattaaaatcataaaaaattatattctatcctctaaataagattatttcttcaaggacctgcgtttttatgtaagcagacttataaattaaataaaatttccctgccttgtacaaaaaaaaaacacacgataatgatgcatactcgtattattccaatgaccagaaaggataaatttcatccacagttattaagtgtgtcgcactatagaaatcttacagaacttgttaatactacaaacggaacttatctactatcgtttcttttcttcaggattcttcagactaagaagcgtgccgccggctcccaaacatttctccattttcgtttaaaagcttatttctaaaggagaaccttgagctacaacaacaactactaaatgacactggcgattccaacgaccacgcccactattattcaagttgtccgcgccgatggccacgatgaccacgatgatggcgatgctggcgacgatgattcctggcctccgcctctgtttcgctgtcggtatcctcatgaccccgctgggtctcctgatgattccgctggcgatcgaccacctcctgttcctcatcttcatcatcgtcaatggcatcctcatcgtgctcgttaagcagcagcggactatcatccccgaggcgattgggcggcagggcactgcccggcgttgtgggtgccgatcgggtgatccaacccttgcgtgcaactcgtccacgattcacaaagaagctggcaccgctgacgacactgctcaccgggctcttgagcacacaacgctgtgcgcccgatccggaacctccgatggcggccatgggtatgtacagagccttattgggttgcgttttgctgccggaggtgaagaactttttactccgcccactggtgccgcccgaaatggatgcggatgtggttaggatgggctgcaacacctgctgggagttcgagggcgtcgatagcgtatgctgcagccggggcttggcgccagttccgttcagcagtagctgctcgtagctaacgcccgcctgcagctggcggatctggtcgagaatctcacgcacctcgcccgtcggactggtggcctgaggcggcgagcccggtgttccaatgttggccagactactcacgccggacacctgagccgatggctggcagcagttctccagactatgcagcgggttcggttggatgcagccattgctgtatatcaccggtgtgccagatcctcccgatgtgcctgcggcacccgttaccgatcctcccaagccgcccattgccaggctattcagggaggcagcctgtgttgccgatccactttccgcgccatggaaggcaccaccagctcctccgctttcgggtagcattcctgcaagaaatcatataacaataaataagtattttaataggaaattccttatcacaatacccacctgccacacagctgttgttcacaaagatgtcgctgagactgctgctgctattcgccatataccggaagtgctgatcactctgggactgaaggtagcccacaccaacgcccacgccaactccctcctcgtgagatgcatgcagccgcgtgctgtagagcgctgctccgcccggtgcactgcccagtgccacggtggcataatgctgggcctgcgtctgggcgggcatcagtctcggctgataggcatccgtttccaccagctgggatgccgatctcggcatggcgtagtgcacagatgccagcggagcatttggcacctgatgcgatggcgcctgttgttccacagatctcagatggccattcccgtgtccatgggcatttgcattggcattgacattagcattggcatgcgcatgggcatgggccacataatgatgcagtcctaactccggactggctgcccgtgagtatggtggtggcaccagggtattcgcctcattcgcattgcaaatgaagctggagcttagggagtcgacggtgctggccgcactcagggatcccccggcagccggacggacgatgtagttccggaagtactgcaccatcaggtagctggagctgccgttgcccttgccattgcccgaatcgctgttgcaggtgaagacaagtggatacagatccggcttggaggtcacctgagaagatggaaattgttaagcgaatcgattccggtcatgtatatgattacattacctccgtatatggcggcggcggatggtgaaacgagttgcagcgactatattgtggtggtgcatagcaggagccggcggaatcgccctcggattgggtgtggtgctcattgaatccccagccgcatagtgtccgccgcttcttccatagtgagtaggcacacaggatggccaagatgatggccacaaccacgcacctgcaataagaatatagattttcaatcaatctttgtaatatcaaagtgaggatcgttattcactgctcggtttgcagctggcgcgactgaatgaagaagcccattggagtagtggatgcggatgtgggtgcggatacggatccggatccgtgtcctgctgttcccgtaatcgaattccgactgaaatttgtttgccttttcgatggccaagagatgggattatatgagctgggtggcggtgtgcgggttccgtttgtgtctcattagttggcattgccatttccacagcccccaagggaggtggtcggtactatgtgctggtcgcactgatggtagtggtggcatagcacgggggtacagcttgcataagcctctcgacttgactcgacatttgacttgacgcaaccccgtcgctgggcgccaccttttctgccaataataataatatctctcgcatggcacacaatgccaatcagctggaagtccggccagagcacactgaaaacccacgccatccaatccatcccaccattccaacgccccaaaaacccgcctcattgaacggccttgcagacgacctccggggaatccccaaacacaaaaacaaaaacagtgcaattcatgatgaccgtgaccatcgcagtagctaaataaatcacttctactttgcgcaattaaaagaatcactgtctccgaaagattcctattattttacaatttcgaatagataagttagatagacagagaagtttccaaaaggaggagtttctccgggtcaacactactcaccagaaaaaccagtgggtggcgaagaacagattgagaacatgcgagtccgaggagggcggaagggggcgtggcccgccctggtacggcggacagcagccctgggtgcaacagccctgagtgcagccctcgcaaaatctggcagacacctgggaaaatggaacaagacattgcatatattattcgtttaatcatgagaaatatttgcacattttttatgataaaaaataatgtattccactttttgtcgatacacctttgaaattgtcattgccaataaataaagaatataaacaacagcttgttatttttgtggtg

SEQ ID NO: 39983 - DNA, 1836 bp, DROSOPHILA
atgggcttcttcattcagtcgcgccagctgcaaaccgagcagtgcgtggttgtggccatcatcttggccatcctgtgtgcctactcactatggaagaagcggcggacactatgcggctggggattcaatgagcaccacacccaatccgagggcgattccgccggctcctgctatgcaccaccacaatatagtcgctgcaactcgtttcaccatccgccgccgccatatacggaggtaatcgattcgggcaatggcaagggcaacggcagctccagctacctgatggtgcagtacttccggaactacatcgtccgtccggctgccgggggatccctgagtgcggccagcaccgtcgactccctaagctccagcttcatttgcaatgcgaatgaggcgaataccctggtgccaccaccatactcacgggcagccagtccggagttaggactgcatcattatgtggcccatgcccatgcgcatgccaatgctaatgtcaatgccaatgcaaatgcccatggacacgggaatggccatctgagatctgtggaacaacaggcgccatcgcatcaggtgccaaatgctccgctggcatctgtgcactacgccatgccgagatcggcatcccagctggtggaaacggatgcctatcagccgagactgatgcccgcccagacgcaggcccagcattatgccaccgtggcactgggcagtgcaccgggcggagcagcgctctacagcacgcggctgcatgcatctcacgaggagggagttggcgtgggcgttggtgtgggctaccttcagtcccagagtgatcagcacttccggtatatggcgaatagcagcagcagtctcagcgacatctttgtgaacaacagctgtgtggcaggaatgctacccgaaagcggaggagctggtggtgccttccatggcgcggaaagtggatcggcaacacaggctgcctccctgaatagcctggcaatgggcggcttgggaggatcggtaacgggtgccgcaggcacatcgggaggatctggcacaccggtgatatacagcaatggctgcatccaaccgaacccgctgcatagtctggagaactgctgccagccatcggctcaggtgtccggcgtgagtagtctggccaacattggaacaccgggctcgccgcctcaggccaccagtccgacgggcgaggtgcgtgagattctcgaccagatccgccagctgcaggcgggcgttagctacgagcagctactgctgaacggaactggcgccaagccccggctgcagcatacgctatcgacgccctcgaactcccagcaggtgttgcagcccatcctaaccacatccgcatccatttcgggcggcaccagtgggcggagtaaaaagttcttcacctccggcagcaaaacgcaacccaataaggctctgtacatacccatggccgccatcggaggttccggatcgggcgcacagcgttgtgtgctcaagagcccggtgagcagtgtcgtcagcggtgccagcttctttgtgaatcgtggacgagttgcacgcaagggttggatcacccgatcggcacccacaacgccgggcagtgccctgccgcccaatcgcctcggggatgatagtccgctgctgcttaacgagcacgatgaggatgccattgacgatgatgaagatgaggaacaggaggtggtcgatcgccagcggaatcatcaggagacccagcggggtcatgaggataccgacagcgaaacagaggcggaggccaggaatcatcgtcgccagcatcgccatcatcgtggtcatcgtggccatcggcgcggacaacttgaataa

SEQ ID NO: 39984 - protein, 611 aa, DROSOPHILA
MGFFIQSRQLQTEQCVVVAIILAILCAYSLWKKRRTLCGWGFNEHHTQSEGDSAGSCYAPPQYSRCNSFHHPPPPYTEVIDSGNGKGNGSSSYLMVQYFRNYIVRPAAGGSLSAASTVDSLSSSFICNANEANTLVPPPYSRAASPELGLHHYVAHAHAHANANVNANANAHGHGNGHLRSVEQQAPSHQVPNAPLASVHYAMPRSASQLVETDAYQPRLMPAQTQAQHYATVALGSAPGGAALYSTRLHASHEEGVGVGVGVGYLQSQSDQHFRYMANSSSSLSDIFVNNSCVAGMLPESGGAGGAFHGAESGSATQAASLNSLAMGGLGGSVTGAAGTSGGSGTPVIYSNGCIQPNPLHSLENCCQPSAQVSGVSSLANIGTPGSPPQATSPTGEVREILDQIRQLQAGVSYEQLLLNGTGAKPRLQHTLSTPSNSQQVLQPILTTSASISGGTSGRSKKFFTSGSKTQPNKALYIPMAAIGGSGSGAQRCVLKSPVSSVVSGASFFVNRGRVARKGWITRSAPTTPGSALPPNRLGDDSPLLLNEHDEDAIDDDEDEEQEVVDRQRNHQETQRGHEDTDSETEAEARNHRRQHRHHRGHRGHRRGQLE

SEQ ID NO: 39985 - DNA, 3287 bp, DROSOPHILA
gcaacttacaagaacatgatgtgcaaatacttaaatattcaccattaccgatttcaaatgtatttaaaagcaagaaataaattaaagaattaatcatattcatgtacttgtacgtagtacaagtgtgtatattcgtcatataaaaaacaaacagtttacgctttaaagtgaaaatatataagagatatttggagagcgtgatttaaacacggagattttgaaaacgaaatgcaaattacatctgttcaacttaaacaataaatggacaaagccacataaacaaaatacaagtatataaatataaatttaacttaggcatatgtgtaaacattcaaagtccattgtcaatgcctaacacagcgataaatacaatagagttactggattttggttatacgtgtgtagtgctggctaagtatcggttccattctctggacaaacatatcaaagcaaattgttgttatatatcaaaaacaaaaagggcaataaataaatataaacaaatcaatgtcgaacaatttagcattattgaaattataagcgatagttggccttagactagataacgtttaacataattgagtttacatatatagataaataggcatcatcggtgtaaatatgcttgtcatgactgtgtgggtggtaatcgcgttcgcgtggctcttgtgtttgtgagttttggttgctttgtggcttgtggtcataagtttggcgaactgcggattgcggttcaccgttcgtgacctctgaccttaaggctagactaagggcacggtatagtacagtacagaacagcacagtacagtagacgaatcaactaactagatcggtgctgcgtactctagatatgtatgctatagggctatagttaaactatatacggttctaggacaacgacgaagacgacgtgggggagggtgtaggggtgtcaacgatcagtcattccatattcaaatcgattccattgccgtccgtccgtccattcgaccggatctgatcaactggctgtggaatagctgtgcaccgagaagccgcgctcgtcgtcgaactcggcaattaccttcttgagggcggcgagaaccttgtcgggcatgtgatcctgcagcatcaccggcgagatgagcacctcatcgaagtccgtggaatcggcccagattgcctgatatacgggctcccgatttttcagaacatttctgcaaaatacacaagagctttattgcaatagtttacttttgggctatttaaactaactaaatatctacgaactaaggtattacacaaattccggccaactaaatatccaatttagttgtcacagaaaactctttcaatttgatttgtttcaataacacgtaatctctacttgtctaataaatattaattgtgtaatcgatattggatatctaattgatttattagagaatgatagggaaataaaactcaacgctacatatctatcaggaataaatattttcataacatatatagagttcattaatgaaagaatttccatgactccggccattagaagaattgtcttcatgaactttcgggtctaatatcatgcacgatctatctatccaaacacaaaaaatttaaggataatagtccagctcatatgcgagagcgagagagagcgacaccgagagagggatataaggacctctttacaaaggcagaattctcatctgaactcatgatcttttttttttgttcaaccttctttagcgaaactgatctatttgagatgagagttcagctcgtgtagagagcttcatttgaggcaatgggacgatgcatgcttcggtgattgtattgtctcatgcaacaaagattaaccaaaatgggatgtgaagaaagtgttctaacagaataaatagatctataaaattctcagtcgttcactagtcaacacacaaaccaaacaagctaagacacaaagaacgtgtgcgtaagagagagagagagagagagagagagacagagggcgagcataaacacgggcagagtggaatagacatatgtagacagagagaggcaggagagatagatagatagagacagagattgagttgagttacggcagcgctgctcaagctcttcatctttcaatcttttggatgcgtgtgctcggttgtatcttgcatctgtgcgcgatgcgctttgtaggtgtgtgcgtgtgtaaatgtgtttcgatgtgggtgtagttttgagtgttgatgggctggtgggtctgtgtgtgtgcctacctccaaccactgtcgtatttttgcctgaaaaacattttggtaacattattttctattctcattgactggatttcgggatggggtggggcaaacagaaatcgatcaaacacgttcagcaacacaaaacataatgaaacaagacaaaaccgaaccaaaccaattgaaacgataacaagtgaaagtagtcgatgatcgagaactccgccgacagcagggtaccattcatacatacatacatgtgtacatacaacatcgttaactatcacccagcatatataaatacctagatcttccgagttttttttttttgtactaaatctcaatgcattgaaagatatattaaagtaaaatatcttatagtcttgttcgattatttagtctaagaaaaacgttataatttcgctatcatacttttataatacttttcctgtctgcgagttatgggctttctcatttaactaatatatttattaaagcatgtctgcgtttggaaattcaatatggccctacattctgttagtaatccgcgttacggccaacgaaatccccaaatctccacttgtgaacataataattgaagcagcacgtttcggccataagtcacgtgggtatgtcaaatcgtaggcgaatattagagtcagccaccgaatagcaaagggcgcgaactgaatagagagttcagtgcccgttcccgatgacgagatcatcagctgtatctccacggatgggcaaggcgatagattaacacacaagacattgccaagcgacgacaacacaactctgacgtcattgcgaatgagtcagttgcggatcagcttgacatttcactccatcactctcacttcgtcgataagcattgttggctatcgcacatcaattagcacagaccttggaccagaggcgcatctcgtatcgcgaatcaaacaaaaaaacatcaacaaataaatcaaggtatgtgggtcaggaggtcgggttgcgagatcgagaaggaaacaaatgcggatgcggccagctgcggcacttatttccagctcg

SEQ ID NO: 39986 - DNA, 231 bp, DROSOPHILA
atgtttttcaggcaaaaatacgacagtggttggagaaatgttctgaaaaatcgggagcccgtatatcaggcaatctgggccgattccacggacttcgatgaggtgctcatctcgccggtgatgctgcaggatcacatgcccgacaaggttctcgccgccctcaagaaggtaattgccgagttcgacgacgagcgcggcttctcggtgcacagctattccacagccagttga

SEQ ID NO: 39987 - protein, 76 aa, DROSOPHILA
MFFRQKYDSGWRNVLKNREPVYQAIWADSTDFDEVLISPVMLQDHMPDKVLAALKKVIAEFDDERGFSVHSYSTAS

SEQ ID NO: 39988 - DNA, 2240 bp, DROSOPHILA
gcaattttttgcaaattttgatgatggtaccccttacaaaaaatgcaaaaatttacgaaaaaattttttttccaaaattcgtcaaaaagtgatagaattagttagcattggtaattagctgctcaaaacaggtattcttttatctatatgaccatttttaccaaagttatgacgaaaattcggtttgtaaatatcaaatttttggtaaaagtcgtttttccgaatttcaataaatggaaaaactgttagtcctttaaatcacatgcccattcttagctaatcagaagaggttaaagttagagacgatgccatattgttaatcgtctaatttgtacatatgtatatatctattttttttactgggttcgaagagctttgatcttgaaaaccccctttggcgttccacccattcggcgtggctatatgcagtttgtttatccaaaatattgtttataattagcaaacattgtgggctttccgagctttgtgccgcagccgtgtttgctagtgactagaaagctccctaccaactttacccgatatataaactttggatccgctgggatcgggagaggtgtgaaactatataaagagtgagagaggagagaaagcagaggaaaatactgaggcgtagacaaagaaaaaagcgaaagacagacgcgtaggagatgcgcgaattgcgtcgaacggaattcaaactaaattaagtgcagtcgatcgcgggcggtatatatattccaccgatccgaaccgacagttgcccaaagacattgccccagagcagaatatcgagcagagcggcgacacctgtcaccgggggaattacataaaaaacaaaacaaaaataaaaaaaacacaaacactcaagattttcacaacacacaaatcagtaaacatcggagaaaaatcgaaacaaatcaacacgaaacactcatttggattagccgttagccaatatagaccgttcaggatcccaggatccaggatctcaattgccgagatgtcgtaccgcggaatgctgagcacctcggacggttcgcccgtcgagctgcgcgtccaggatgtggactcctttgacggatcgatgatgtcccatgcggccaccaatgcggccggtccgctgggcagcaaggccagcggcaagtccctcaacgcctgcacctccatgtccatgccccaaaagccgagttccctaagggcgacatgtaagtcgccagttccccagccgctgcccatgtaagtgaatgcatcgcgacgacacaagccacacgagccacacgaaccacccaaccgccacccactgacctcgtgcactgcgcgaaaacacagcagtccagttggtagcaaaacgtatggccttaaatcaatgaagatgggctaacttatttcttgcaaatcatcgcttacctattacaatattataccaagttgaatgtttctttgtacatctctttctttcgatgtctttgtctttgtctttctctctctctctattttctctgctgcaaaaagaaagcaaatgacattcactctcccacgcacacagcaaagcactctcactcaaaacaaaaaaaaaacctgtagcaataactcacacggttcgctacactcgaagaaatgccttgtgtggatgcagatatgatctttggttacaagctgtatttaagaacttcttaacttgttaacaatgcttgttttattaagcaaatattgcccacaagccgcatcagttgcctgaaaattgtttaattcatttattattgtatgtaccactgcattgtttcagtgtagcgctaatcctctgtcgctgcgctgccaatcagtcgcaacatctcttgagtcgcactaacccatatagaaatataggaaagttataataccctgtaaagtggtatagcacttgggtttcttaagatacatacttcaaaatatacaaaaataaaatgataataaatcagtttagattgcgtcaatcaagtttctgcgaatatatcccggtgccttgtggaataataagctttttagttaagataattagcccacttaaatatgattctttgcggcgggtttattcctttgatgataggagattattgttgtttttgtgaccttgaagtgtattccaacttcggatcgttttaatcagtctcctcatctagtttgttgtgttttgagtgcgtgttttgattttgccagtatttttgctatctccgctaatccctctctcctccatttccgtc

SEQ ID NO: 39989 - DNA, 240 bp, DROSOPHILA
atgtcgtaccgcggaatgctgagcacctcggacggttcgcccgtcgagctgcgcgtccaggatgtggactcctttgacggatcgatgatgtcccatgcggccaccaatgcggccggtccgctgggcagcaaggccagcggcaagtccctcaacgcctgcacctccatgtccatgccccaaaagccgagttccctaagggcgacatgtaagtcgccagttccccagccgctgcccatgtaa

SEQ ID NO: 39990 - protein, 79 aa, DROSOPHILA
MSYRGMLSTSDGSPVELRVQDVDSFDGSMMSHAATNAAGPLGSKASGKSLNACTSMSMPQKPSSLRATCKSPVPQPLPM

SEQ ID NO: 39991 - DNA, 2644 bp, DROSOPHILA
tctggcctgatttgaaatgcgtttcatagggtacagtcaacagatgctcagcttactaatacgcacagtgtgaccgttgaactgttgaatcagagtgaccaatagcgtgtttaagtagtcaaaacatttatccatttgtgcaattgatatatccctatccctgttggccagtgtaatcagcaatgtcaattgaaacgtttaacgagagcagagacccagctgatacccaagaccatggccgtccgtttggatccgatcggatcgcatcggatcgaatcgcctgatgaagtcccagagcagcggacatcgagccaagcgaaggaaaaaagttcagcaaggcggcaacaaagtgtgcgcctgtgtggttgttgcatgaataattcatagcagcggcaccagttaataactgagccgcactccgcagtctgcagcacaaaaagtgaaagctcataaggcaatcagtcaaaacgtcatcaatagaattaagtaatcaactcggggacccaaaacagcagtggcagcaggcagcaaaccaaaactgaccacacacaacaaaacggggccagtaaaggcaacaatggtaaaaaaaaaaaaaaaataataaaggaaggaaaaaagaagggggcaaagaagaaaaaacgcagccaacttcacattgattgcggtccaaaaaggagtcgagaagtcgagaacaaaaagaggcgcgagtggcaggaccaccgacaaaaaacgagcaccaaaaagagtggccagcagcaacggacactccacggacggacaaacggacatacggataaacggacatacggacaactggacaactggacaactggacaaccggacctacggacagcagttggaacagcagtttttatggcccttttcctttatctgctgcctgccttttttcctgcttcgttctttattttcattttatttttgtttttgggaaggtcttggacctgcagttattgtggtttgaccagttgcagggcacaactcagttggccacaaccacaaaggagtgcaggagtggggcagccacaagatatagaacttggccggcctgccgaggagaatctgtcgggaagccaatgcaaaattatcgggtctcgtatcaatgctcaaatccagttggcatattggggaatgctttgattaatgtgcaaacattatataggtaaaatattatacggaatcacaaggtgttttaagcaaatatggttagatatttagagctaaaatcaaggaatggttttaagttttaacaaccttaaccaacttactaaatacaaactataatatattcacagcttaatagtttttataaaaaaccacatttattcattcattccctacaattctcagaacactctgttttaaacgaacccaatgaccttttgcattatttcaattaaaattcattatgcattatctcgtgtctattccgtcgctttcgatccttgtttacatattttattttttcactctggcttgcgtttttcgctttttttttctttttttttttgtttgccttcttcgaggtacaattaaaataattacgataattatatagttacagtagcgacagtagccagtgcggaaggacactccctctcccttttccttggagggtgcgcacattattttattatttattttatagattccggcatttgtcgccagacatgcgacaactgggcgagcgaattacgcagaaattgccatgaaaattactcgatttacccccatggcccttattctggcgggtccttaaccctctaaggagggtcttttggtcacataattagccatggcgaataattaacataagtgaggggcaggaccaaggaccaaggaccaaggaccaaaagacccgaggccagctggaacgtgcccaaaaaggagccaattttgccgctctgcatttgcgggcacgcgtctcgaaaagtgtcgatatatacatatgcatatatacatatatgtacatatatgccccaatatatccccttatacatattcacaatttttggagatgaataaattacgatatatttttttttttttttggtttttccttgatcctttgattcgtttcgtgttgactgcttgttgcctgtttgtattcacctttatcggcatctgccgcctcgggttatccacatccatcagttaaaatggtaatttcaataattccgttggggatgagttcgtttaagggaactaaaggtatgaaacaacctggcatttaggcaattttattgataaaatcacttttatccaacctttaatggttaaatgtactttggagtaatcaagtccccaaacaattaaggaaactaattttctacaaatcaatattttaaaatttaacacacataatcttaaactgtatagagatcagtttaaaatatgacagaaaactaaagcatacttttatgaaagcaaaaaacttaaacatccatatatatatatatatattttacaaatattgtgtgacatagaaatagaataacaatcattttaaaactcaaaaagaagttatatatttagatttgatatcttagcattttctgatatgcatagcatgacacaaatatttttaccccgcaattctacgctggcaattcttcttgtgctccac

SEQ ID NO: 39992 - DNA, 144 bp, DROSOPHILA
atgtgcgcaccctccaaggaaaagggagagggagtgtccttccgcactggctactgtcgctactattctcctcggcaggccggccaagttctatatcttgtggctgccccactcctgcactcctttgtggttgtggccaactga

SEQ ID NO: 39993 - protein, 47 aa, DROSOPHILA
MCAPSKEKGEGVSFRTGYCRYYSPRQAGQVLYLVAAPLLHSFVVVAN

SEQ ID NO: 39994 - DNA, 2681 bp, DROSOPHILA
gcttgcagcacctgttcgcctgcactgaggggcagcatgatgaaaccctaactattcacgttttccgtcctcgcgagaagtggacttactccgagactttgatgaaacgcgattaccagcagcgtttgaaagtaagttttccgcattttcatgtggtgaaatagtgtgagtgcaacacgttttttcgaccagacgctcaacgcgcgtgtgaagtttcccgaggaattggtgcgccaggtcctgctcaacaaggatccattgcatgtcgaacaggattaccagcacccattgaacgtcctgaaactgaagtatgccatggcgaatttcaaagttttcctcaagtgggaatggcacctgagacccatggatgccgcacaggtcagtaactgactttagcagaatcagttccaagaactataataattagtgccattattcccaaagttgtatagccaaatgttcttgaacacaatgtccacggctttgggactacgggctcagataccccttctgctagggattatccatgccaaggacaaggagctgaaccagtatcgcaccgagggatgccagctgcgcagaggttagttaagaacaagtttgcaaatcgaaagttcttgtgcattccattcgcttagttagtaatcgcaaaaccttatgccttctttagtgaccgtggaaacccagccctttgatctcgaggcttttatgaatgagcacaagcaattgctggactgttccgctgcctaccagaaggcgcagagtactttttttgctgataagccatcgcctaattggacatcgctttcttcgccatgggcacgggatgtcgcgccctattcttcgtcaaacggctactttgcttcttcgaaggcatcaagcccaaaagaagctcctcgcattaggtgggattggtacaatgtgttcacatttaccgattaataagatatgttttcgcaattgcaggaagcgcaaggctcttgaaatcaataccaatcatatggagcgcaaggtaatgcagcgccgctccaatccgcttgtcgagtacaaaagctcgcagagttcccaagagacaaacgtaaatttaatcttaaaagtagagctagcgccaatggacaccaagaatgatctcactgatgatgacgaagagtcatccacatcttcggggctttcccaaggatggtcggccaaactaaccaaatttaatccaaccgtcggaagtggtgtatatgaacttgcatctcaggaacagtatgcttcttctgaagatgaggatgcttcttctaaaaatggggatacttcttctaaatatgaggatgcttcttctaaagatgaggatgcttcttccaaagatgagaatacttcttctaaagatgaggatgctccgtctaaagatgaggatacttcttctaaagatgaggatgcttcttctgaatatgaagaggtcactagggaggcatcgaacgctttcaatttcgtcataaagaaggttgaatctttaaaagagttttacgatgccccaagggaactcatccaagaacccaaagtcggaaagtccgatcagaattgggatttaattcttcgaactgtgctggaagatatcaaagccgtactgatttactcaactgaacgcatcgaaaaagcgatccagagctatatcaataagttagcgcaaaaataatttggaaacgatctcattctaaatggtgctacaagcaaaacttcacacttagtacatacgttttttttttttggtttttttttttttttttagataaaaacaagtccttagtgataaaaggataaaatacatgattccatttgttgattaggtattcgtacctaagtccatcgaacagcaatcaaatgaaacaaagaacaatgtatagtgttgtagattttaaaacgtcttaccaaaacaccctcagtacacaaacaagttgagttccattgcatagaagcagcaactaactcctatctctatggaacatatcgaataatattaaaatttgtcaaaatgattgcccggaaattttctggtcaattatcgaccgattagtcagggctttccagcggttataacctcctgatcaatgcattttatgttaaatattttttggcacgattactaataaaattgataaaaaaagaaacgtttgcagtttgaataaataatctttaaagtttgccttatcccatttgctttagaagctttcagccttttcaggctgatctaggattacaacagaaggatgaaagacagctagacgaggctagttttggatcctgagtaatgctttcctgaaccctgaattcccacaataatgtgttgttcccatcggtgggtcacaactataactgatctacacatttaggatcttataatatataatataatataaatacatgtctataaatacaaccgcgtggattagttaattgaaatacgcacaggcattctatccatgcatttccctgcagaaaaagtatttcagcattgatcgttttaaggaaagccctgcggttacctattatacgtccagcctacgctcagactctgttgatgtggcgtgaacacataaaggtttaggtactacttgtttcatattataataatataataacattataatatataatataatgctgttataaagtatatttgatttatacttctaatg

SEQ ID NO: 39995 - DNA, 681 bp, DROSOPHILA
atggagcgcaaggtaatgcagcgccgctccaatccgcttgtcgagtacaaaagctcgcagagttcccaagagacaaacgtaaatttaatcttaaaagtagagctagcgccaatggacaccaagaatgatctcactgatgatgacgaagagtcatccacatcttcggggctttcccaaggatggtcggccaaactaaccaaatttaatccaaccgtcggaagtggtgtatatgaacttgcatctcaggaacagtatgcttcttctgaagatgaggatgcttcttctaaaaatggggatacttcttctaaatatgaggatgcttcttctaaagatgaggatgcttcttccaaagatgagaatacttcttctaaagatgaggatgctccgtctaaagatgaggatacttcttctaaagatgaggatgcttcttctgaatatgaagaggtcactagggaggcatcgaacgctttcaatttcgtcataaagaaggttgaatctttaaaagagttttacgatgccccaagggaactcatccaagaacccaaagtcggaaagtccgatcagaattgggatttaattcttcgaactgtgctggaagatatcaaagccgtactgatttactcaactgaacgcatcgaaaaagcgatccagagctatatcaataagttagcgcaaaaataa

SEQ ID NO: 39996 - protein, 226 aa, DROSOPHILA
MERKVMQRRSNPLVEYKSSQSSQETNVNLILKVELAPMDTKNDLTDDDEESSTSSGLSQGWSAKLTKFNPTVGSGVYELASQEQYASSEDEDASSKNGDTSSKYEDASSKDEDASSKDENTSSKDEDAPSKDEDTSSKDEDASSEYEEVTREASNAFNFVIKKVESLKEFYDAPRELIQEPKVGKSDQNWDLILRTVLEDIKAVLIYSTERIEKAIQSYINKLAQK

SEQ ID NO: 39997 - DNA, 4917 bp, DROSOPHILA
gaggtcatgggctttaatgtcgacaaggccagttgttagatatttaaaatttaacctatttcactgaatttattatattggaatcagtgggtaaccaaatcattaattaaatcttaaataatggaaatgtaattcgaatctggtacgaaatagaaatccgttagcaagacgccatctagcgaactatttcatgctgtgccgccatctggcggactttctacattttaccccgatctggcaacctcttagattcaaattcatagcgatgtcgcatattttaaataatttctcgttaattcgcaaaattaaaatccaatcacatcacacaaattagatgatgtacctttcccttccgcaccaaaaagatgaaatcacttgaattcatttactttgaatttcggtaaactaggtatagatatattcgtgaagattcagtcgaaacactgctaatcaatcgaaacaatcaaaataaattcaatgggagttacggtcacaaaggtctaagatataggattagtccggggttagggtacacgtgtataatcataatatatatatatatgtatgtactataaagagggggtttacattacgaaaattgaggagcacacataattcacgagttcacttttcttaacccccaaaaatttgaattttgtgttgaatattcttgttatcacagacgctccagcacatttttgattcctttcagatgcctcggatcccactggcttttttgcagggggatttgcatctggagtactcatttctacttggtggttacgggtgcgtgcgtcaaattttctacgcaagtgtcacgtcacatgggaaagcagctgcggaatgcggaatccctcctcctccacacggaagatgctatccgccactccggttgccctaacatcatgcagatctccgccagatctgttgttcgcctacaggtgtgtctgagtgttgtatactggtatcttgtgttgcctaagacggtagacaaatccacctaaggcttggcagtctgagcctggccaggatttatgccactggccgtggaagtggtagcctccgtttcctcaccgggcagcgttttgttgagtatctggtggaagtgctccccgaacacggcgtggttgtaggacaccagacgacggaacgaggcgataaatgcaaccagctcctcttggtagtccgcgaatcctgagggcggcggcggaatgctgccattggagcgcagtgttacgcgcacatagccatccaatcgtttggctgcaagcgatttacgtgaattgaatataaaatacattgtattgcataaacgagtaaactcacccatcaaactgggcaccggcgacgtcttgttggccagcttaagcacctggttcttgagcgccgcctggtcggcatcactcagcgcaggcaagttctcctgctccagggccttgttcacaaaggagcgaatctgctcgtagcagctctcaatggtagaggccacttggctgtgaattgaggttgaagaagggttaaaacagcgctcggctagagcacgaggtatctcactcctggttcttgatgtcctgcacaatgatgtccagctgctgggccagcttgatgcggttctcgcggcgctgcgatatgataggcatgccctgggccaccgagatgagcgaggcgcacaggatcaagcgctgggctcgccaacttaggccggcgaagcgctctttgtcgatgcgcaacagctccgggaactccttgtcggccggatagtcaatcagctgcatgtaggcattgtaaatggtctcatcatcgctgctaccggaccggtgacgctgcagccaatcctcagtggccggaaaaccaactggaaataatggcattcccaataaataaaggcattgtagttttttttttggccaacaacccaccatttccatggaactcgcgcaagtacttgctaaacttctccttctcatactgcaccgaattggcagcgatttcggtgcgcgccagtcgaagcataaagttggccatatccagcttcatcagcgtcatcagctcgagaatgcagcgaaacgtgtccaccacatcgtcgatcttgcgcagagcggccactgcttcgtccctagctggcgaacaggatcgcgacaggatgttgatcacaaagttggcatatgctcgaaagtccagggtaccccgctccgcttgctggcggatgacggagtcatccagcacctcgttgatgtgggccagggcacgttcgttgttgggcgacagcagctgcgggaagcactccttgatctcagccagcagccggatggcctgatcatacgatggcggctggcggtccagctgcacacgcagcagatcccaaaaggccttgtgcaccatcttcttgatggcgccctccaaactgtggacatgggaatgttaattgaatggtttccctgacagggctgctgctggcacatgctcacctatccgagggcggctcgtacttctgcagcttgaagtccggattgagggctatctcgtgggccagctccatgttgcgcaaattcttgaacatgctggacacttcgtccagggtcacaattttcggcggagtaccatccaagctgggcagcacgaaacgcgtcatgctttccacggaactctcgctgtccgtacggatccggcgctcctcgtgctcttcgtggtcgcccgattgtcccgactgttcactcctattctcctgggcatccatattcaaattccagtcctttgttgtctcctcacgggcggaagtgcgacgttaggcagctgcagcaactggtttcgaccaaatgcgaatttggttaccaccggttagagccagttgtatatatggcttggtgattattacaaggcaattggcaactgcactcgggctttctttgttctttgttcgaggtcgtcgctaaagctccgctcggggtcagttcgcctgggaaagaaagggggtcttagatacagtgatcgcaagatacaagttactcttccatattccttgatgcggtttctcatattagtatcgattttcatatagaagagttggcaggaaaatatttttaggtttataattgcaacacataaccaattttcaataacctgttgctgtgtgcgcatatttctcaaccaaaaatagtgtttcaattgttattttcgaaataggtattagccaatacccactgtaaacaaacacacggaaggaacccgttaaacgtgactcgcacacacacacaaatgagcaaacaagtgcgcgtctgcttgcatgtatgaatgtgcgacaaggagagaaggcgcaaaagatttgaatggaaataaaatgtaacactttcgaaaattctcaaattttctagaatatgtaatttggcaagctgcgtggcacagattccaaaattaaatgtggaaaatgggagcaaattgcacaacggccacgcagcgaatagacgacataaacaaacggcgcaataaagtagcaacaaaaacagaagcgattaggtccatgcgagtgtgtgtatgtgtgtgtatgtatttatgtttcgttgttgttgcttttcctattgcgcagcaagtcagctggggaaaattggaaaattgggaaatagacacaaggacgatgcaaagtggctgcattaaaacaagatgaaagccaatccgaatacttacaataggaagaaacgacgagaaggttccagagtattccgttttacttttcccaaacagctgattcactttccacaatcacagacaaattttgcagttaattttcactcaattatgctcctccaggaggatttttattctaatctgaactattaagaacgacgactgatatccgaatgtttccgtttcgattgaaaactttggttgttgtgcctactttgttttcctttattacaatcccctttccacacagctgttcgaggtgcctatcgaaagttgatcaaatcgtcgctatcgatagacgatacaatagtatgggaaatatattctacgtttacaaatttaagctgtcaaacttatgtttgtttaatgcttatagtagaaacattcacatgtacaacgattcggttgaattttaaaatacttgattttctctgcaaatttaacgataattgcgcgccagtgttgcgtaatggccgcacgttgtggtgttaacaactgaatcgctttgcaacacatcaagagacacaaaaattttttcggtctaaattcctaactagagttagtctgtgtgcgattttggcggcgggattgggagttcccggtaccgcagtgatctgcaccggaaaaccagccatcggaaatctcaagccatggagagcgagaagattctaatggccgccggagtgacggtagccgccgtagtcggagccttcgttttctggggtccttcgggtgagtagtagatcttccatggcgtagttccctactccagcgaaacatttgcaggttcccgtttgcgtcaacgacgcggccaaattgccggtctccacaactttggactgacctgcttcctaaacaccctgctacaggcgatggccgcctgtccccagttcattgcctggctgcaattgtacaacaacgcctcgccggatcgaaaaagcttaattacgtcgatgttaaacactctggaagtggtcaatggcacccatgccactctgcgcggcgatccctattcaccgggagccgttctccgggctctgaatgccctgggctgggtgattccacaggaggagcacgacgcccacgagctgttccacgtgctattgacctgcctggaggaggaggccatacgaccacagcccctcggctgtctgtcggatgctctgcccacggataacgatgataacagcagcttggcaggcacagcaacgccagtagggggctttcgatcattta

SEQ ID NO: 39998 - DNA, 1940 bp, DROSOPHILA
gattgtaataaaggaaaacaaagtaggcacaacaaccaaagttttcaatcgaaacggaaacattcggatatcagtcgtcgttcttaatagttcagattagaataaaaatcctcctggaggagcataattgagtgaaaattaactgcaaaatttgtctgtgattgtggaaagtgaatcagctgtttgggaaaagtaaaacggaatactctggaaccttctcgtcgtttcttcctattgcgaactgaccccgagcggagctttagcgacgacctcgaacaaagaacaaagaaagcccgagtgcagttgccaattgccttgtaataatcaccaagccatatatacaactggctctaaccggtggtaaccaaattcgcatttggtcgaaaccagttgctgcagctgcctaacgtcgcacttccgcccgtgaggagacaacaaaggactggaatttgaatatggatgcccaggagaataggagtgaacagtcgggacaatcgggcgaccacgaagagcacgaggagcgccggatccgtacggacagcgagagttccgtggaaagcatgacgcgtttcgtgctgcccagcttggatggtactccgccgaaaattgtgaccctggacgaagtgtccagcatgttcaagaatttgcgcaacatggagctggcccacgagatagccctcaatccggacttcaagctgcagaagtacgagccgccctcggatagtttggagggcgccatcaagaagatggtgcacaaggccttttgggatctgctgcgtgtgcagctggaccgccagccgccatcgtatgatcaggccatccggctgctggctgagatcaaggagtgcttcccgcagctgctgtcgcccaacaacgaacgtgccctggcccacatcaacgaggtgctggatgactccgtcatccgccagcaagcggagcggggtaccctggactttcgagcatatgccaactttgtgatcaacatcctgtcgcgatcctgttcgccagctagggacgaagcagtggccgctctgcgcaagatcgacgatgtggtggacacgtttcgctgcattctcgagctgatgacgctgatgaagctggatatggccaactttatgcttcgactggcgcgcaccgaaatcgctgccaattcggtgcagtatgagaaggagaagtttagcaagtacttgcgcgagttccatggaaatgttggttttccggccactgaggattggctgcagcgtcaccggtccggtagcagcgatgatgagaccatttacaatgcctacatgcagctgattgactatccggccgacaaggagttcccggagctgttgcgcatcgacaaagagcgcttcgccggcctaagttggcgagcccagcgcttgatcctgtgcgcctcgctcatctcggtggcccagggcatgcctatcatatcgcagcgccgcgagaaccgcatcaagctggcccagcagctggacatcattgtgcaggacatcaagaaccaggaccaagtggcctctaccattgagagctgctacgagcagattcgctcctttgtgaacaaggccctggagcaggagaacttgcctgcgctgagtgatgccgaccaggcggcgctcaagaaccaggtgcttaagctggccaacaagacgtcgccggtgcccagtttgatggccaaacgattggatggctatgtgcgcgtaacactgcgctccaatggcagcattccgccgccgccctcaggattcgcggactaccaagaggagctggttgcatttatcgcctcgttccgtcgtctggtgtcctacaaccacgccgtgttcggggagcacttccaccagatactcaacaaaacgctgcccggtgaggaaacggaggctaccacttccacggccagtggcataaatcctggccaggctcagactgccaagccttag

SEQ ID NO: 39999 - protein, 494 aa, DROSOPHILA
MDAQENRSEQSGQSGDHEEHEERRIRTDSESSVESMTRFVLPSLDGTPPKIVTLDEVSSMFKNLRNMELAHEIALNPDFKLQKYEPPSDSLEGAIKKMVHKAFWDLLRVQLDRQPPSYDQAIRLLAEIKECFPQLLSPNNERALAHINEVLDDSVIRQQAERGTLDFRAYANFVINILSRSCSPARDEAVAALRKIDDVVDTFRCILELMTLMKLDMANFMLRLARTEIAANSVQYEKEKFSKYLREFHGNVGFPATEDWLQRHRSGSSDDETIYNAYMQLIDYPADKEFPELLRIDKERFAGLSWRAQRLILCASLISVAQGMPIISQRRENRIKLAQQLDIIVQDIKNQDQVASTIESCYEQIRSFVNKALEQENLPALSDADQAALKNQVLKLANKTSPVPSLMAKRLDGYVRVTLRSNGSIPPPPSGFADYQEELVAFIASFRRLVSYNHAVFGEHFHQILNKTLPGEETEATTSTASGINPGQAQTAKP

SEQ ID NO: 40000 - DNA, 2882 bp, DROSOPHILA
tatcaactggaaatgatcctaagatgaagtgtgataaacccaacaaaactgtgtgtgatggcggtaagagattgcacatgcagagaaaattccatttaaatgttatgcatttgattaaatgtctaaataaaagaagcctatttattagttggaataactaagtgtaaatgtaatccaaaaaatattaaatataccacggcattttcgatgttgattcccagttaacttatcattttaaattacttaagtggttaactttatcagtagcttcttgtgatttatggattttccattatatttgcaactttgtttgcacgtaaagcagtaatgcatatatttcccatccgttggttattatttcttttgtcaatcctccgtcttcgctggcgttattggccagtggaggacaggagtttctccgtggagtagtgctcagtggagcacgtgcctctttgaataagtggaaaacttttcgactatgacacgcaacttaatttaaactttgcaccgctgccagcgccatcgtcgtcgctgctggcaattagttatgagccaggatttggctcaatcagaggcatggatgcatggtgtcctcgaagctgggagccctgcacttgccgcaccgtgtttaccggcgccattcaatctgcaacttaacaagaaaactttcctcacacaaccattcaaaggcagacacaaagttgcggcggcacagtggtactttcactcgaaatgtagaaatgagaaattttcgaatatctttttattaaatggatagatagattgtaagatgagttcggtcaaatcactgagctgtatcactgtataaatcagttaacaaatatatatactttttcaagtagtagttaattaatcctcgcagttctagtctaatcgcagcttttcaatatttctatgggccatcgttaaaacagcagagcacacaagtgattttagagttgtgtatctttattcaaatactattcaaggctggcctgcgctagatggccatctcctgcacctgatcctcttggcttaaagaacccatcgcccttcgcaaccattggcaaatcgaattggacgagataggtagcatctcgtcctgagagtcagccatatcggtttgggtgcccttgccggtgcccttgcctggattccgatccagatacagaccctctttggactccagctccgtctgtcgctccgcgtggcgttccaaagagcgttgacatcggctccagagatcctggacatcctggctctcgcagtccgactgaatggcctctatcagatatctcatggatcgcccactgtactccatctccaggctgcggatcatttccgcatcgctctgcaactgacactggatcgccacctggcgttcgagtgccttggcatcgaatagcatttgatccaacagtgcatccgtctcggcgatctcgatccgaagcagatcggccatgtccatggccgaactaagttccccaggttttgggcaacgcggcgagggtggcggtggtggtggcgtcaccgggatacgggccgtcttacactggacgacacgtggggtcctcagatgcgtatcggtcttgcgcattttgaaagccttgggcgcaggtcgtggtgctaggctactgggcctacgcttcgggaaagaccttgccgagctggtcgctgtggtggtggggtgtgcggtatcactcctagtcgtgagcaactctggcactgccttctccagagatgcctccagagatgtatagccattcacgctgttcaaatggaggcgacgggcctggtgcaccaaattgacgatagcgcgatccaaagccaaactccgggcactcacggactccgccgcgtcattcagatgttctgtgctcattccaaagcaggtttagtggaaaattttgataatattaatatatatatatggctatactgtgaagatgtagtgtatataagatttggtactaccgaccgaaccgtagagcaaacgtgttgtgtgtgtccctgtcaaattaggtgaaatgaagtgttgccagttggagacgggcctactggtttcggaaaactccaactccaagattacaagtttacaaaggtttttttctctgagtgtatgaatgtgtcgcaaagtatgcagttcgaagaatatttatatatggttagaaatctttatacacagcccactgttggccaaaacgttcgcattatccttcgactgaaggataaagggatgcggagagttcgtgattgcgggggggcgggggtgttttaaaattggcaagttgatgtcacataattgcccctcgagcgctcatcttaattattgtgctcgctgacttcctgttgcccgacttaattccccgttaaagccaacaacacactccctgcggtcgggttcgcccccccaccccccaccatcccactccaacgaccactcttttgccggttccctctgccgcccatggacttactgagtgcgtcgctgctgcgtgtggaaataattaaaattgttcgaagaacgagaggtgttgcactttgcatgtcggcgaaagggggattgatgtgcaacatatatgtacatatgtatgagtatgtgcattatcgtgtcggttggacagaacagccatgcattcatcgcggatgtaaggataatggaacctacttgaacggccctttaaaaaatttattgctttaactattaatcgtttcataaattgaaccttgaatgagatctgtaaataaaatccattgccaaactgagtttatccatttgtagagcgacttcaattttagtttcgctgttttttgcggattttttttcaacgcttccgtgctgcttctgttttaatgaaaagtgaaaagtgggaaaacaagtc

SEQ ID NO: 40001 - DNA, 882 bp, DROSOPHILA
atgagcacagaacatctgaatgacgcggcggagtccgtgagtgcccggagtttggctttggatcgcgctatcgtcaatttggtgcaccaggcccgtcgcctccatttgaacagcgtgaatggctatacatctctggaggcatctctggagaaggcagtgccagagttgctcacgactaggagtgataccgcacaccccaccaccacagcgaccagctcggcaaggtctttcccgaagcgtaggcccagtagcctagcaccacgacctgcgcccaaggctttcaaaatgcgcaagaccgatacgcatctgaggaccccacgtgtcgtccagtgtaagacggcccgtatcccggtgacgccaccaccaccgccaccctcgccgcgttgcccaaaacctggggaacttagttcggccatggacatggccgatctgcttcggatcgagatcgccgagacggatgcactgttggatcaaatgctattcgatgccaaggcactcgaacgccaggtggcgatccagtgtcagttgcagagcgatgcggaaatgatccgcagcctggagatggagtacagtgggcgatccatgagatatctgatagaggccattcagtcggactgcgagagccaggatgtccaggatctctggagccgatgtcaacgctctttggaacgccacgcggagcgacagacggagctggagtccaaagagggtctgtatctggatcggaatccaggcaagggcaccggcaagggcacccaaaccgatatggctgactctcaggacgagatgctacctatctcgtccaattcgatttgccaatggttgcgaagggcgatgggttctttaagccaagaggatcaggtgcaggagatggccatctag

SEQ ID NO: 40002 - protein, 293 aa, DROSOPHILA
MSTEHLNDAAESVSARSLALDRAIVNLVHQARRLHLNSVNGYTSLEASLEKAVPELLTTRSDTAHPTTTATSSARSFPKRRPSSLAPRPAPKAFKMRKTDTHLRTPRVVQCKTARIPVTPPPPPPSPRCPKPGELSSAMDMADLLRIEIAETDALLDQMLFDAKALERQVAIQCQLQSDAEMIRSLEMEYSGRSMRYLIEAIQSDCESQDVQDLWSRCQRSLERHAERQTELESKEGLYLDRNPGKGTGKGTQTDMADSQDEMLPISSNSICQWLRRAMGSLSQEDQVQEMAI

SEQ ID NO: 40003 - DNA, 2702 bp, DROSOPHILA
cccttaatgctaaaataaattccgaaaaacaatctagctgaactgagacgttacgtttgccagtaataaataacttgcttaacgcatttgcaggttgaaccgcattaaatttgaaaccccatcaggatccccagccatttccggtcgacccggcagcaacgcgccgtctatttccggttgtggatgcgatgcgcatttattactcgctttcgcccgatatcagctaccgacttgacttggccgcaatcgtttaagccgtttgagccagccgcaagcaaaccgagagcaatcccccaaattgccgccaaagaacactggcatatatacacagatatttcgatagagacgtatatatacacatatatatatatatatagatatttatatggagtgggaagggaggtcccataacaaaggaccttggcaagctgctggcatccaattgaatccggcatcaattcagacgacccggcgatgacatcccaaacaaaaaggggcggcggaaagtggaaaagcggaaaagcagaaatgaaatgaattatgttaagcatgcaaatttgaataaaaacaaacaaaaaagtgacaaggcaaaaagaaactgcaaacagcgtaaaaaaaaagaaaatatgaactgaaaaatgaatggagagagaacttaactggcaaggacatggacatgaacacaggactcctgtcctgcaaaaatcaactgccaattgcaatttgccaggctgtgcgaataaaacattttaacaacattaaccacagacaccaggaatcgcacgaaaataatgtgaaatgcgcatttatattaatgtaaaaaaaaaagtataaaacaatacacactctttattacttttaagtctttaggctggcgtacgaaattaagaatctagtttccttttaaattcgcccaaggctttgtcagaatttttcaaaattgttgtttctaaaaactcgaaccttcaacctttgcaaagatgttcacaatttaaccaccatggaatcgccagtctgcacttcactgtcgactctcagcgagatgtcgctccaatctctgggaattggagtagctggaaagggccaagccatgttgaaaagcgaaacggaaatcgatgcccacgactggcagttgcttctccactcgatccagtcgcatattcgcaaaaaatccgatctcttgatagctgtcacccactttctgatcaccaaggagtaccgcctgcgttgcgccatcaattattcagcatccgacggaaggcagttggctggaggatgtggaactgtgtgtgagcagctgcccgatcactggaatcgagatgccgatcgatacactctgaactacacggatggtctggccggtcagtatatccttatggccaaactgagtcgcagggatcttgtgatcagtctgcagaactcgaccagcaaacgaatggccatcgtctgtctgcagccggagcatctcgtgaattccacctgtaagtcatcgatggacaagtgcattccgcggctggacaagttcataaagagactgcgtgccgaactggtggatccggcggtgcggggcaccaaaagattggccgagattggaccggcctttaataggaaaatttggaaaagggagctacctgtacgaaattctggcacttctagagtggccttcaacatcgtcgaaagcacccattcgctggagtcttaaaagatgcagagcacaccatgcaatacaaacaaatataaaattattagcctagaatcgatatcgcatttggcttatcttacgagtttctatatgtaaaacactagttacttctactttttggtagtaaagaaagaaagaaagatgttttgtgaattgagtaagcaaagctaagcttattagatgcttctagtgattttttttttttgcaatttttcgcattttcggtaaggggtaacatcatcaaaatttgcaaaaaatggctgaaaaatggaattcccatttttgaacacagttcgattgggaatttaaatacgaactcaacgtgatatgacattccgtattcagacaattatttttaaagttgtggccaaaaaactgattactttatgacggataattaaataattattttaaatgaacaaaaaaaaagttaaaatatagagcaaaagcttaaaagagagcattgtaatatactttaagcccgctgttaaattttcccagatgcacattactcatacgcaatgttgcatttggaaatgcaattaaacgaatatagtgaaatatttattttcagctataatcactattatttttgtgcacctattacattccttttgggatcagagaattggtcagtcgatatccctatgcatttcatgattgcggttgctcgttttcggttgtgctaccattttcgtcctgccacgaattgttgtcattattatggttgctcctccgcgctttgtccgcatttattatttattgtattaataatgcagtcgcgttgaaaatttcataatgtccggcgatgtcattgagtcagcattcgtgccgcagtctcctcttattttttacatttgttgtgtttcaatttttgttgcatatctgcggatgtattattggatgttgacagttttgttgttgatgcagctgtggttgcggcaaacttgacgttgatggccgctttggttcggttcggtttggctggctggctggctgg

SEQ ID NO: 40004 - DNA, 702 bp, DROSOPHILA
atggaatcgccagtctgcacttcactgtcgactctcagcgagatgtcgctccaatctctgggaattggagtagctggaaagggccaagccatgttgaaaagcgaaacggaaatcgatgcccacgactggcagttgcttctccactcgatccagtcgcatattcgcaaaaaatccgatctcttgatagctgtcacccactttctgatcaccaaggagtaccgcctgcgttgcgccatcaattattcagcatccgacggaaggcagttggctggaggatgtggaactgtgtgtgagcagctgcccgatcactggaatcgagatgccgatcgatacactctgaactacacggatggtctggccggtcagtatatccttatggccaaactgagtcgcagggatcttgtgatcagtctgcagaactcgaccagcaaacgaatggccatcgtctgtctgcagccggagcatctcgtgaattccacctgtaagtcatcgatggacaagtgcattccgcggctggacaagttcataaagagactgcgtgccgaactggtggatccggcggtgcggggcaccaaaagattggccgagattggaccggcctttaataggaaaatttggaaaagggagctacctgtacgaaattctggcacttctagagtggccttcaacatcgtcgaaagcacccattcgctggagtcttaa

SEQ ID NO: 40005 - protein, 233 aa, DROSOPHILA
MESPVCTSLSTLSEMSLQSLGIGVAGKGQAMLKSETEIDAHDWQLLLHSIQSHIRKKSDLLIAVTHFLITKEYRLRCAINYSASDGRQLAGGCGTVCEQLPDHWNRDADRYTLNYTDGLAGQYILMAKLSRRDLVISLQNSTSKRMAIVCLQPEHLVNSTCKSSMDKCIPRLDKFIKRLRAELVDPAVRGTKRLAEIGPAFNRKIWKRELPVRNSGTSRVAFNIVESTHSLES

SEQ ID NO: 40006 - DNA, 22622 bp, DROSOPHILA
aattcccaatcgaactgtatccaaaaaatggaattctattttatagccatttttttcaaaatttgatgatgttaccccttaccgaaaatgcgaaaaatgactcaaaaattattttctctaaatcggtcaaaaagtgatacagatggttagtccttgttattagctgctcaaaacagttattctttcatttttatgatcagttttagtcaagttatgataaaaatggccatctaaatgtttttaatttttgccaaaataattttttcgatttttcgtcataaaataatcagttttttggccacaactttaaaaataattgtctgaatatggaatgtcatacctcgttgagctcgtatttgaattcccaatcgattagtatccacaaacgagaattctattttttggccattttttgtaaattttgatgatgttaccccttaccgaaaatgcgaaaattggccgaaaaattaatttttccaaatcggtcaaaaagtgatagggatggttagccggtgtaattagctgctcaaaacagttattcttttggttttatgatcattttgagaatagatattacatttttggctaaatgccgttttacagatttcatttgtgtgatttttccatgtgtacccgttggttttggggctggtgctagttttgggcaagtgtccttgagcattttgtgccaaatgcacaggcgaaaaggggcatgatgaggtgcggaagggagggacgaagaaggagcatggtcgtgtggaaaaggtgggcggtgataggaaatggggggggggcatgtagtagaagtaaagcttggcacacacttcatgctccaagcgagccacagtcacgtacattttataaacttcattcgcttcgccccgtctcgtattcgctcggcagggagccgaattcgccgcggagctttcgcccttgccttcgccgtggcaggatattaaaaaggacctgtttcgccgtcgaggcgccagaacaattcgtgccgcgcgcgcgttcggttcgttgtgcttttggggctcctggaaggattcgtttttactcccgtctctctgtctctctcttcctgtttctcccccctctctctctctctctttctctcccgcctctgcaattcatatcctgtgagcttgggggtgtgcgtgtgtttgcgtgcgtgtgtgagtgagtccttgcggtagtgaaagtaaacaagtcgccgcggcgccggcaaaatgttttattccttgttattgttgcgtggacacagcagaaatattaaaagtgtcctgcacgggaagagaggggaggggggagacacacagagagagagagacagggcaaggggaagcggggaatgaaaatcctttcgccaactccgtgccgatgcgttaatgaacaactgccaatgcgcttgtttcatttcattttttttttatagtgagcgccaaaaaattgagaaccttgaataaataaagaccaagacataagcaaaggtgtttatccttgtcgacagaaatattgagataagagaataaagtgtgaaaaatgatgcgacctcgctgtctggtgtcctttttgggcatctgcctggtaatcagcctgggaatgcgttgcgatgctcgagcggtaagtaaatgcatatacgatcctatcaaaatccaagttcaaagtgcgaatggagtgcttgttaaaggcgcttaaatatgtgcagctgtgcacatagtcaaaaccgaactatgcaccatgtcgcacatgtccttttcctttgtgctctaatgccattgagctgcttcactcaaaaggacaaaccattaattgcccagcttgagctcgcttgactcgaggtcatggcatttaaagctagtcaatttacaatccaaacaatcatttggccaaaatgcccgcagccatacgctttggcaatgcagcaacttaatgtattttaaattattccacaatcacttctgtaagtgatacctgccaccaccaccgccagccgaatgaaatataaactcatgaatgctaataaattacgaaattattgcggcaccaaatcgacatagccggcataaatgtcagtgtggctatatttaatgtctattttcaaacttctcagtcttctgccgaaactgatgaaacggaacggccacaagaaattttctagactaaattgcggctagttggtaatcgaaaatcatttgaaccgagattgggctaagatatttttgggaatatattcagttggcaggagtgggcgtctgaccatcgcttggcccaaatttatatgcgcaaaagttgcgattctgctctgctcggagagtaaatcaaaaatgcgaaactctttggttagccagcaaaaagttttcttagccgctgttgttgtcgccggccgtatactcagcagttgattttggcaacgttcttgttttggtcttgtgctgagcttatcctttcgacccgatcttctctgtcacttgcactggcaaaaataattggataatatgtttcgctcaaacaaaaaaaaaaaaaagaaacattgagatgttatgagagcgctgcaaagtagactaccatatgcaaagtgctttgaattcatttcaaggcctcttttctttcggtgcacttttcttttttctcatcgctcgtggtcgggttgtcctgtttcgaactgtccacccgcccgtaagcgctgcgaaatgaataatttcagtgaatttactacacaattttattcatataaatcacaaattaaataagtttttacgaggttgttcagcggttgcagcccactacaaaacttgtttgtgttctcattctcaacgtccattcgtttatttgtttgtttgtttgtttgttcgctagcttgcttgcttgtttgttgggtctggtatggtatggtatggcctggtccgggttattcgaccctttccacatggccagcaaagacgaatgatgatggaggagcttggggttgggattggagctggagctgttggtggtcacggagcggtgggctcttgccctccaaccgcctttatgccatttgcccttttttatggctgtgtaatttttttgttggcctctttatttatgcttattatcgtgattgctattgctgggctggaaaaacaccgcagccgaagcaaaccgaactctataagaaataaagttctagccatacagcagtataattcaatttgaagcagaacttttgtggaatcagctcgtatattcaatatgatatggtatcaaatacgcattacgcatgtttgattcgattgttataaagagttatcagcccattgaagtgcaaccaacagccaataaaagaagtaataatgaacttggctgggcaaaacctaaatttacatttcacatttactttgacgaaccgatgatgttggggattatccccgttaagctgttcaaagagaagcgcgaatattaagcgagttcgccatgaaagtgaaaatataatcaccaaataaatggggtcagtgggaagtagttgtacaattatgattgcgccgttggccaacagcaacaaaatccagtttggcagctcatttgggcctggatttgccatgtattccgaagattcgctcaatcatttatcacttctactcgtagagtaagcgacacgaaatgctattgctttgctttccatttttcgtgttgggccttttctagctcacattttttgggttttcttttcctatttttttttttttcgttgagcacgtctcgtcagcgggaaatgcgggtgaaaactctgggcctgggtccctaatttgcatacgaaggcttgagggagcttcatgcagatgcattaataatgtaacattagtcgggcgcagaaaaggaggccaaggagcaggaagataaacaatgcggaacgccttaaacgttagccaggatgacacgagatgagctgggaaatttggcctcgcacactggcaataaaatatattcacctcagtacggcaatccaaaggatgttagaaaggcctaaaatgataagtgcgctcaaatgtaaaaactatttcaattgtttgccagcttttagattgataaatactccactttgaacttatcatagcagaaccaaacatgaccttccatgcttggaccgcacttggctagcacggtcacttattttattgcagtgtagccgatttttgggccgatttcattccgtttcattccgctcttattcatggcattcacgtgcgcccgacacgagattcacgagacgtgaaagcaatttacgatgtggccgccgcaacaatgagcaattaatcatgccacggccacaaaatggaacatggagttgctcctcccgctctttctgcacctcctgctccgcttccagtttcactttgcccggcatccgcctgcgagtcacccacagcaccacccactcaaggacgcgtccggcgaaggccgaccagcagacacagaaggcagtgccaaagagagacgtaaaaaaggaggaaaatcggaagaaaaaagcagcctatccgaccttgagctgcattcacctaccgccatttggccatcacccatcaccgccatcaccgacaggcgcccaactatttcgcacatcaaatcataatttatggacggcaatcaaaatgagcctgaattcccattccattccattttttttttttttttacatttcggttatatttgatgatggcttgggctggtgcgaaaaagttgcgcagtcgcccacataattatcggtttgatttatggcagcattttcgcagccaattacttcgcaccagctgaaacgtaggggaaaaaacggaaccggaagttcaaatgaaccactgagcgagcgcatatcgaatccttggcagcttacctatctacaatatatccttggccatattgccaccaaaagagccccgctgattgtgatctcctgttggcctggccaaccttgaagtcagtcaaaactcgctgtgaatgcccatgatgattttgtgagttgcatgcagtgcctgaaggacattcagtcaggacattcaagtggagaaaagaaaaaaagctttcaggcaaacaaactgccatgcaatcgaattttgttcatacaaattttgttgtgccttactttacatacatatttgcatagtttacagtgtagagaaattaaatgagtcctctagacccggttggcaatccagcaggacattaacaaagttggcgcccagcgcacaaaaagacaaacagacaaaatggacaaatagacaaacagaatgacagatggacagagtcggataaacagatggaccatcaaatggttgacacacacgtatatatcttcgccgagcaaggacaatgggaaccaggtcaactggggcacagaggtgaaggcaaaagagtcgacagccagctgccaacccgaaaattttcaccgaacctgaaggcttaagtgggaaatgctggttaagctcgattgccatggaaatgtatgcttttttttctgctgccattttcgggcatttggccttgttgaatttgaatactcaccgaatgtgtacgaaaagaaatataatgccacacatatgatgacgtgttaattttgcttaatttatgaaattagcaacgttctgactacgagttttcaacacaaaattgcggactatgtttcggcttttcctctgttcctttcgatggaaggaacttttgtataattgcgttatctgctccacaccccgaccattgaaaagttgaaaagtgtttgcattcagcttcatcagctgattgccggcaggttcaaagcatcaaagcgaagaaggcaaactttcaggggggggaatgcgaaatggggaaaatgcgtcagttagtcgagttgaggtgtgttgacacatcgtttaggccaatttgcgaattttgttgcaaatctgccagagacttcattttccaaaagtcttgcatatgagaacttgatttccttttcaacacttctgttccaaatattatgtgaaacatacatagaataagtatggacagatatcacattgaaacacctcgtcctctaaggtatttcgactgcataaactagccaggcgagtcaatttcattccctatcgaatgccaaatgactttatatataaattaattatttcttagtcccacgaccgccgagtggttaacccgattagaaatacagtccattcgcatacgcaatggcgtcgggaattcgaaattggaaactgcaagtcggaatgcatcggcaatgtttgcgctgctctgtggtcgtcggttgtgctgcaatcctcgaatgttgacaaacgtaattaagaaattgttaggcccgtcaaatggcagggggggggggtgggggttagttgcacaaatgtttgcccaccgcaatggatgccccatagatatcagatactgctgtgtgcgtctgtgggcaggatgcaggttaacgaggataaacaatacacaaatttgcactttggcctcgaacgagataagcgtggcatgcgcggaattgcaaacagcattcgatgcggcaggtaatcggccaacttggtccatcacgcatatgaaattacatttctacactgaaatttcatctacaggtgtctgaatgaatgcaaagattatagttaacaaactgtagtcgaaaagaacaagtttgctcagccctttcgattgcctggtgagttatttcgaaatactactgatttagctgaagaaattatgcagcgtagttgttaaagctgtgcttttcaacctccacttttatggctgtgaaatttctgcagcttagttacagcagttttacaacacttttccacgggttttcgccattgttgcacggaatgcccttctcgttttttttctttctattttttatttccatcgttcgttcggcgcgggggcgaatgttattgagttgaaaatgtgcaagtaatgaagcaattggcacgtggacctttagcagctccccgcatttttctgccacgccacccatccttcccccaccccccaccgcccaccattgtcttttgttcgcgtggtaatcaactcgattgccaccccatccacgaccctctccttggcgccctttgaccccgttcactgggtggccgggtggcgagtggttggctgcatggttggcgtgtccttcgctagatgcgggcaaagtgcagtcttcatcctcgccaacgcggagacaaaagcgaatccgaatccgaataccccgcggagccacagcccctccgccacagctgccccctttgttttgggccactgcacgcctcgttatgcacaaacaaagcgttttcgcttccatttagcagcaaattagaagctggcgctttgaggtcctgccacgtctcggaaaaaaagcgcaggacttaaacggaggcgaagagacaggtgcgcttttgtgacacgtgcatttgcaaagctatgcaaaacaaaaaatgagaatgaaaagcgtggagagcgaagaaactgcgaaaaaaaagattacattacgaattaattaacagtaaataaaagtgctcgcttgcaagtttgtctgtgtgtgtgtattttaatcactaaaacgcagccagcaagtccataaaaggatgcaggactttataaacgtactgttatgaggggaacttggttttggcccacagcttgaccccaagcgtaaattaatgtgtcggacattaggccccaatgatgatgaacactgaaacaaatcaggaacacacactgctctcatgatttttaatttagaaaacaaaaacttgcaagcaatgaatgtagcccaaacccttgagcccaatctatggtaacagttttggccttatccccagtgtgttcgcatcatcctacaatcgcaattgacaaggacgataatgagaaggataatatgatgttgggtgtgcagaatgcccaacccccttctttcattggcccatctgggcaacatccttgttgttgaaaacattatcgttcacttgggcatcattgataacaaatgctggcccattaatcgggccactttcctcactttcgttaccgagctgcctgattaaacaccaaaaagaagaaagaacacacacccacatgggcaacttctaatgtgtgtgttaaacttttttatgccttcaggccttgtttaataattgaacaataaagaacgaacggcattaagtaatttgtgtcggttaagtcataaaactcacacacaaacccacacaggcacatatgcatacatgcacacaacgcccacacacacacacgcacacatagtcgcataaattgttaattcagtgctcaagttaaatgagtcgttggcatgaaaatttcaagtttattgcagacgaactggggtgcccaataaattttagcttgcgtgcctgagcattgaacaccatccaaatgggcagggtcgcacgaaagggggggcggggggtgtgtgtgtgtgttccccctcagcattttagtatgtttactaatacctctttactacataataattacaaaatgtacaatatacgttcaatcgtagttaacttttgacttactttttagttagcatgtaaatgcaatcgttagaaaaatgtatgcccctcgtaaaaagttgtggtgtacgcccctgtgcaccaaacaatatcccccccccccccccttcccactcatgctcgacaggatgagccattgattcatgttaattaaatgtgacaaaagttgagaaacttttcccaggcgactttctgccttgctggctttctgcctttcggcctttgccttcccccgattgccattgtccttcgctgcacattttcatttcggccatgttgcggtttgctttatggccaatctagccagtgtaccagccacccacaactgaatgccaccccgtgcataatgtgcgacaatttcgattgcgatcatctggccaaaatgttgcggagcaaaagtttctgcgcttttaattagaattcgaagcgaatccgcaagctgtccaagttttatctgggccatgatattgggatacctaagggaagaatggctgactggcttggctggctgcatcaccgattccctgcagggatttgggatttggtgcggaaggacttagttttctttaggagcaggcaaaagtttatgcaacgatttgccaactcgaaggtggccggcgaaaggggcggccactggattatcagcacttttatattattttctttttttttttttgcacagcgacttggaaatagggtggcagtgcaaacttaagcctgccgcaatcaactttccatgggaaactttatgatatcgatggactgtggtcgccaacagcagcaacttagccgaagattactactcaaccgctttgcagcagagcatttattttccaatttttgaatgtttgaattcattcgattcatattttgtcattttcaattcaaaaaacacataagcccaaatggattatcaaaggcacgagaaggaatagtctgtgcaatgcaatttgcaagctgttttaataatgcaacgatctgtattattcagtggcgacgcttgatatttattcatgccgccttgcatttaagattcctgctgccagcacattttgcaaattgaacagatgccaatccaggagtatataaaaccgggctctcaacaccccacccaatgccactatctggcgggggagtgaaggataatgcttagcaggaactccgagcaaactccatgtccgctgcaccacctccatttggcatttatccgcccctcgggtcttccaggggatttcattttcgctaatcaatttgcatagctgcgaaaggggggggaggggcggagggagcaggaaccaacgcctggcaatcatctttagccatcagcgtcctttcttcaactcgactcccagaaactggcggctttcatgtccgctgtccgccgctctgtttcaatttcaattagaaactttaactgcttcagctgcgcgtacccagcggattcccttcatcttagcttagttcattgcagtcaagttggctgcactgcgagaattgcctcgtcctttggacaacaattattttgcaaattattaagctgcaattcggagcttaagtttatgctgcatttttcgctgcactcaagctaagcgaagtacactgccaaatatgcagttggcgattaaataaatcggatttggaatttttatgatttattatttttaatgatttattccaagtgccaagtgcactttgtgttcaatggctaactgaataattgcggaatattcagcttggcttgctttattcagcatttgggtgcatttgttgggggaattagggtatgcgaaaattggttctatttgatttgggttttcgcacattattttcgctagcttgattgcagggaataacatttagggcacctgtcaacgcattccacggcattctctctcttatttccgtggtatttttagctgagaaatttaatttcttttcagctgcctgccattcggaacgtcttggctgcaccgtaacgcccagttttctctattttttttttttttttttttttgctggataaaatctcttaagctggttgcaataatacaagcggaggaaaattcgcacagacacacacacacacacacgcacgcacacgagggcacaggacgaattgagttcgtgtggcaggatgtgcttgcatggtttcgtgtcctggggtgcggcaaagagttgacttaagtgcgcataattcacattggctcgaaagtagcgcaaggattaggcgatgcacaacaaattacgatgttatccttggggctgcaaccgaaacacatgttgttgtccatatccttcttgccatctccgtggcggccccattaacccacaaagcacacgactcgtggcccaaaaatcatctttttccgcagccgaaaacattatcctgcctgctttttggctagcagtggctttaacatgttttaaaattaacgatttaaggataatcaccaactgataaacatattttacaaaatgaagagctagtttagttttaagatctctgaattctttcattttcagtactgtttttctcgcacattgctcttatcgagatgtactcattgcaccattttcccccattttcctcccatttgtctcacctcgctgattgactggccagattgcaatttccctggatatctcggccccacttaatccccttaagccctcgtgtcacgcactcatctgcagactgaggactgaatggctggcgtactgatggattgactggctgacacagtgacaaactgacaaactggcaaactgacttgcagcgctggttgtcttcaattttaataaatttcccgtgcatgtaagcaagcgcgacagttgacagctgcagcttcgtttcccattttcctcctttgctgctgccttggatggcagcagtatcagtgggcggtgggcgttggccgatgggtggtgggcgttgtgttatccttcgtccttcgtccattgttggccaccaaaggagtggcggggtctggttgggtgcaaaaacggctttgttgccgctgtttttggcacagtctgttacaattacatgtcccactgtctgccttagggggcggtggacatagatgggtggctgctgggtggtgacctgccaaggacattgcagtgccactgtgacatcacgatatattttatacaaggcgacgggtcacgctctcgtttcatttatttctgctctgtgcatatttctctgccacccagtgtcatcgttatttatatatcctcagtcgcccacagtcgtttctaaaccacctgtcgttggatagaggctgcaggtaatgttgggcgttgggtggctggctgcacaattgccacttgacgcacatcgaggatactcgaacgcgcagcatcgacaaattgagcagctaacggaggagctacttcaacacgagctgcagctctttgatggccttgtcatccattctcatatcacatacatattatgatctgggttatctggaagtaatatagaaaatggaacatttaagtaggtgctacgtaataaagctttcggtaatgtatccaatcctctgaattctgtgcttttctgcctttttctttgattaccaatcgcggcaagtcttcactttccaccatccgaaagatgcccgcttttgcaaacttgcctgccatcgctcatacgcaccgtggacagcaatttatcgccataaaagtatataatgccaggtcgtcccacttcgtcgctccagacgcttcattaccataatggccaaccttatggggtgtaaatcatctaaaacataagcttgccacaaggtgggcgtgaaaatggcagactggggagaaataaaactcaaaaatcacattgctaattcataaataagccgtttgacttggcagcttttgtgacgcaatatttagccaaggacggagaaattaaagcaaaaaaggtagatggcattaaatatgccaatatatcaaaaggattgttaatttgcacaccttgcgccaacgggcgtatttgattttaaacgcgccccattttgtggctgccacattagcatacatctgcatatatgtgagtatatctgggcatatacacatagatactcgtacatatatatatatgtatatatatatgtcgcttgtactggaacaagatacttatgattcacgcacgactcgggcaaagattggagccacttcaaagcgccacaggcgctgattgtgttgacaccccgggccaaaggaccgccctccaatcctcatcatcattctcatcctcttagccatcttgccagccatcttgccagaaagttccattataatcgctcgagtacttggtaaaaagccaataaagaagaggaaaatgaaaatactttcctttgagcgcaggtgagcggggcacggagaatggggcatgttaacgttatcaaaagaggatgaatcagctcacattatgcattcacaatttgttttggatccgagctgggggaaatatgcaaataataccagttttagctgctagtcgagagcgcatagtaatgccatgaaaagtacatgtagcaggaagttaataaataaaagttaacttcttaaagttgcctaaagcagtgcataacttttggatatatattatggcgtaattataatgtgcacatagccccacttcgtatggctccataagttgaaaaccgtttgaaaacaaagcgcatccacttaaagtcctttacaagttgctgatctcattacatcctttggctaaatgttcggttcccaagtacttagcgcttaatttcccgctctgtgccaaagtaaaatagaaacccatgattaaaaggtgcaaacagagcacttttccgtgaaatccaggggatgcattgtgctaacttgtgttcgcccctttcgcaaaatgcaaatacaagaatacaaaaaattatacaagcacaaagaagtcttttgcagcgctttgtgatttcacttattcttttgtttaatttgtactcgcaacgcccgcgctgccacaggatgtcttcatcataattacaaacaaagcataactacggggaaaacagcagacaaacaacagcaacagcagcagcaagagcagcaacatcagaaacagcagcaactgcaacaactgcagcagcagcaacagcaggaggcgccgcaaaagaagaagtggcaaccgtggaattgtttgcacagcaagttgcggagtttccgaaaggcacaagaaaagcaaaaaacgtagctgagaaaaatgagatatatataatatatatacatatttggaaaatcaacaatcggtggcaagacaacatctgctgcagttgcagttgcacttgcacttgcttgagtgctgatgttgccaatatttgttgtaaagctgggtagaaaatatattggttctgatttcgattgaaatttaaacgctaatagctatctatactgatattccagtactaacgatagttagtaccacattgcgaatcaattgcattcaacttgaacgcttcattttcaaaagttccctggctttcaaaatcaggattgacagattcatatcaagtaattttcttagagtttgaaaggattcgtatagcttccttttgaatcttcttaatttcactggattttcgccaaaagccttgctgcaaatattttcccaccagaaagttgctaagcaatgttcacagaacaaatttaattagtttcaacaaaaaacccactcttaaaatatttaagattctaaatttctatattctaaaattaaatattggccattaaaaaaaaagtgtttttgtgttattatttacaatcgtctgtttgtgtttcttataactaaagcccatattgcattgtgtgacagcgtaaacaaaccaaactttcattcttatgatataacttaaatctacaatagtatgtattttgcacaccctaaatttggatttgggatattgtaattgtaaatccggaagtgcaccatcatcatatattttccattgctacttttgataacttcaccgggattcgaacccggaccggcggcactacctcccgattggaagttcgcatactaactgtatgcgctgccgccggcggcgaggggtcagctcccaggggataaactagaaccacacctgcttcgattgacagattcacgttacgtaattttttcagaatttttacagctttgcgtagcttaggggttagagcattcgactctcgtttgaaagtgaacgggttcaaatcccagtagggttaatatacattttttttttttttataaataccaaaattttacacattcccattgatattttctcgctcttcaaattgattaatcatgtcaaatgtggcaggacctttttatgccgctgatgttgcacatccgcagggttaaattaaatgaggcgcatttgttgatcaaatataccaaactgctttacatattttcgattactccttttgccagcagccaactgaaatattttccatgttaatacttgatcaatttgcagcctcagaaaactttactgcattattaataatgccagcaaatacagtcgcagcgaggcatatgtttgtagcagatatccattaagatattatattaaaaaccatatagggccataaatgtataataactgcaatggctgtgggcaaattaaattgatatttcataagcgaacaaattcgttgggcgacaaaaagacgaaataaagaaatgaatcgcttttacggatataaaaccaaaattaatcgagtgataagtgctgaatatatacctatttaaatacatttacagtccctgtacatttcatccccgtttctataatgtttttcatttcatttcgctgttgatggaattttttaccgccccgctcttctacccgcatcacaatggccaagaagtcgtttttttgaatttttcaattaaatgttaattaagttaatgaaatgcctgccactcaccccgcataaactggatccctgaattggaaacggggaaaaaaaacaggcggagagcagagaaaaatttccgaatgtatgaccagcattccttttgaatcttcttaattttactggatttttgccaaaagccttgccgcaagaattttcccaccagaaagttgctaagcaatgttcatagaacaaatttaattagtttaaacacaaaaccaacttttcgctgcgtttatgatgaacatcggatgagtggaacaaattgaaaacctaatccattaacataaaatttaatattggcccaaaaatggttttccacaaacgatttgcatttgactttgttcagagttacaagttgcctactagaaaactacgaagtgcacatcgaattcccttcgctcagtggctgttgcttgctgggcccattaagaatttttcatatcataaaaccatctaaagcacattttgtatacgaaacactcgaggaaatcagctatttaaatttccgtttgacaagagtgttttgttaagcccaccgtaatgccaccttctttcggccgcactttgtcatcagctttgcgctgtgaataccatatatttgcatacttatgtacgtttatacgagtatgtattcctggggagatgagttcgcgtcgagcatttatgcaccatcgtcctcgggcctctgctcctaattagttaatgtacgagagcgaggtctgtcactcgactccgtgagctgaagacgcagatggaagatggaggatatagccggaaatggagacgatgctggagtacccgggctggttcccctggcgtttggttcctcggtctcagaacgtggcggcgttctacaaagaacatttttggaatctctcgaggagtggagaagaagaaggtggtggatgtggaagtgaggcattgcggcagctgttgcgacccccgctgcccgtttgttcagtttttcccagttgccccctaatgaaatatatggggacatggcttcaaagcagattttacatcgagaaaaatccctctgccccccactaagcaaatgtgcgcgtgtgttgtatgtatttttaatgtcgtagagtcatacctacaagtaaaaatctctcggaagcacccgcctcccctttgggcattaaaaatgtaaacgctttacgggccacgtaaaatgcttaatgcataacgtatacgcaccgtgcgccgctcgcatacaaataaaccgaaatgaactcttttccgtatttcccacgatttctgttctcttcacaggtgaacgtgagcaacacctggacgatgccgcaagagggtctgaacgtcttttatcgcttcttccgcgatcgcatatcctggtttgaggccgatgccgtctgtcaatttcatcacgccaatctagtgacgggtaagtgagaatccaactgcgttccaaatgcagcaccggatgtaacagagctgtgtgctaaatgccggaaagaaaatgcaagtttaaatgcaaataagcccacagttcttggattctaacagcacagaagagaacagaacaggaaaaaaaaaaaaaaatcagccgatgggaatggcacattattacgaatgtccggccaacgagcgtcacctagcaactggcgaatgcatttgggactttgctggataagagggaactggagggcactgcgggtgcagaagacagatttcaaagggacattgccattgtggttcgcaaatgaatgaaatgacagcaaagtgacgcagccacagtcgagtcttttatgtggccagaccccaaaagctttggcgtagaatcaacctctctggcctgcattttccgccccctcgcttaccgcactgcatttgcttgtgcttttcacttttttttttttttattttcgaagcaaggggttgttgctatgcgcccaaacaaaacccacctcataatacaataaatccttctgacaaatgctgtcgctgcagtgccgtcggctagaggcatctacccctttccccccaaaatcatcagcttccgtcggctggggggaggggggtactacgaaacagtagcaggtcaagattggggtcacagtggccagataaagatggccagcagttcggtgcatctaaatcacaatcagccggtcgctcaaatgacccaaaacaagcgactcaatagtgtgccagaaaaatgccaatatatcagctttcaacaaaagtgtgcgagtatgaatgcaggtcctgtgatctttatcaaataaaagtcaggaagagtaaatttacatgcaagtgaattgtgaaggatatttaaagtgacttaaaatgcaaggatttgtattcaagctaactaaatggggcttttaactagttgattgaaccttttctcggattgatgccttaattcactaatatagtatttagtattcagcgagcagttagcgcatttaggatccggcatcaatttgttgacaccgcacactatttggtttttttttttttttttttttttgcaacatatgcaaatgtgacgcacacaatagctgggaatgggaatcgcaaacaggagcgaaaacaggcaaccgacacacaagagagctagcgaaaatggtagaaaaaatcattttcggcagcgttttgttaacaatttgtgatgtcactggagggtaacatcgagctgatggcttcccactgtcgaaaagctcaattgaaacaaaaaacccaaatgaaaacgaaatgggggcaaaaaaaaaaaacaaaaacacacacaaacaaaacaacaacaataggcgagtcgaatttaatagaaatactctgtgtagaacaaataaaaaccatttgtcgtctcgttttcatttgaactattctctctgctcatccttttttttccccccctcccctttgtttcttctacgtacgctgtttttgccgaacgtcctgcgtgtgtgtgtgtgtgtgtgtgcgagagatgtccttacagtcgacaacagttttcaattcgatgcaacgcgcgacctgctgagggaattggatgtgaacgacatcgtttggattggtctcatgcgaccgcagaactcggatcgttttatgtggtcgtaagtacaacaatagcaacggctacatcaacatcaacactagcaacaaaagcaaaaccattgtagtgtgtagggtatgcaaggacaccaggatacaagggtacaacggctacacggacatacggatacagggatacatgaatatacggatacagatacatagcggggacatggggatgcaaccgaaagggattgagcgacaattgtcctgttggggccgacatgtgtatagtggtcctccatttaggaatggatcagagtcgggaggaatcccccaaacagcaaaaacgccgaggattggggttctttatatataatcagaagcatacatgttacactaagtgaaatcgagaagggttggcaaaaataaaataaaataataatggttatcgggtttcaaaactttgactttcagccaattacgttcagtaagctcaaacatatatagcaaaaaaaaaaaaaggggagcaacatatcgactttcctagcttttcacatttaatatgaaggggtttgaaagtatgaagagaaagagatcggtttatgatttggttttttttacccggctggtcaggaactcgcgtcccttggtggcagatactggttactgggccgaatccctaccactgatggatgctccgctctgcgccgtaatcgatcccattcgagattaccgctggcacgctctgcgctgcggtggacccgaaacggcctccttcctttgcgaaatgccaggtaggtggagatttctggatgggattccagccttgggctaactgatctctggaccatatgttttccgcaccgcactatccgtagttcccagctgggcggatgcttgcatactgaaggacatgcccaatttgaccatgcaatacatggcggatacggccagcatcgagctgatccgcaattgccaggaggagggactgctgcgacacacctgcaagggcaaggaggtgagctagggttattccagctacgattaaatgacagaagcgaatatgaacatttccctctgttctccttaactcttgtgtgccatttcaggatcgtgagcgtgccattcgacagctgatctgtcccaaggagcgtttggaggcgcagcgcatcaacgacatcacaaactcgcacttcaagtcgctgcagatcatcaacaacatccacactgataacaaggagaataacgacatcgatctgctgcccaactatggccgccgatccggaatggccatcaacatcgaggtggcgccaccagtgccgcccgtttcggttcccggattgggagagctgatgcaggcggatgctccgggcgccgtatcactgtccggactgtatcgcatacctgacctggtgcccaagcctgtgaagaaggcggccaagaaggtgatcacaccggactttgccaagaagctgcagggtagccatcagcagcagcacaaccagcagcagcagcaacagcagcaacagaagtcgcgcaagtcgttggtgcaccagcacgaggaggaactgatgatgggcgaccagccggcactgagtgaggagcaactgcctccgggtatgggaatgggcctcggtattcgaatgcccctcaacgaggatgacagcaatagcgatgcctccaatgagatattcgaacatttgccgcacaagaagaagatcctgccgcaggatctgcgcaccatggcgccaattcctgaagccaaatcgccagcgatgacaacaactacactgaagacaaccactttggcgacaccggcaacagcaacaaccactacaccagcaacaacgacaacggcgacggcagcaactgaagtggtgaccacaccgaaagcagtggacaccacaagttcacaggcgccggcaacaacaacgcggccaacaacaacggttagaaccaccacgattacaaccaccactacaacagcaacaactacgcccaaaacggaagagacaacaacaacaacgactaagaaaccagagccaacaaccatggtagcaccacgaacaacaaaaacatcagcaatcgaagcggcagcagcagcagcagcagcagcagcagcaactggcacaacaacagtagcaacatccgctgaaacaccaacaacaacaacgagcacagcagcagcagcgacagcaacaacaactagccatgccacgcccacggacaagagcaacagcaacaacatggcacatcccatacatccctcgcagcagcaacaccaccaacaacagcagatactgcacgaaggcgccacgttgcagcagcaacatgcaacgcacgtcaacgagtccgccgacaatacgcgctttataccgccaatgctgctggtgaagtcgcactacgtgccgccggccaaacatgccagcgagcatgcgaccacaacaacacgagcgacaacaacgtccagtacgacaacagcagcagcaacagcaacaacaccagcagcagcagcagcagaaacatcgaccaaagtggaagtgcagccatcaacagtcacgtcatcgaaggaactgacagcagcaacagcagcagcaacaacatcagctgcaacagtcgctgacactgtggcaacatcaaccgtgacagcgacaacaggtgcagctgtggaggtgacaacaagcgtgaaagtaactgaagacaccgcagcaacatcagcagcaacggtaattgccagtgaagcgccaccagcagcagcagcaaccactactgctaccagagcagccgcagctaatgaaatcaaatcgaatgccacagcagctgcagcaacaacaacagcagcagcaacaacaacaacatccattccgaagccagtcagggagttcagatatccgcgagtgaatcagggatccttcaaggtggacaacaacggcatgggcagccccgaggaggaggaggaggacgaggagggccatttgaagaccgaggcggccacaacgcgacacaacttcctggaggagaccgaggcgccattcaagccaaatcgacgacgctcgctaaccaaaccggaaacggttagctatttcaaaaagatcttgggctaaagacgcccggagccgcgttgctgcaaccgtaatccgcactagtaaccgtaaacgtaaacgtaatcgtgacagtaaccaactgttaaaccataaataagaaaaatgatgatgaagtaagacgtaagaagtacactccctgcacagccacgtaattggtcttcaaaatcagagcaaattgaaacagttgttggcattgccccgctggccatttcctttccttccttttaaaagtctccccaggaacccagaccccacaacatcatcccgcatccatattcctggccaaaagtttgcggagctaccgcttcccaaagacttgtgtcaccggcagaaatgccggaaatccaagcggaaacccaaaagaaaactcaactcaagtcgactcgactccagttgcaagtaccgaaatatgtcaatttttcaccggaaaaaagcaagaaagcaagtaaatgcaaacaaacaaacacgcacactcaaaagcagatacagatacagatacagatacagatacagatacaaatacagataacagatacacttacagccggggaaagtgcaaagtctatcaggtggggatggaaaaaatagatggaaagcaaaacgctggaggacattcgaatggaaatgcggggagtttgtgcggtgcaaaggccaaatctaaagtacgataaatactacgagaaaagtgtttacaaacgtatacatagggcgtctgttttggatttccgtttgctttgcctacgagcgacatgtggtcacactggtccgaatggaaaagtgtgaatagagtagaaaaaactgcacaacactcgatggcattttttttttttttttcgatctcacttgtttcgatttccgattgcattggctcgtttttaaacgttctgaaaatatttaaacgcttgatagttgattatatttaatgtttctatttgctttattcactttatcgacaccttttattgaattgcattttaagtgcttccattaaaatagtaat

SEQ ID NO: 40007 - DNA, 2753 bp, DROSOPHILA
ccgcgcgcgcgttcgtgagcgccaaaaaattgagaaccttgaataaataaagaccaagacataagcaaaggtgtttatccttgtcgacagaaatattgagataagagaataaagtgtgaaaaatgatgcgacctcgctgtctggtgtcctttttgggcatctgcctggtaatcagcctgggaatgcgttgcgatgctcgagcggtaagtaaagtgaacgtgagcaacacctggacgatgccgcaagagggtctgaacgtcttttatcgcttcttccgcgatcgcatatcctggtttgaggccgatgccgtctgtcaatttcatcacgccaatctagtgacggtcgacaacagttttcaattcgatgcaacgcgcgacctgctgagggaattggatgtgaacgacatcgtttggattggtctcatgcgaccgcagaactcggatcgttttatgtggtcgaactcgcgtcccttggtggcagatactggttactgggccgaatccctaccactgatggatgctccgctctgcgccgtaatcgatcccattcgagattaccgctggcacgctctgcgctgcggtggacccgaaacggcctccttcctttgcgaaatgccagttcccagctgggcggatgcttgcatactgaaggacatgcccaatttgaccatgcaatacatggcggatacggccagcatcgagctgatccgcaattgccaggaggagggactgctgcgacacacctgcaagggcaaggaggatcgtgagcgtgccattcgacagctgatctgtcccaaggagcgtttggaggcgcagcgcatcaacgacatcacaaactcgcacttcaagtcgctgcagatcatcaacaacatccacactgataacaaggagaataacgacatcgatctgctgcccaactatggccgccgatccggaatggccatcaacatcgaggtggcgccaccagtgccgcccgtttcggttcccggattgggagagctgatgcaggcggatgctccgggcgccgtatcactgtccggactgtatcgcatacctgacctggtgcccaagcctgtgaagaaggcggccaagaaggtgatcacaccggactttgccaagaagctgcagggtagccatcagcagcagcacaaccagcagcagcagcaacagcagcaacagaagtcgcgcaagtcgttggtgcaccagcacgaggaggaactgatgatgggcgaccagccggcactgagtgaggagcaactgcctccgggtatgggaatgggcctcggtattcgaatgcccctcaacgaggatgacagcaatagcgatgcctccaatgagatattcgaacatttgccgcacaagaagaagatcctgccgcaggatctgcgcaccatggcgccaattcctgaagccaaatcgccagcgatgacaacaactacactgaagacaaccactttggcgacaccggcaacagcaacaaccactacaccagcaacaacgacaacggcgacggcagcaactgaagtggtgaccacaccgaaagcagtggacaccacaagttcacaggcgccggcaacaacaacgcggccaacaacaacggttagaaccaccacgattacaaccaccactacaacagcaacaactacgcccaaaacggaagagacaacaacaacaacgactaagaaaccagagccaacaaccatggtagcaccacgaacaacaaaaacatcagcaatcgaagcggcagcagcagcagcagcagcagcagcagcaactggcacaacaacagtagcaacatccgctgaaacaccaacaacaacaacgagcacagcagcagcagcgacagcaacaacaactagccatgccacgcccacggacaagagcaacagcaacaacatggcacatcccatacatccctcgcagcagcaacaccaccaacaacagcagatactgcacgaaggcgccacgttgcagcagcaacatgcaacgcacgtcaacgagtccgccgacaatacgcgctttataccgccaatgctgctggtgaagtcgcactacgtgccgccggccaaacatgccagcgagcatgcgaccacaacaacacgagcgacaacaacgtccagtacgacaacagcagcagcaacagcaacaacaccagcagcagcagcagcagaaacatcgaccaaagtggaagtgcagccatcaacagtcacgtcatcgaaggaactgacagcagcaacagcagcagcaacaacatcagctgcaacagtcgctgacactgtggcaacatcaaccgtgacagcgacaacaggtgcagctgtggaggtgacaacaagcgtgaaagtaactgaagacaccgcagcaacatcagcagcaacggtaattgccagtgaagcgccaccagcagcagcagcaaccactactgctaccagagcagccgcagctaatgaaatcaaatcgaatgccacagcagctgcagcaacaacaacagcagcagcaacaacaacaacatccattccgaagccagtcagggagttcagatatccgcgagtgaatcagggatccttcaaggtggacaacaacggcatgggcagccccgaggaggaggaggaggacgaggagggccatttgaagaccgaggcggccacaacgcgacacaacttcctggaggagaccgaggcgccattcaagccaaatcgacgacgctcgctaaccaaaccggaaacggttagctatttcaaaaagatcttgggctaa

SEQ ID NO: 40008 - protein, 875 aa, DROSOPHILA
MRPRCLVSFLGICLVISLGMRCDARAVSKVNVSNTWTMPQEGLNVFYRFFRDRISWFEADAVCQFHHANLVTVDNSFQFDATRDLLRELDVNDIVWIGLMRPQNSDRFMWSNSRPLVADTGYWAESLPLMDAPLCAVIDPIRDYRWHALRCGGPETASFLCEMPVPSWADACILKDMPNLTMQYMADTASIELIRNCQEEGLLRHTCKGKEDRERAIRQLICPKERLEAQRINDITNSHFKSLQIINNIHTDNKENNDIDLLPNYGRRSGMAINIEVAPPVPPVSVPGLGELMQADAPGAVSLSGLYRIPDLVPKPVKKAAKKVITPDFAKKLQGSHQQQHNQQQQQQQQQKSRKSLVHQHEEELMMGDQPALSEEQLPPGMGMGLGIRMPLNEDDSNSDASNEIFEHLPHKKKILPQDLRTMAPIPEAKSPAMTTTTLKTTTLATPATATTTTPATTTTATAATEVVTTPKAVDTTSSQAPATTTRPTTTVRTTTITTTTTTATTTPKTEETTTTTTKKPEPTTMVAPRTTKTSAIEAAAAAAAAAAATGTTTVATSAETPTTTTSTAAAATATTTSHATPTDKSNSNNMAHPIHPSQQQHHQQQQILHEGATLQQQHATHVNESADNTRFIPPMLLVKSHYVPPAKHASEHATTTTRATTTSSTTTAAATATTPAAAAAETSTKVEVQPSTVTSSKELTAATAAATTSAATVADTVATSTVTATTGAAVEVTTSVKVTEDTAATSAATVIASEAPPAAAATTTATRAAAANEIKSNATAAAATTTAAATTTTSIPKPVREFRYPRVNQGSFKVDNNGMGSPEEEEEDEEGHLKTEAATTRHNFLEETEAPFKPNRRRSLTKPETVSYFKKILG

SEQ ID NO: 40009 - DNA, 2651 bp, DROSOPHILA
caactggtcgaccaaataggcccagggcatttgggagcaggtgggggtgttgtaggttcacagggcgtgtatacaattgcagatagagattttggacctgcacgtgccccatgtggaatcgcatggatcgaatgcgaacgaaacgagctccaactggccagtcagtcacgcgccaaggaccgacacttattacgtaatatccatgagcaaattgtccaagcttgagatgaaaaccaaacccttacgacaaggacagccataaatctctttcgattcgcaactattttagtaagtttaagcatctgcatacggctaagcacacagcatatggtttagctcttaaaatgcttaaataattccaaaatataacatatttgtccaactcaaatgttttgtttactgagaatggcttacttcagaatggctacggcaaacaaatcacaaggcaatcacccaactatgctgcttaatttgcgcaggtactcgaggattatgtctcctcattagggattattaattagagatttattcgccgtgatccgcagctaagaagtcgggcgtccttggagcccagcagttgtcatggcatccatccacaagcccacccacccaatttcggcataagcatcgcacaagtggcacataacaacaattgaattttcagttaacatcactaattagtcgcaagacacttggggcgcagtcaatatgaggattaatacactggcgaaaatttccccaagcaattgtagataaagaaaagtgtatttattttacatatgtaataaatataaaacattgatattttaagtctaaatatgagtaaattttgtcatttctatactaatgtaatagcattttacaagctgattgcgtgtgcaatttgccgggctgtcttatcgtgttcataaaccagcgataaggaaccatttcactgtttttttggggcgtgttattggcttttgggcatggtggtgataagatgggttagctgctttgcctacaaatggagcacgaaggtctggacactctcgtgtggcggcggcggtcgtatgacctgctgcccactggcgtccaggtggtccacgtaccgcaacgtgttgatgagctggtagcccagacgctggaccaatcgggcggagtagacactggtacagtcgacggatacgagctgatgccccaaatctctgccccgctgggccactgtctccatgaggcggccgcccagattacgacccctcagctgcggatcaacgcccagtgcatgaacatgcaggcagctgggtacactgaagcgacggcacacatcggtggccgtctccacggcggatagcagatgcagaatgctaccccacttaccgccggcatattttctggcctcctcggccatgtgttccggttcgtgggagtcctttggtcccgccacaacggcggccacaatccggccttcgtgcagcgccacgaagcatgtgccaaagggaacattggatagcagaaactccttgtccgccgcctccggctctggaggatgtgtgccggccgtcagaggttcctcggggtaatagtgggccagcaggaaggtcatcagttgctccgtttccccgacgtccacctggcgcaccacaatgtcatcggcaatcggtttagccatttcggatttctatttgcaaatttctttcggaaacgattcccaaacacgtggagacttcacatacaactgatcgtcagctggccaagattgggggctttctgcaatcagatggtgcttggatggcatgttggattccaagctctccaaagtggatcgttcgatggttgaggtaggtcggagttatgtggatggtaaagcgcaaagcccatactttttgcttttgactttcgtacagtaatattttcctcaaatgataatgcttttaaataattcatttcattaaatataatttcaaattaactgaaaccgctttaagctattaatttgatttgcattgattgtctcaatcattcgcgaatcgcaacattccgtgtgcccacacacataatgggcactttgtgttaggcacaacgggtccattgtgttgatgatgtccggagaatgcgaatgttttgcattgattaaccaatcaactgggggtagcgtagcgtagaacaccacaaacaggaccacctccttcgcatagctacagggactgccccactccgtaatcccgtggagcaggtcgcatttccatgcggactacgtgtggcattaagtggcgtccagtagagctaatggagagcatcggaaccattaggaaaggtattaggtcggcttaagaaccttgaatccgcatacaacacaacatctacggtgtggcaccgcaacagcagggacgcacaacacggacacaagtagcctcctggctgagcaaataaatgtgtagtgtccaccggaggtatcgccacgaatgcccgttgccctgccccacatttgcatggccaatggccatcgattcgaggggttcgatgccaggttccgggctagcggatatggatatacttttccggaaagggtgctgctcgggcgacaagagtaatccgtaaactatggaaactacacaaacgacatcgacagggacaccacacggcgtggatgtgaaagtgggtggagtagt

SEQ ID NO: 40010 - DNA, 651 bp, DROSOPHILA
atggctaaaccgattgccgatgacattgtggtgcgccaggtggacgtcggggaaacggagcaactgatgaccttcctgctggcccactattaccccgaggaacctctgacggccggcacacatcctccagagccggaggcggcggacaaggagtttctgctatccaatgttccctttggcacatgcttcgtggcgctgcacgaaggccggattgtggccgccgttgtggcgggaccaaaggactcccacgaaccggaacacatggccgaggaggccagaaaatatgccggcggtaagtggggtagcattctgcatctgctatccgccgtggagacggccaccgatgtgtgccgtcgcttcagtgtacccagctgcctgcatgttcatgcactgggcgttgatccgcagctgaggggtcgtaatctgggcggccgcctcatggagacagtggcccagcggggcagagatttggggcatcagctcgtatccgtcgactgtaccagtgtctactccgcccgattggtccagcgtctgggctaccagctcatcaacacgttgcggtacgtggaccacctggacgccagtgggcagcaggtcatacgaccgccgccgccacacgagagtgtccagaccttcgtgctccatttgtag

SEQ ID NO: 40011 - protein, 216 aa, DROSOPHILA
MAKPIADDIVVRQVDVGETEQLMTFLLAHYYPEEPLTAGTHPPEPEAADKEFLLSNVPFGTCFVALHEGRIVAAVVAGPKDSHEPEHMAEEARKYAGGKWGSILHLLSAVETATDVCRRFSVPSCLHVHALGVDPQLRGRNLGGRLMETVAQRGRDLGHQLVSVDCTSVYSARLVQRLGYQLINTLRYVDHLDASGQQVIRPPPPHESVQTFVLHL

SEQ ID NO: 40012 - DNA, 3113 bp, DROSOPHILA
gtgcacaattgcgataagcgcaattcaatcaaaatcaaattagagtgcatcgagcaaaggagccaacccaataattgaggatactcctgtggcgctttagatggccatcagggcataaaattgcccatcgacttggcaactgtgtcccggacatggccatgaaaccactacgggtataaaagcaggcgtcggcagctcgcagagctgtcagttgtaaggataatcgggcacagagcgagatgttcttcgaactccggttagcctcggaactggagcctcgaggatggaccgaggatagcaagaccactttctggactaacattggagggacgagcaaatggagtatcagtactgttctactaagaatatcacataaccaaatatcaactgtgtattaaccgaaacagtctagttatacatatatctgcaccttattcgcattaaccaacatttaatctatccgtagctcagtaatctaaatgtaatcactgtttaaacttagccagttaaatgttgctgttgtttgggatcgtattgtcatggagctgaaagatttgagcagcttcttctcttactcgtctatccgttaactactactactcgtatatttgtatgcaacttctacgctaatcacatacgaaagactataatgtattactatccatatgcttgaatgcacgatacaagaagcacatatgattataatgttcgattatggggattgcccgaatcatcggtaattatccatccaaatgttaaataaattgtactcgtactttaaccaaaagttggacagaaatcaagatgaattttaattggtggaaaaaaaaaacagttttaaaaagttacaaggaaatatttattacgtattttattatgcgccctggttaaaatccgtaaaagaacatttgcaggacttctggttccagcccgcagagaatcattccttcacgctgatgattctctgcgttatgaaaccagaagtaccccaaaaaatttcctacagcaattcgcagtgggtgatgagcagtggccggctgattttcccatttttggtcccatgagcttccatggcctcgatgaccttgtcgccgcgtatcacccgaccaaagcccacgcgctgacccctggccaccggcagaggcttgaaactgatgctaaagttaatggctccgccgggaaatccgtggacacagtactccttggcgcaggacaagacgaacgcgtagcgggcgtgactcaccactctcgtatcgaactccatgggatcacgatagcttaaagaggatgcttcgcctaggctgtttttgcagctgctgaggagatagccctccacccacagacgtggaaagattcggcgtacggcgaactcatgcgacctctgacccaggcaagtgcggacgaactgcagcaccaccagcggcgcagcctcagtatatagctgcacaaccacttggcccaacggcctgccgtccatcaggccaaagtgcagaacaatcctgggacggagcagtcgcatcagttcgaagtattcatcgggcatgtccagatcccagccaatgtacttgttaaacacctcattctcacccagagtagaccgattggttatcgtactgggacaccttaagttactcgattgcgactgctcactgatccgcttctgctggtcgccttcacgtttccgctggtcgccttcacgcttccgctcatggatcctcatcaggcgaagacccagccaaaggttatgacgctgaacacggtcaagcctttgcagcatttgtggaagtgccgattgggggattagaggtggaccctccacaaagtcaatggtgcctttggttcgctttatcttcgacagattaagtagcaggcgcacattcgcgttggtccgctccagaaagatgcgagcatcctcgtgcagaacatcgaatccggactgtgtcttgacgttcatcagaggcggtcgcttgtgcaccaaactggtggctcgactgaggcgctgtaggtacaacttgttgcgactcagttgtactcgtcggtggtggcgctctgtgaaagtggatactctggaagcggctgaaccaccggtgggaaacagaccccggtcaaacatattcaacaaatatcaataaggccaagaagtttacttttttggctataaatatcataagtgttgtgaattggaatactgggaatttttatttggtttttgtcttaattgtccgcctgcttgagtttttacttatgggagatctatattattccattttattcctttttacagggaccgtagtattttgaaaattcactcggtaatcattaagtatccaaaaataatgtcaattttaacaaaagttatatataataaatactggatgaactttgcattgcttatagaatagaatttacgaggaaataccgtctactctttgagatgtctatagaatttcgttcattcttaatttcggtatgtcatcaagatttgaaatacatttatactttctgtataggtggtcgacaaggtagcatattgtagtcttatatatctgcctatttcagaagtttaggatagggggagaggggtgtaaattaaccttatttacggtccctggttcttagtttgtttttaactttttcaaagttctctatcataaacgcacaataattgggttaggtaaaaaaaaaatcgactgctaggttggtaaaattaattgtgcccgtacagcacctttttatctaaatcaaatatataatattcaagttgagatcgcttcgaatttctgtacttcgatattctatatacataaaatacttatttctagtacaactttcatttccaaaaactacctctctttcatttccatgaagcttccaactatctcgctctctttcacaccgccatcgctatctctttctaagttgtgtgaacgtgatttaaaccattcaatttctacatcgaaacattgatatttaaaatacattctgctctaagaactacaataactttaaactagttctgtttcattaaatatccttggtgagcaaagggccatgaaatggattccgattgaccttggccgccagattgaatagctgctctatttttgagaaag

SEQ ID NO: 40013 - DNA, 1113 bp, DROSOPHILA
atgtttgaccggggtctgtttcccaccggtggttcagccgcttccagagtatccactttcacagagcgccaccaccgacgagtacaactgagtcgcaacaagttgtacctacagcgcctcagtcgagccaccagtttggtgcacaagcgaccgcctctgatgaacgtcaagacacagtccggattcgatgttctgcacgaggatgctcgcatctttctggagcggaccaacgcgaatgtgcgcctgctacttaatctgtcgaagataaagcgaaccaaaggcaccattgactttgtggagggtccacctctaatcccccaatcggcacttccacaaatgctgcaaaggcttgaccgtgttcagcgtcataacctttggctgggtcttcgcctgatgaggatccatgagcggaagcgtgaaggcgaccagcggaaacgtgaaggcgaccagcagaagcggatcagtgagcagtcgcaatcgagtaacttaaggtgtcccagtacgataaccaatcggtctactctgggtgagaatgaggtgtttaacaagtacattggctgggatctggacatgcccgatgaatacttcgaactgatgcgactgctccgtcccaggattgttctgcactttggcctgatggacggcaggccgttgggccaagtggttgtgcagctatatactgaggctgcgccgctggtggtgctgcagttcgtccgcacttgcctgggtcagaggtcgcatgagttcgccgtacgccgaatctttccacgtctgtgggtggagggctatctcctcagcagctgcaaaaacagcctaggcgaagcatcctctttaagctatcgtgatcccatggagttcgatacgagagtggtgagtcacgcccgctacgcgttcgtcttgtcctgcgccaaggagtactgtgtccacggatttcccggcggagccattaactttagcatcagtttcaagcctctgccggtggccaggggtcagcgcgtgggctttggtcgggtgatacgcggcgacaaggtcatcgaggccatggaagctcatgggaccaaaaatgggaaaatcagccggccactgctcatcacccactgcgaattgctgtag

SEQ ID NO: 40014 - protein, 370 aa, DROSOPHILA
MFDRGLFPTGGSAASRVSTFTERHHRRVQLSRNKLYLQRLSRATSLVHKRPPLMNVKTQSGFDVLHEDARIFLERTNANVRLLLNLSKIKRTKGTIDFVEGPPLIPQSALPQMLQRLDRVQRHNLWLGLRLMRIHERKREGDQRKREGDQQKRISEQSQSSNLRCPSTITNRSTLGENEVFNKYIGWDLDMPDEYFELMRLLRPRIVLHFGLMDGRPLGQVVVQLYTEAAPLVVLQFVRTCLGQRSHEFAVRRIFPRLWVEGYLLSSCKNSLGEASSLSYRDPMEFDTRVVSHARYAFVLSCAKEYCVHGFPGGAINFSISFKPLPVARGQRVGFGRVIRGDKVIEAMEAHGTKNGKISRPLLITHCELL

SEQ ID NO: 40015 - DNA, 2651 bp, DROSOPHILA
attgaactacaaccgaccatcatcaaattgtgctaaatatttctattaagtatatttttgggtcaatatttgtaaagttttggtccaagatcttcgcttgtaaaagtcaatatttgctaagtgctccgatgagcattttcatcataacttgactaaaaatgatcataaaaccaaaaaaaataactgttttgagcagctaataacaaggactaaccatctgtatcactttttgaccgacttaggaaaattaatttttgggccaattttcgcattttcggtaaggggtaacatcatcaaaatttgcacaaaatggctaaaaaatagaattccattttttgaacacagttcgattggaaattttaatacaaactcaacgtgatatgacattccatattcagacaactatttttaaagttgtggccaaaaaactgcctattttatgacaaaaattaacaaaaacatattttgggaaaaattaaaaaattttagatgactgtttttatcatatcttgactaaaagtgatcacaaagatgaaagaataactgttttgagcagctaattacaccggctaaccatccctatcactttttgaccgatttaggaaaattaatttttggaccaatattcgcattttcggtaaggggtaacatcatcaaaatttgcaaaaaatggctaaaaaatagaattcccatttttggacacagttcgattgagaatttgaatacgaattcatcaaggtatggcattccgtattcagacaattatttttaaagttgtggccaaaaaactgataatttaatgtcgaaaattcggagaaatatgcaaaagaaaaatgcaaaaaattaaattttctcaatttgaatcccagccgattggagcttcaattacgaatccagagaggtgtgcaaattaattttccgaccattttatcccattgctatggccaaaaacactgcatacgaaagtgtaagtgctagtttcttagccgcgagtgtgcgactaggcttgacagtttctcttcttttgtgtggaacggcagacttcttgatataccctccggggtatgtgttttgactcaccgaataatgcgaccacctcattgaattgggcatccggtgaagccagcacctgtcgcttctcagccgcctcatcgtcctcctcccgctccgccatggacgagccccgggtggcattgaagttcagcttccagagctgcgcaccacggtagctcacatagttggcatccaattcgctgcgtagctccgagattttgccgcgttcggatgggggactcatcgacaatgggtgcagatatcgcagcaggtgacccacaccgccgccaaagaatggtagtctcgttagctgactatcggtgcgcgcccaatccagatatgttttgccgcccacctgctccaatttcgcagtaattagtagcagcagtggcagccacgcccacttccagggtaggcggtgcatattattggtatcttttggtatagtatcgttcggtttctggatcttgccaatattgcggtgcgatcgattgggcagttggtgcgaatttaatgcgttcacaagtcgaacggtgagccgcagcctccggttaacggcttttcgcgttctcaattcttcattctcctcgttctccattctccgagccgcgttcttctcgtcttccgccgacccgtcatatttccctattactcgaacgattccccaattaaggccaacgcatttgcatattgacgaaatgccgctgattctgatgcttttcatttcggacttttactttggttgaggtgtgggaattgttatactgtcatactgttatactggctagtataaggcagctaccgattcttcatagacaaatagtcttattaacataattttagctgtgtgtgttttgtgtgtttaagcatataacgttttaggttttgtttattaactattaatcaaaatattaacattttattgctcccagtcaaaacaaatttacgtttttctcaattcattttaattttaattttttttaattttcaataaacatttttcagtctatttagatgagctttttttgtttttgtttttcttgtgtgttcttttttgtgtgttcaatttgtctagttacaagtagaataaataaataaataaatagtattcatataagtagtaaaaaaaaaaaatcattaggctgatttacaaaaaatcgcattgagctaagtgtcaggactagtggccacgcctccggctgccactgctgttcctggccaccgattttccgcgtccctgggcaatggccctggccacggtatcggcgaatgtcacaccatccttgccgttgtactggatgaatcgggcgggcaggacgaagccataccgtccggtgtcgcccatttcaatggtgtaggcatacttgatgcccgcaatgcccttggcccaatcatcggagccaccggcggcgggatacaaagttgtggcggaggatcccaccgtatacttcacgcccgtcgacttggtgatgctctggaagagcaagaacacaacatgtattattaggtggttattgagaaacattcggattagggtaaactcaccgttccggcctgtcgtgccacacgatcgagatcggcacggtcctgggttagct

SEQ ID NO: 40016 - DNA, 651 bp, DROSOPHILA
atggagaacgaggagaatgaagaattgagaacgcgaaaagccgttaaccggaggctgcggctcaccgttcgacttgtgaacgcattaaattcgcaccaactgcccaatcgatcgcaccgcaatattggcaagatccagaaaccgaacgatactataccaaaagataccaataatatgcaccgcctaccctggaagtgggcgtggctgccactgctgctactaattactgcgaaattggagcaggtgggcggcaaaacatatctggattgggcgcgcaccgatagtcagctaacgagactaccattctttggcggcggtgtgggtcacctgctgcgatatctgcacccattgtcgatgagtcccccatccgaacgcggcaaaatctcggagctacgcagcgaattggatgccaactatgtgagctaccgtggtgcgcagctctggaagctgaacttcaatgccacccggggctcgtccatggcggagcgggaggaggacgatgaggcggctgagaagcgacaggtgctggcttcaccggatgcccaattcaatgaggtggtcgcattattcggtgagtcaaaacacataccccggagggtatatcaagaagtctgccgttccacacaaaagaagagaaactgtcaagcctag

SEQ ID NO: 40017 - protein, 216 aa, DROSOPHILA
MENEENEELRTRKAVNRRLRLTVRLVNALNSHQLPNRSHRNIGKIQKPNDTIPKDTNNMHRLPWKWAWLPLLLLITAKLEQVGGKTYLDWARTDSQLTRLPFFGGGVGHLLRYLHPLSMSPPSERGKISELRSELDANYVSYRGAQLWKLNFNATRGSSMAEREEDDEAAEKRQVLASPDAQFNEVVALFGESKHIPRRVYQEVCRSTQKKRNCQA

SEQ ID NO: 40018 - DNA, 3776 bp, DROSOPHILA
tgctgtcggttgattgtacagtaaatgctggatacacgaaaagaaatttgtatattctcaagataagatacaatctaatatcctattctttatgtgtggaaaccgccgatttccgttttctagtggcagtcttttgtttatctttccatacatacatatcgagttaataataataataatttttggtttattttccttatcgctgaaatcactttcttcggcagctggaagctttgactttgactttggcgtcgggcggcgatggccacgggcctttcgcttaatttctatatgcatgcgcaatataaatccaatcaaatatgcaacaacaagaagcggcgagcagcaaaaaaaaaaaaataataataataaataaataaggcggccagagctgaaaaacaaaacgtcgtaagcgttgtggttcgagcttactggtttttgaaacgcgattgaaagtgaaagttggcgcctcgctcttgcgctctctttcgctctctattgccgcccctctcgctctcagctttcttttcttttcttcacttcattcttgttagccaaattcgccgcttgtcttttgccaactttacataagatcgttaatggataatggtgtttacgataagcgcgattgcgaaatctataatcgaaattggcagcgaatcgaaaacgtggcccaaaagtttactgctctctctttgtctaccatctatcccacaatccccaaactcaaagagactccaaaaagaaaggtccactctctccggagaatttgattattagaccgctttcaaaactgttctacgcgcgagcttttccccgaaaatttcagcctgaaagtatgcagcttactttagccacattcaaatttgtatagaaaaacatcgcacagagttaactatttatattaaatagtttttcaaatacatatgtatgaaatatttcaagagtttcctaccaacttgtagattatattagatagttgagtggagaatgttttagtttactgcaattgctgggcaatgatgcgcaggaactcgaagacctcctcgccggactccacgatatagtgcggcggcagcaggtagccatagcgtccctgatccttgaggaacatattgaacaccagctgcggtccaatgcgatcctgcacccaatcggccgagttgcccggtcgcgccaacttttggcgataactggtgcccgacgaatactccgcctgattgagtcgcctcagtgcgagaactgcccttctagctgtctgcttgagattcctttgattctccgtcacgtagtccgcatcgccccagggatacgtgatggcctgtccatagccgcccagggagacataggcacccagatactcgcgcattccggagaggaagctgcacacggctcggctctctggctcggagaagctatgggctccgcgatagagattcttgcagggattgctcgtcgatccggtgccgtcccagccgtagtcgaagtttcgatccaaatttacaccataacaaccactgacactgtcgtagccacggtttttggtccacaggcgatccgtctggcgggagtactggtagccatctggatttgccaatggcaggaagtaccaatcgatgcggcgcatcgccttctccgctctgctctgcctctgaccttcacccttgtccttgccctttggcctgccccagagatgggttagcttggatatggcgtaagtgagggcggcaggacttaaccaatccctggcctgcagtccagcatccacgaacaccgcccaattgtccggattcccattggagaccctgagaaagttatactcgttatactcgtctacacttttttaaagcgttctgatcttgaattcacctgatgacctccagcggtcgcttgttgcgcgtgacccctatctggattagttccacattttccgagtaggtttcgagcagcgtctgcaggaactgcttaatgtccgcctgatcgtggtaacgccgccagttcatcgttgaacccggcacttccatccatggcagcgaattgttgcgcacggaatccaatggatgttccacggccggaacttccacgtagctctcatcgatcgccgactcgatgtcatcgatcattatgttgtagctgtagcccaccttgtccatgaactttcgtgcatcggctacattgcgttgctcgatgaggatgtcgatgccatcctggttgatattccacacctcgctgcctgaaagaagtcgaaaaacattaggaaaggtcgaaattccatttgaaagcgattgaaaactgaaattgggttaattgaatattcacattagttagtagctaagatatttttacatattaaagactggtatgttatgagaatatatttatatttatatttgaggaccaatgttattgatatgtttataccaaagtgccgccagaaggctctgagttctggctgctccagacgcgtttcgtggactttccacagctggaaaccgtagtaacgctgcacttggctgccattccggtagcgcctgtttatctggtacgatgagcccggcgaaatgaagtcgaaacgtcgcagatccatcggtgatagccactgcaagccctccagcgtggactcgtacagttcgctgctattgagggtaagcagggcgagcggcagaccggagattccggagatttccggcacggagacgctgcgccagagcagcagcttctggccaaaaaccgatccgatcagggccacaaacgtgagcgcttccagtggcggcatcttcgaactgaatacctatttgggttctcgactttgggttctgggctagcggttctctgaattatgccaaaatcacaaatttatgcgtgcgaatgcgtgctcaggtggccgagttgacctgacctgccctgacccctccctaaacacgcctctcttcgccacagacgcggtcaagatattagcattgcagattgaactacaaccgaccatcatcaaattgtgctaaatatttctattaagtatatttttgggtcaatatttgtaaagttttggtccaagatcttcgcttgtaaaagtcaatatttgctaagtgctccgatgagcattttcatcataacttgactaaaaatgatcataaaaccaaaaaaaataactgttttgagcagctaataacaaggactaaccatctgtatcactttttgaccgacttaggaaaattaatttttgggccaattttcgcattttcggtaaggggtaacatcatcaaaatttgcacaaaatggctaaaaaatagaattccattttttgaacacagttcgattggaaattttaatacaaactcaacgtgatatgacattccatattcagacaactatttttaaagttgtggccaaaaaactgcctattttatgacaaaaattaacaaaaacatattttgggaaaaattaaaaaattttagatgactgtttttatcatatcttgactaaaagtgatcacaaagatgaaagaataactgttttgagcagctaattacaccggctaaccatccctatcactttttgaccgatttaggaaaattaatttttggaccaatattcgcattttcggtaaggggtaacatcatcaaaatttgcaaaaaatggctaaaaaatagaattcccatttttggacacagttcgattgagaatttgaatacgaattcatcaaggtatggcattccgtattcagacaattatttttaaagttgtggccaaaaaactgataatttaatgtcgaaaat

SEQ ID NO: 40019 - DNA, 1524 bp, DROSOPHILA
atgccgccactggaagcgctcacgtttgtggccctgatcggatcggtttttggccagaagctgctgctctggcgcagcgtctccgtgccggaaatctccggaatctccggtctgccgctcgccctgcttaccctcaatagcagcgaactgtacgagtccacgctggagggcttgcagtggctatcaccgatggatctgcgacgtttcgacttcatttcgccgggctcatcgtaccagataaacaggcgctaccggaatggcagccaagtgcagcgttactacggtttccagctgtggaaagtccacgaaacgcgtctggagcagccagaactcagagccttctggcggcactttggcagcgaggtgtggaatatcaaccaggatggcatcgacatcctcatcgagcaacgcaatgtagccgatgcacgaaagttcatggacaaggtgggctacagctacaacataatgatcgatgacatcgagtcggcgatcgatgagagctacgtggaagttccggccgtggaacatccattggattccgtgcgcaacaattcgctgccatggatggaagtgccgggttcaacgatgaactggcggcgttaccacgatcaggcggacattaagcagttcctgcagacgctgctcgaaacctactcggaaaatgtggaactaatccagataggggtcacgcgcaacaagcgaccgctggaggtcatcagggtctccaatgggaatccggacaattgggcggtgttcgtggatgctggactgcaggccagggattggttaagtcctgccgccctcacttacgccatatccaagctaacccatctctggggcaggccaaagggcaaggacaagggtgaaggtcagaggcagagcagagcggagaaggcgatgcgccgcatcgattggtacttcctgccattggcaaatccagatggctaccagtactcccgccagacggatcgcctgtggaccaaaaaccgtggctacgacagtgtcagtggttgttatggtgtaaatttggatcgaaacttcgactacggctgggacggcaccggatcgacgagcaatccctgcaagaatctctatcgcggagcccatagcttctccgagccagagagccgagccgtgtgcagcttcctctccggaatgcgcgagtatctgggtgcctatgtctccctgggcggctatggacaggccatcacgtatccctggggcgatgcggactacgtgacggagaatcaaaggaatctcaagcagacagctagaagggcagttctcgcactgaggcgactcaatcaggcggagtattcgtcgggcaccagttatcgccaaaagttggcgcgaccgggcaactcggccgattgggtgcaggatcgcattggaccgcagctggtgttcaatatgttcctcaaggatcagggacgctatggctacctgctgccgccgcactatatcgtggagtccggcgaggaggtcttcgagttcctgcgcatcattgcccagcaattgcagtaa

SEQ ID NO: 40020 - protein, 507 aa, DROSOPHILA
MPPLEALTFVALIGSVFGQKLLLWRSVSVPEISGISGLPLALLTLNSSELYESTLEGLQWLSPMDLRRFDFISPGSSYQINRRYRNGSQVQRYYGFQLWKVHETRLEQPELRAFWRHFGSEVWNINQDGIDILIEQRNVADARKFMDKVGYSYNIMIDDIESAIDESYVEVPAVEHPLDSVRNNSLPWMEVPGSTMNWRRYHDQADIKQFLQTLLETYSENVELIQIGVTRNKRPLEVIRVSNGNPDNWAVFVDAGLQARDWLSPAALTYAISKLTHLWGRPKGKDKGEGQRQSRAEKAMRRIDWYFLPLANPDGYQYSRQTDRLWTKNRGYDSVSGCYGVNLDRNFDYGWDGTGSTSNPCKNLYRGAHSFSEPESRAVCSFLSGMREYLGAYVSLGGYGQAITYPWGDADYVTENQRNLKQTARRAVLALRRLNQAEYSSGTSYRQKLARPGNSADWVQDRIGPQLVFNMFLKDQGRYGYLLPPHYIVESGEEVFEFLRIIAQQLQ

SEQ ID NO: 40021 - DNA, 3248 bp, DROSOPHILA
cggtagtaattgcatatgttggacgcgttatcggtaatcgctaatatcgatacacggctgtatgctgagtgcatttgtgtgcgtgctgccgcactgctgatgaaatacatggtgcatttggtttttgttaatttcgtgcacattacgcagtggcggagaatagaactattattttctcagtcttctttaaaattggttaattaacgagtattttactgcccacacacacaccgcacgcacaccgaaaaggccgcgcacacacacacacactatcgaacggccatacaaatgcaaacaatgcgtcatgttctcccactgtttaactagtaattcctagagttctcgttttcactgtacacgccagtacattttttttatcttgttatcgcctttcgatcgttttcaggtggtccagtttttttttttggccacgcgcagcgattttatcttatccgcttttcattctcgcccggatatatattccgcattattacctgctcttcagctgatcgtatttacctttcggatatttactttagcgtgctatgtaacggaacgaaaaaaaagaacaacacgaccagggaatttatttgtaaatgcttcgcggtgtgaccaggcgacactgaatggaaaaagctgtaaatacagtgcaatgtaccagtacaggtatgctagttaatcgatttgcgggttatcggcttgttcgaaagctaaaaatcgattaaattgatcgaatacaggataacggtacgtttttgtattagatctaactgaaactacgttttccaattagatttcgtattaattgattcttgttaaaaaataaaaaaatgaagttttacttgcggaacagttatgtctgaaatgcttacgttaaaatcggtcactgaatgacgttacttaatgtaacataaacaaaacataaaataaaattgtttgactatcgaatattttgtcgagctgcttatcgccgttcgcccatcactactaccgactgtctacaaagtggagtggggtgtgggtactgcaaaaagtggttaaaatgttgttgccacggccaaactgacgatgcgccgcgtccgctgagcctcgtgtccgcatccgtgagatccgtgatccccaggtccgagctctgggcacccggaaattccccaacgagcacatagtccggctgttttctgttcgttttcaattggtttgcattgatagaccaggcaaaccaaacaaacaaacaaacacactgaagcatcgggattctatatatataaatagaatagaaacagaaaagtagatagacatcctcactggccccatttgattgcggatcacatcagcgcgccatgtcgcaggtgcttagcccccacaaacagggcgtgtcggaggcggatgcgttggactacacgaacagcagctcgatcatcgagttcctggccaaagagcaggactgcggcggaatactgaacgatccggacccggagtccatattccaggaggtgagtcgcctgtccgacagcacagatatgcgatccgtggatgaattgctgcaggaagcggagcgcctgatccaacagcagttgcgtctcggcggtattgttccaaaactggacgcttccgggccccctgctccgaccaaaaccctcggagaagaagctgccaccggtggtgatggctcttcctcatccccgcagtcctcgccgcatagcagcatacggctgaatacacgctatacccatcgcatcgagcattcgcctgctcccttggcgccaaaaaccgtcgcagtcaatggcagagtccggcccagatccggttccaaatcgtcggcctcgccaacatcggtgcagacgccgctagaaagcagcaatggatgcggctttgccgccttcgtggataacctgccatcggcgtcggtcatttccgaggagtccacgcccaaggacatggacatggagaaccatacggcggccatggcaaagctgcaactccagcagcttcaggataataccgatgacgacgaggatacggtgagtttcaaaattcgccttgcaggtttatattccacttattcttattggcttgtatttggtcatgttcttctgactgctagaatgaatttcgagttggttttccatcaaatatatactttttttttcgaaatatttccccaatttatggttaaaccacggtgtgttttgttaattgctgggacattctcagggaattgctgtgctattagtcagctataagctgatattccgatcaaataaattctccaatcgacgtgtagtaataaatagcgaggattcatttattgcccgccgtacaggattcaaaggatacagcagcccacccaaaacacacactcactctcagtcaccaaatcagacatccaaaccaacataaataatccttcatgcacacacagagttttcacattatacaaggtggagggggggtgtaaaaaaagcgacagagtttacaaattacaccgagactcggcggcgaagatggggcggcattcaaccggacgagctggggccaatagcctgcgccaccgtctcgaccactgtccagccctcgagagctgtgtccttgatgaaacgcggcggcaggacaaatccgtaggctccacgatccctcagctcgatggtgtacacatatttgacaccaagcgcggcgcggctccagtcatcggagccaccgcctgcgattcccaaaacttcatgggtgaccgctgccctgtacgaagtgcccgtcttctggaggattcgctccgcggccaaactgctcactcgctgcaggacactggcatccttgaccttgacggccttgtaggcccacggataaacaatcatctgtccgtagctgtggaaggtcaaatacgattccagattgtacttccgcttggccaaaaactcggccaccgctcgcgtttcccgctccgaagctggcgcggatccgcggtacgtatcactgcacggattcgtcgacgagccatagccattccagccgatgtcgaagttacggttgagatccacaccgctgcactgggcgcgacgcgatggcgagcgattcttgcgccacaggcgattcgttgttcgactgtactcgtagccatcgggattcatcactggcattatgtaccaggtgaggccgcgaatgtgcgccggctggttctcccagtcggacatcagctggtacaggatgaaggtcaccgtcgcggggctgatccattcgcgggcgtggatgcc

SEQ ID NO: 40022 - DNA, 1036 bp, DROSOPHILA
acaaagtggagtggggtgtgggtactgcaaaaagtggttaaaatgttgttgccacggccaaactgacgatgcgccgcgtccgctgagcctcgtgtccgcatccgtgagatccgtgatccccaggtccgagctctgggcacccggaaattccccaacgagcacatagtccggctgttttctgttcgttttcaattggtttgcattgatagaccaggcaaaccaaacaaacaaacaaacacactgaagcatcgggattctatatatataaatagaatagaaacagaaaagtagatagacatcctcactggccccatttgattgcggatcacatcagcgcgccatgtcgcaggtgcttagcccccacaaacagggcgtgtcggaggcggatgcgttggactacacgaacagcagctcgatcatcgagttcctggccaaagagcaggactgcggcggaatactgaacgatccggacccggagtccatattccaggaggtgagtcgcctgtccgacagcacagatatgcgatccgtggatgaattgctgcaggaagcggagcgcctgatccaacagcagttgcgtctcggcggtattgttccaaaactggacgcttccgggccccctgctccgaccaaaaccctcggagaagaagctgccaccggtggtgatggctcttcctcatccccgcagtcctcgccgcatagcagcatacggctgaatacacgctatacccatcgcatcgagcattcgcctgctcccttggcgccaaaaaccgtcgcagtcaatggcagagtccggcccagatccggttccaaatcgtcggcctcgccaacatcggtgcagacgccgctagaaagcagcaatggatgcggctttgccgccttcgtggataacctgccatcggcgtcggtcatttccgaggagtccacgcccaaggacatggacatggagaaccatacggcggccatggcaaagctgcaactccagcagcttcaggataataccgatgacgacgaggatacgtcagctataagctga

SEQ ID NO: 40023 - protein, 231 aa, DROSOPHILA
MSQVLSPHKQGVSEADALDYTNSSSIIEFLAKEQDCGGILNDPDPESIFQEVSRLSDSTDMRSVDELLQEAERLIQQQLRLGGIVPKLDASGPPAPTKTLGEEAATGGDGSSSSPQSSPHSSIRLNTRYTHRIEHSPAPLAPKTVAVNGRVRPRSGSKSSASPTSVQTPLESSNGCGFAAFVDNLPSASVISEESTPKDMDMENHTAAMAKLQLQQLQDNTDDDEDTSAIS

SEQ ID NO: 40024 - DNA, 6078 bp, DROSOPHILA
tgagggtcgcagagtttccatggagatgagctcgtcttccggcgttatgggccgctccttgacctccgggacatccttttcggccaataacgtactactgctggacgctgaagccttctccacttcctcgtccgccgcttttagaatggtttctgcaagaaaacctcgttttatggcgcctttcatgtgatttaaatatttactcacctgtagaaagcaaatccgtagttgtctctgcgttgctcatcgcggataatgttgaaaaactccaaaaactattgaaaataaacacggaaagatgccaaaaaatccgtgggctaatcacttgccacctcgttaaacaaaaactatagcgttgccactttcaacaatcactatcgaatactatcgatttaccgccaagccagtgctagaaagcaccaggaagtataaaacaactgatatttttggtaaacaaagaactgttgttattgcttttcctggttttattaatagaagttaaaaataaatggcacaacaattaggaaatgagcgtgcctcgacttatactaaattcagagtggagagcaggcgtcgtagcagagaaacgcgaacctctccgcgacctctatcgtgctctcttttccactcacggtcgtttaacggcgcatagagacaactctgcgctaggtcgcctgctctcgttcgctctggcgcgcaaacggcacttggcacacttcgcacagtggcgccaaaaaatatgtgcccgtaaaaagcacatgtgctgcgcagtagttgtccagaacaacacaacacggatgtctaaccagttattgaaataaacttattcaagaacatcttaataataatataaaatcttaaggaataacaatatcttatcaagtttttatcaattggcgccgccgcctggtagcactgttcgcatacgcagacttttggccaccactgttttcccatgcgccctcgcactttctttcggtttttcattcgctgctccgctctcactcagtcaacaagcactcatacacacgcgctcacctgttccgccgccccgctaccccgtctctcgacattactgcgaccgctcccgttccgtttcattattttttttgtcgctgtcattcagttgccgttttaacttcgccgcgcgagaagcggaaacttttgccagtccgctcgaggaaaatagaaaaatactgcagtgctgctgcagtcgtgcagctcgtacatttcgtttcgtttcgtttggcgccaatttcaaagcgcaaatccgctggcggattgaattgcaccaaagttgttcttggatctctacgtttgcatccatccatctaaccaagcaaccggctaccacccctccactcctgacagtgacccctcgctgaccctccatccccccctccgctcgacgactctcatggcagctagcaaattccattgcggcaagcaattgacagccacacattcacatttcgatgcgacatgtgcgaaaatcagggccttttactttgacctggacaacacgttgattcccaccagagccggcgattccaaggcgatcagaaaggtgagctttgttaaccaagccaaggcagacagcctcactgccccctctgccaatcaccaatccgttggcgtttcttccgtttcttttccatgtagtgtttgtgggggggcggggcgggggaggtgaaagtgcgcagcaggcgggcgacccagctagaaaattttccactgcagcccgcccgttgttacgtagtcgaaaaaacccggacgctcggcagatagcacgcgcccgaaatttcgattgtttatttgcgttccgattgatttcctttcccttcccttcacatcccccagccacaaaaaaaaaaaaaacaaaaaagaaaaactcagagtgcactcgacaaggtcttaacttaaatataaccacgggtacatgcactttagaaggctaaaacccactaaataatcggcattacgttggaaattcggaatcttcggttttcgaaatgttaaaaggcactttacaggatcttatcgtggtgcgcattatcgattgcaaacgattgcaaaaaggtcggaaatcgaggaacttgcacttaacaaaagttgaacgaaacgtcataccaacaaactttggaaacccgcgtcaatggtttcttttgaaatataaccttcttataaagtgaatggcacacaaagaagctaaaggttaattgatgataataggtagcacttcgcaatatgtacttgtttgaacgttcagaggccattgactttatttattacaataaatgagtctatttgcgatcttaaaaggttaaagtttttagaattttcccttcaagagagaaaggtataaataggtattcttgaaaatgtgttcaatgtcacgtacatttactcactcttgcattccagattatatcgttatcttttaagctgcgccaatttagatagttaacttcattatcacgttcatgtttcaatacgctcaatgtttgaagaccccaaataagacggtttctttattcagttgctttcaattcttagcgagcgaagccacgcccatttatatttcggaactcatgacagtttttgtgactaatcgcaatgatttcaacttaaattcctagcattcaaaatgacttttgtgagcttagcttcctgatttgagtacgattcaatagatgcggatggttgggccggaaaatagatagcgagtggaaatttccaagctatcattgcgatcataaaatatagtatattctcatatattactcatgctgcaagtgtaccggcggcaattgcagtttgatgttcaatcccctgatagtacggcgatgctataacaattttggaattaatcaattggcttcggattcgatcgaatgattggattggtcaatctgacgcttaattgagaactttatggacgtaatagttttgatttacgttctaccgcgtttcgcaaaagattatgcacgtattgaggcttctaatcgcttttattaatattaactctactttcaggttgttcacttcttattgcgtgaaagttcttaacttatctcgtctttaattcgtcatagcgtatttatagttttatcgcggttgaggtttttacggcactatcacatctacgcaattttgtatatttttgaatttatgtaacgcaataataatgcgaattgccaacccttttccaatttcgttcttagctcgctgattttctggagacccaataccagttcagcaaagatgacgcaacacaggccacccaaaactttctaaaggccttccgccgctgtcccgataactcgcaaacatcgctggactcgtggcgcactcacctgtggcgcgaatcccttccagcgcgccacaagcacctggcggaacagatctatcccaagtggctgaagttgcggtatcgctacctagccgttccggcggactatgtccagctgctgctgcggatgcgccaggcaggctatgccctggccctcatcaccaacggaccgtcgaacgctcagtgggagaaggtggctgagctgaatgtgcgcggctactttgactgcgtgctggtctcatcggatctgccatgggagaaaccgcatccggagatcttctatgccgcctgcaactttctcaatgtcaagccgcaggagtgcgtcatgatcggcgacaaactggagaccgacatcaaggtgagttgtggctactcataaatgtgctcactagcaactgatctatttcgcttttagggcggtcacttggcccagctgggtctcacattctggacgccactaagcaatagcagcgcggcggcacaatcgctagaggatgtggagtacaagccgcacgtcaagctgggcagcctgctggagatgtacaagtactttccgcgcctcaactcagtcgctctgcccgagatgccgtcggtttccagaagacgtggcagccacatgagtcccattagccagggctccggcagcggaagcagctccagcgccatttgtgtgccgggtgctggccatggataccatcaccaccaccaccagcagcaccaggagcagcagcagcagcatcatcatcatcatcatcagaggcagtggctttatcgacgaggcgtttcactgcccgccatggattgctccaatagcgaggcggagaacagctgcgacagttttctgtaggcagtgcggaggatgtgttgagtatcgaatgaatcgatacgaatgacgagagattgttgaaaaatgtaccttcagtttacaaaactatagctaaagaggattgaggattgatgatcgtagaacgggagtaatattcacggatggatcacgaagaaggacagccaggagaattggaaacgagtgcaggaatttaaagttcaactattagcgggaggagcccggaagcacggtgaatctcgctatctgccattaaactaaaattaaggctagcaaacagcatcggagcacacaaactactacggccaacaagtacatggaacaaaagaaaacaaatatgaaatcagaggacaggaagcaaagcaaagcaaagcaaccaaatgtatttttctaagcgaattttctgtcacatattttgtaaattgatataacacgcaactgaaagtacgtcaaggtaaacgtaaaacgcgaacaataaaacaatgaaaaaagaagcccgtaaaaacgatacagtaaagcagatcgaaaccacaacacgaacctcttacagaacctctgataaaaaaaaaaaaaaacaacaccacacacaagaaatacaaaagaaacgacacgaataaccgaatcacaagtacaagtacgtgaatgttaactattgtcttagtcgtagcctttagtccgggtattgtaatcgcggcctctcgcagctgttggcccatcacactgttggcaaattgttatttgcaacctgcacgaaaaacaacctcctcctacccatttccccacccgaccccacgccacgccccattcccgcccacaagcaccctatgcgaaaagcatcgttgatgattattgatggctcacatgccggagcactgttgttgatcatggaaatggaaaataaatgacactacaaaaccgaaatccagctgactttttgtttccataccagatggtggtggtggtagtgggtcaagctcagagtttttccagaagatgcaaccaccacttgttgttttctccctctaaaccgtgcttttatcccacttggcgttgaaatgaaagcaattttgttttatgttttaatcatagtaaaataagcttgatttgtttttattaatttgggggatgatcttgttgtttatggactacaaatatgctatacggtaaaatggtatatcgcttgcagaatcagcaaataaaagttataaacaacactgaatcttgcgcagattaatgctaacgtgaactggctgtataattgtttctccacacatatgccatacatacacagacggttatacatatacatatatatatataattataatcaaagtcacgtacacgtaaaaaacggttcggttacaaatgacacgtttttggaaaataatatttaaaaaaaaaaagggaatcgaaaaacgaaacactttcacgcgataccgagacattttgaatattcggctgggctggctggctagctaggcttgcacttggctttacttaagttcgttatttgcgcattacgctttatagtttcttttacaaaagagcacttttcagactacaaaataccctaagaacccttgactggaaatggatagatagataatgggacaaaatgaataagaaaacgtaacgtaacaataacatggagtagttgttttgcaaaggttgctgtcatcgtagtatattagttaatagcagatcttgccgccgtcgtagtatagtagtatttatcgtttttgtaaagcattgtacaacattgttatccgcttaagtgttaaaccgatggttcgcccatcctacatcctacgcccatctctcctcatctcatctcatctcactcccgggttggccgtgttagtcgctctggattcctcgttgt

SEQ ID NO: 40025 - DNA, 2364 bp, DROSOPHILA
ctcactcagtcaacaagcactcatacacacgcgctcacctgttccgccgccccgctaccccgtctctcgacattactgcgaccgctcccgttccgtttcattattttttttgtcgctgtcattcagttgccgttttaacttcgccgcgcgagaagcggaaacttttgccagtccgctcgaggaaaatagaaaaatactgcagtgctgctgcagtcgtgcagctcgtacatttcgtttcgtttcgtttggcgccaatttcaaagcgcaaatccgctggcggattgaattgcaccaaagttgttcttggatctctacgtttgcatccatccatctaaccaagcaaccggctaccacccctccactcctgacagtgacccctcgctgaccctccatccccccctccgctcgacgactctcatggcagctagcaaattccattgcggcaagcaattgacagccacacattcacatttcgatgcgacatgtgcgaaaatcagggccttttactttgacctggacaacacgttgattcccaccagagccggcgattccaaggcgatcagaaagctcgctgattttctggagacccaataccagttcagcaaagatgacgcaacacaggccacccaaaactttctaaaggccttccgccgctgtcccgataactcgcaaacatcgctggactcgtggcgcactcacctgtggcgcgaatcccttccagcgcgccacaagcacctggcggaacagatctatcccaagtggctgaagttgcggtatcgctacctagccgttccggcggactatgtccagctgctgctgcggatgcgccaggcaggctatgccctggccctcatcaccaacggaccgtcgaacgctcagtgggagaaggtggctgagctgaatgtgcgcggctactttgactgcgtgctggtctcatcggatctgccatgggagaaaccgcatccggagatcttctatgccgcctgcaactttctcaatgtcaagccgcaggagtgcgtcatgatcggcgacaaactggagaccgacatcaagggcggtcacttggcccagctgggtctcacattctggacgccactaagcaatagcagcgcggcggcacaatcgctagaggatgtggagtacaagccgcacgtcaagctgggcagcctgctggagatgtacaagtactttccgcgcctcaactcagtcgctctgcccgagatgccgtcggtttccagaagacgtggcagccacatgagtcccattagccagggctccggcagcggaagcagctccagcgccatttgtgtgccgggtgctggccatggataccatcaccaccaccaccagcagcaccaggagcagcagcagcagcatcatcatcatcatcatcagaggcagtggctttatcgacgaggcgtttcactgcccgccatggattgctccaatagcgaggcggagaacagctgcgacagttttctgtaggcagtgcggaggatgtgttgagtatcgaatgaatcgatacgaatgacgagagattgttgaaaaatgtaccttcagtttacaaaactatagctaaagaggattgaggattgatgatcgtagaacgggagtaatattcacggatggatcacgaagaaggacagccaggagaattggaaacgagtgcaggaatttaaagttcaactattagcgggaggagcccggaagcacggtgaatctcgctatctgccattaaactaaaattaaggctagcaaacagcatcggagcacacaaactactacggccaacaagtacatggaacaaaagaaaacaaatatgaaatcagaggacaggaagcaaagcaaagcaaagcaaccaaatgtatttttctaagcgaattttctgtcacatattttgtaaattgatataacacgcaactgaaagtacgtcaaggtaaacgtaaaacgcgaacaataaaacaatgaaaaaagaagcccgtaaaaacgatacagtaaagcagatcgaaaccacaacacgaacctcttacagaacctctgataaaaaaaaaaaaaaacaacaccacacacaagaaatacaaaagaaacgacacgaataaccgaatcacaagtacaagtacgtgaatgttaactattgtcttagtcgtagcctttagtccgggtattgtaatcgcggcctctcgcagctgttggcccatcacactgttggcaaattgttatttgcaacctgcacgaaaaacaacctcctcctacccatttccccacccgaccccacgccacgccccattcccgcccacaagcaccctatgcgaaaagcatcgttgatgattattgatggctcacatgccggagcactgttgttga

SEQ ID NO: 40026 - protein, 355 aa, DROSOPHILA
MAASKFHCGKQLTATHSHFDATCAKIRAFYFDLDNTLIPTRAGDSKAIRKLADFLETQYQFSKDDATQATQNFLKAFRRCPDNSQTSLDSWRTHLWRESLPARHKHLAEQIYPKWLKLRYRYLAVPADYVQLLLRMRQAGYALALITNGPSNAQWEKVAELNVRGYFDCVLVSSDLPWEKPHPEIFYAACNFLNVKPQECVMIGDKLETDIKGGHLAQLGLTFWTPLSNSSAAAQSLEDVEYKPHVKLGSLLEMYKYFPRLNSVALPEMPSVSRRRGSHMSPISQGSGSGSSSSAICVPGAGHGYHHHHHQQHQEQQQQHHHHHHQRQWLYRRGVSLPAMDCSNSEAENSCDSFL

SEQ ID NO: 40027 - DNA, 2683 bp, DROSOPHILA
tacctttggaccgaccgggagctgttgatgcacctccagaactacactcccctgatccttctcatcgatttcgtggagaagacccgaaccaagcgcttctatgagagctccgagcgctatgagatactcatgctggtcttcatcatgcgcaagggagcgccgttttgtgagaacaagcgctttccagcggagtactgggttaatctatcggtgggaccaattgccgaggcgtttgaccgtctgcaggcggccatcgatataccggatccccagctgccgatccacatgagcgttacagatttgaccagctggaagcaaatgttcgacctggccatgctggatatacggcgttttgcgtactacaccgatcccttgcagctggccgatgcgggcgtctttaaccggatcacctttgagcagcgattcggaatgcagtggcaggagtaatgggaattgatgcacgttactggatatatattcacgggaaacagcatgtaagcacaccatcagcaccaacacactttcccaaattgggatggatcgtggggaaggctactgcataaatccgaacgaaagcatttagttaagtattaataggacgcactagagcgcaaccgatccatccaatcccacatagacagagttatttgttgcgttaatgtccctgcatagcgaaatctactgtgccttctccaaaaactccagatccttctgcattcctttccctccaatccgtcaacttcatctctcctccgactcctcaaatgtatctgtaatacaagcgacgtgtaggacccaaaatgctttaatggaaataaacgttagttactgttcaaacgcctgcctatttatctttgtaaaatagcgataaatcattcacaacacgcattactcactataaaaatagcactatgtacactatgaaactacacctatgttcctaatgcgaattcaacgagatcctcgacagtcccattcttagggatcggatcatccagcctcatggctgccgcttaggagcgcgatcccggtcaaagatgcccagcagtttcccacgagtcatctccattgcctcacgcagtcccagctggtaaatttcatcatgcattgactttattttatcgatcagatcctcgggagggagctgggctagttctggaatagaaaagtaggtaatggatatgctattctttaatatactattcttaaatctcattgactttgcagctacttaccattaatcttaaccatatcatcatcggtcagattgctggtgtagttggtgctgcgcgtgtacatcggcgtgtcgctcatggagaggaactcgtccattccgggaactggagcaatcgaaaataaagatatgcgttaaaaatggcgccaatttcttcgtgctcacgttttctacacttacaacgctctggccattggacaggtgagggtcgcagagtttccatggagatgagctcgtcttccggcgttatgggccgctccttgacctccgggacatccttttcggccaataacgtactactgctggacgctgaagccttctccacttcctcgtccgccgcttttagaatggtttctgcaagaaaacctcgttttatggcgcctttcatgtgatttaaatatttactcacctgtagaaagcaaatccgtagttgtctctgcgttgctcatcgcggataatgttgaaaaactccaaaaactattgaaaataaacacggaaagatgccaaaaaatccgtgggctaatcacttgccacctcgttaaacaaaaactatagcgttgccactttcaacaatcactatcgaatactatcgatttaccgccaagccagtgctagaaagcaccaggaagtataaaacaactgatatttttggtaaacaaagaactgttgttattgcttttcctggttttattaatagaagttaaaaataaatggcacaacaattaggaaatgagcgtgcctcgacttatactaaattcagagtggagagcaggcgtcgtagcagagaaacgcgaacctctccgcgacctctatcgtgctctcttttccactcacggtcgtttaacggcgcatagagacaactctgcgctaggtcgcctgctctcgttcgctctggcgcgcaaacggcacttggcacacttcgcacagtggcgccaaaaaatatgtgcccgtaaaaagcacatgtgctgcgcagtagttgtccagaacaacacaacacggatgtctaaccagttattgaaataaacttattcaagaacatcttaataataatataaaatcttaaggaataacaatatcttatcaagtttttatcaattggcgccgccgcctggtagcactgttcgcatacgcagacttttggccaccactgttttcccatgcgccctcgcactttctttcggtttttcattcgctgctccgctctcactcagtcaacaagcactcatacacacgcgctcacctgttccgccgccccgctaccccgtctctcgacattactgcgaccgctcccgttccgtttcattattttttttgtcgctgtcattcagttgccgttttaacttcgccgcgcgagaagcggaaacttttgccagtccgctcgaggaaaatagaaaaatactgcagtgctgctgcagtcgtgcagctcgtacatttcgtttcgtttcgttt

SEQ ID NO: 40028 - DNA, 474 bp, DROSOPHILA
atgagcaacgcagagacaactacggatttgctttctacagaaaccattctaaaagcggcggacgaggaagtggagaaggcttcagcgtccagcagtagtacgttattggccgaaaaggatgtcccggaggtcaaggagcggcccataacgccggaagacgagctcatctccatggaaactctgcgaccctcacctgtccaatggccagagcgttttcccggaatggacgagttcctctccatgagcgacacgccgatgtacacgcgcagcaccaactacaccagcaatctgaccgatgatgatatggttaagattaatgaactagcccagctccctcccgaggatctgatcgataaaataaagtcaatgcatgatgaaatttaccagctgggactgcgtgaggcaatggagatgactcgtgggaaactgctgggcatctttgaccgggatcgcgctcctaagcggcagccatga

SEQ ID NO: 40029 - protein, 157 aa, DROSOPHILA
MSNAETTTDLLSTETILKAADEEVEKASASSSSTLLAEKDVPEVKERPITPEDELISMETLRPSPVQWPERFPGMDEFLSMSDTPMYTRSTNYTSNLTDDDMVKINELAQLPPEDLIDKIKSMHDEIYQLGLREAMEMTRGKLLGIFDRDRAPKRQP

SEQ ID NO: 40030 - DNA, 3125 bp, DROSOPHILA
cgagtttgatcgtagggtgggcaatctttaacaaagggttaggtgactatgtaaaagagttttcaagtttagtcgtcccaaggatatgttattttttttttttcaaatttattgacattggctgtaattttctgattgtatttagtggggcgcgtctaattctcctaagaatatatattattaacaatgctatgcattgttgtacatgcattttgaatttctctgtacggatgtttattactattaaaaattatacgttaatcatgatattgtttatagctttgtgggaaaatgtggggtcatattaaatgcaaatgcagttactcaaaaccgtttgcattatgtgcattatgttttcccaatctgtttatttatttaccgctcaaggttgacttaaatcaacagtctacctttattggaaatttaataccacttttatgtgcatcaaacttcgatttcgtttgctgataagctgatgagctttaataagctttcaatcaaatcaaaggcgaatagaacagggtgctcgaaaactcttcaaatcttacatatcgtatttaaatatgaactcaatttgtataataatatatatatatgtacaatatatgtttattttatatatttttaagcatgataaatagataagatatcataggaaattgactaatgctaagacttttaagttcttgtcttaaaaacataaaattacttttttgtagactgcttacatatatgtttttcacatttattttttaatctaccgcttggggggcatacattttagagttggcagcccgcttggtaacaaatctgcgaaccgcagccagcgcagaacgcatccaataagttcattgccaaacgggccgagtccctatatgcacatccacacatgcccatcggctggcgcgaccgagtcaccgagaaaactgagcccgagtgcaacgagaatgcgggtccgagtggctccgacttcggacttgggaaggcactcgcgtggcaacaatcgtccagggcgcacggcaaacacgcagagctgccggaggagataggccgctgcttcttgggggccacattcgtaccccgatccaaatccagacccgctgatccatccgcctcataaatacacacataatttctgccgctttgattggggcacgcagtaagttgattgcaattgcaattgccatagcctttgacttgctgcacgttcgctcttcgctgctcgctatttgcaacaagtaataatgagggcgggcagggggtggctgggtgtttggccaacgcagcgaccttggcctggtttaggcacttgccttaaatgcattttgtcgtcattgcagcgcacatggtggaggagattggctgccagagacagacgggcattgtggtcgccatgcccagccaggtggcatccaacaccggaactccagccccatccgccggcggcattcaccagcagcatcagcagcagcaacaccagcagcaccagcagcagcaacaccagcagcagcagcaccagcaacaccagcagcaacagcagcagcaacaccaacatcagcagcagcaacagcaacaccttcagcagcagcaacaccaccagctgcagcagcaacagcagcagcagcagcatcaacaactcgccagcaacatgagcctgctgaccgtcaaaggcggccgttacctttggaccgaccgggagctgttgatgcacctccagaactacactcccctgatccttctcatcgatttcgtggagaagacccgaaccaagcgcttctatgagagctccgagcgctatgagatactcatgctggtcttcatcatgcgcaagggagcgccgttttgtgagaacaagcgctttccagcggagtactgggttaatctatcggtgggaccaattgccgaggcgtttgaccgtctgcaggcggccatcgatataccggatccccagctgccgatccacatgagcgttacagatttgaccagctggaagcaaatgttcgacctggccatgctggatatacggcgttttgcgtactacaccgatcccttgcagctggccgatgcgggcgtctttaaccggatcacctttgagcagcgattcggaatgcagtggcaggagtaatgggaattgatgcacgttactggatatatattcacgggaaacagcatgtaagcacaccatcagcaccaacacactttcccaaattgggatggatcgtggggaaggctactgcataaatccgaacgaaagcatttagttaagtattaataggacgcactagagcgcaaccgatccatccaatcccacatagacagagttatttgttgcgttaatgtccctgcatagcgaaatctactgtgccttctccaaaaactccagatccttctgcattcctttccctccaatccgtcaacttcatctctcctccgactcctcaaatgtatctgtaatacaagcgacgtgtaggacccaaaatgctttaatggaaataaacgttagttactgttcaaacgcctgcctatttatctttgtaaaatagcgataaatcattcacaacacgcattactcactataaaaatagcactatgtacactatgaaactacacctatgttcctaatgcgaattcaacgagatcctcgacagtcccattcttagggatcggatcatccagcctcatggctgccgcttaggagcgcgatcccggtcaaagatgcccagcagtttcccacgagtcatctccattgcctcacgcagtcccagctggtaaatttcatcatgcattgactttattttatcgatcagatcctcgggagggagctgggctagttctggaatagaaaagtaggtaatggatatgctattctttaatatactattcttaaatctcattgactttgcagctacttaccattaatcttaaccatatcatcatcggtcagattgctggtgtagttggtgctgcgcgtgtacatcggcgtgtcgctcatggagaggaactcgtccattccgggaactggagcaatcgaaaataaagatatgcgttaaaaatggcgccaatttcttcgtgctcacgttttctacacttacaacgctctggccattggacaggtgagggtcgca

SEQ ID NO: 40031 - DNA, 939 bp, DROSOPHILA
caatcgtccagggcgcacggcaaacacgcagagctgccggaggagataggccgctgcttcttgggggccacattcgtaccccgatccaaatccagacccgctgatccatccgcctcataaatacacacataatttctgccgctttgattggggcacgcaatggtggaggagattggctgccagagacagacgggcattgtggtcgccatgcccagccaggtggcatccaacaccggaactccagccccatccgccggcggcattcaccagcagcatcagcagcagcaacaccagcagcaccagcagcagcaacaccagcagcagcagcaccagcaacaccagcagcaacagcagcagcaacaccaacatcagcagcagcaacagcaacaccttcagcagcagcaacaccaccagctgcagcagcaacagcagcagcagcagcatcaacaactcgccagcaacatgagcctgctgaccgtcaaaggcggccgttacctttggaccgaccgggagctgttgatgcacctccagaactacactcccctgatccttctcatcgatttcgtggagaagacccgaaccaagcgcttctatgagagctccgagcgctatgagatactcatgctggtcttcatcatgcgcaagggagcgccgttttgtgagaacaagcgctttccagcggagtactgggttaatctatcggtgggaccaattgccgaggcgtttgaccgtctgcaggcggccatcgatataccggatccccagctgccgatccacatgagcgttacagatttgaccagctggaagcaaatgttcgacctggccatgctggatatacggcgttttgcgtactacaccgatcccttgcagctggccgatgcgggcgtctttaaccggatcacctttgagcagcgattcggaatgcagtggcaggagtaa

SEQ ID NO: 40032 - protein, 259 aa, DROSOPHILA
MVEEIGCQRQTGIVVAMPSQVASNTGTPAPSAGGIHQQHQQQQHQQHQQQQHQQQQHQQHQQQQQQQHQHQQQQQQHLQQQQHHQLQQQQQQQQHQQLASNMSLLTVKGGRYLWTDRELLMHLQNYTPLILLIDFVEKTRTKRFYESSERYEILMLVFIMRKGAPFCENKRFPAEYWVNLSVGPIAEAFDRLQAAIDIPDPQLPIHMSVTDLTSWKQMFDLAMLDIRRFAYYTDPLQLADAGVFNRITFEQRFGMQWQE

SEQ ID NO: 40033 - DNA, 3636 bp, DROSOPHILA
agtaacatagacattattcagcgagcccagtcaagaattttgagaattatccctggagcgccgtgggaccttcgaaacgaaaacatacccagagacctaaaaatcaaattagtaatcgaagtaatagctgagaaaaaaacgaagtataacgaaaagctgaccacccatacaaatcccctcgcaagaaaactaatccgagtatgcagtcaaagccggctgcaccgcaacgacctcccagcccagcaataaactttttagggcattaatgaaaaaaaaaaactatcactaagtgaaagttaattaagttagattaagatttgaacacttattgttagtctcttaacacaaagggaagattcaataaataataaaaatttaaaaaaaaaaaaaaaaaaaaaaaaatatattgtatatatatatgagttaattcggtcaagaaagttgagacgtagcaaacgcaaattgtccaaggaatttatttattcaatttaaatggacaacaacaagtgggggtgtgaaactttcgccactgcaaatgtgggttaaattcgcaggcaaattgcgttttcatttggaaaaagtttactatttttactgaaggcgcacacacagtttctgtttatcccaacttaaagataataatgtattttgtgtttgttgaagttgaatttgcaagacaaacagaggggggcaattagagatgttgaaccttccaatgaatgatgtgcacaagaaatctggggatttatactattggagccccttgtcgtcaagatctagttcgtgttcccagaaccagtcagcacttggaaaatgcaatcatcagcacttttttgggccaacaaagaaatgaccattttagaaacttatccgtagcaatcagtgctaacttggatccacttgagattcaatggctaatctaatcgctgtgtagcccggactagacctgcgctccagttctttgtgccagcagttagtccagcgattcgagtgcgattgaatgatggccagaaagcgagcactggattcccaactgccgctccttgcgctgggtggcctaatcattatgggattggccatagtcgattccctggagtgttatgcctgcgactccgccgaagattcggagtgtgccacccgaccgggtcagcagctggaagtggaggagtgtcagcagacgggcgacgagtgtgtcacctccatatcggcgggattaacgcgacgcggctgcctggcgcggctgtatcctaatggctattgtgccgctccatgcgaccggtgcaatacgagcctgtgcaatcggcacgtttatcctgcggatcgattgcggtgctatcagtgcagcggatcggattgcatcgatgtggccagtcggccgcaatacctgctgccgtgtccggtttaccaggaggatgacaggtgctacacgaacgtagtccacttatccaacaccctgcgcggctgtgagcacaccaatttgccgacaacctgtccgcacgtctgccttaagtgcaattataatggttgcaatgcggagaagaccgtcacggaattgcgctgccttcagtgcacccataatcgattggcccccaatccggactgcctgcgggaccaggatccaccggcggcggtggcggaggaccagcccaagtgctcgttgagcaactcaactgtgacgcactgcgtcaacaaggtgatgtacgggcacagggagaactgctttagctaccgcaacacccagacggaggtccttcagaggggctgctccaccgccatgggattctatcccaccggcgagctaaccgagtgccacggcgaattctgcaatgccgattgccaggacattgtctgcgccgcgtgcaactccaccgcgaatcctggctgccgtgctggccgcaatttaccaacggaaaagtgcgcagcaggcaccacggcctgctattcctgcgagcaaggttagggtgagtgggggaatctcgaccaggaacggccccttaagtacccactcaaactgtcagttattcatttggaaataaaatttgttaagcaatgcatctcttccgggaatttcagttgaattggctttcattcttggttaagtttcttaattgataactacttagtttcatttttttacggatatcaacgcttgagatacccttgtaacccatttcccttttataatcccaaatacctttctgcgacgtggctgtgcggatgcggattttgcacccgctgctctgggcgaaagttgccaattgtgccgcgatgcggatggctgcaatcgctactccgtccgtagctgttaccgttgcaatgcccaggaccaggattcggactgtgcggccatggatctgcccacaacgatgacgaccagcaattgctctagccccacggaactgtgcgttagcacggtggtcagccgactggacggtatctacacggtgcgcggatgcgagggtcaggtgccggagtgttccgccaatgatccgtactgtgtccgctgcaacggaagtctgtgcaacgatgcacccactctctggcggcagacgcaaatcgaagtggctatggatcagcagttgccgcctagctggtggtcactgctgcagtactggtggtccaggaaaatccgataaataagcacccattacatgggtgggtggtcgacgaacgtagcgttgataactgattaatgggcgtggccagggggcggatgtgtttggccggaggtagtgaagcgagcgaaacgcccccgcaaaatcgagcaaacaaaagaactcggaataaacaagctacggattattaaacgggcgcactgactgctgctcattgaaagtacagattccataaacaaggattacatattgcgtttcatagatcattcattttaaaattgtttccatttaagagtttttttacgtttactgtttacatactgtgtattatagcatgttttagaaatttaggagcttgaaccaagtttcgatccaaatatattcataatattaatcaatttcaccaagtttatgttattaaatatcccgtaaagtgagcacaaatatattagcggaatttaagcgcttgattccagttgaaaactggttcgcaaggcggaaactaaatgcaaatttgtttgcttttgctttctgatttttgcatttcgcttgccctctgcagtttgtgctttcttgttgtttttgcttttgctttgcttgtgctttgcttctgcttttgttagctcacgcgcagccgaattataacggacgtcgttgttgttgttattttcactgataatgaaatgatgggcactgcaaatagcaacaacaagccgcataatagtcagccccatcccctcctctccaccacccttcgctgctttcatccacgtcactcattctatttgcattggaaaagtgtggaaaatttgcgaattttccgttaccgacgagggaaggtgacaatgataattaagttgctgggcgctctccagtgcgacgaaactttggtaaaatttattaattgaatttcgcatcgaaagcataccgtatgctgtgctgtgcgctggaaagggagagcgaaaccgcacccactatgaaaacaaaatgaaactacaagagtaacgaagtacagtgaaca

SEQ ID NO: 40034 - DNA, 1437 bp, DROSOPHILA
atgatggccagaaagcgagcactggattcccaactgccgctccttgcgctgggtggcctaatcattatgggattggccatagtcgattccctggagtgttatgcctgcgactccgccgaagattcggagtgtgccacccgaccgggtcagcagctggaagtggaggagtgtcagcagacgggcgacgagtgtgtcacctccatatcggcgggattaacgcgacgcggctgcctggcgcggctgtatcctaatggctattgtgccgctccatgcgaccggtgcaatacgagcctgtgcaatcggcacgtttatcctgcggatcgattgcggtgctatcagtgcagcggatcggattgcatcgatgtggccagtcggccgcaatacctgctgccgtgtccggtttaccaggaggatgacaggtgctacacgaacgtagtccacttatccaacaccctgcgcggctgtgagcacaccaatttgccgacaacctgtccgcacgtctgccttaagtgcaattataatggttgcaatgcggagaagaccgtcacggaattgcgctgccttcagtgcacccataatcgattggcccccaatccggactgcctgcgggaccaggatccaccggcggcggtggcggaggaccagcccaagtgctcgttgagcaactcaactgtgacgcactgcgtcaacaaggtgatgtacgggcacagggagaactgctttagctaccgcaacacccagacggaggtccttcagaggggctgctccaccgccatgggattctatcccaccggcgagctaaccgagtgccacggcgaattctgcaatgccgattgccaggacattgtctgcgccgcgtgcaactccaccgcgaatcctggctgccgtgctggccgcaatttaccaacggaaaagtgcgcagcaggcaccacggcctgctattcctgcgagcaagatacccttgtaacccatttcccttttataatcccaaatacctttctgcgacgtggctgtgcggatgcggattttgcacccgctgctctgggcgaaagttgccaattgtgccgcgatgcggatggctgcaatcgctactccgtccgtagctgttaccgttgcaatgcccaggaccaggattcggactgtgcggccatggatctgcccacaacgatgacgaccagcaattgctctagccccacggaactgtgcgttagcacggtggtcagccgactggacggtatctacacggtgcgcggatgcgagggtcaggtgccggagtgttccgccaatgatccgtactgtgtccgctgcaacggaagtctgtgcaacgatgcacccactctctggcggcagacgcaaatcgaagtggctatggatcagcagttgccgcctagctggtggtcactgctgcagtactggtggtccaggaaaatccgataa

SEQ ID NO: 40035 - protein, 478 aa, DROSOPHILA
MMARKRALDSQLPLLALGGLIIMGLAIVDSLECYACDSAEDSECATRPGQQLEVEECQQTGDECVTSISAGLTRRGCLARLYPNGYCAAPCDRCNTSLCNRHVYPADRLRCYQCSGSDCIDVASRPQYLLPCPVYQEDDRCYTNVVHLSNTLRGCEHTNLPTTCPHVCLKCNYNGCNAEKTVTELRCLQCTHNRLAPNPDCLRDQDPPAAVAEDQPKCSLSNSTVTHCVNKVMYGHRENCFSYRNTQTEVLQRGCSTAMGFYPTGELTECHGEFCNADCQDIVCAACNSTANPGCRAGRNLPTEKCAAGTTACYSCEQDTLVTHFPFIIPNTFLRRGCADADFAPAALGESCQLCRDADGCNRYSVRSCYRCNAQDQDSDCAAMDLPTTMTTSNCSSPTELCVSTVVSRLDGIYTVRGCEGQVPECSANDPYCVRCNGSLCNDAPTLWRQTQIEVAMDQQLPPSWWSLLQYWWSRKIR

SEQ ID NO: 40036 - DNA, 2414 bp, DROSOPHILA
aaaatctcccacggaaaaatatcgtatgcgctaataattcagatattctagtttggaattcacagggttcggaataatgtaaatatttgtgcgaaagatcggcaatcaatcatattttttttgcttcgcgcttacatgcgtctttgttgaaatgaaaaaatacaaataaaaaacatatacttatataataagtttaaagattgagtggttgcctcaaacggcaactcgttttaatttgtaccaaattaaagtgtttttaaatgataatattcttgttagcataaatgtttatgcaaatgtcgaaagctatgagttcgtatttggagcacgatgcatatattaatgggcatttaatgtgatatactaatatattgaatggacactttagaaatatattttgtttttggattagtgaatgtgctaaattaatggtgcccatttgtaccgtaggaccatcatgtgactattaactggatttcgggtttttggtcacatgtttattgtttgccaacttcatataattaaggcacaattaacgtttgtatcttttttttttttgggtaacttttctgtaaatcgacgagattcgccgagcgcgaggaaacagactagaggcgatgacgcctcgcttaattacgcattgtattttaatttcgaatggggcttaactgctcaactggtttgctgcaattatatatttcaaaaaaagaaaaaaaaaatggcaaaacggcactctaaataccctctaaaggtagctcctttccaaagattatgtactttacgaatgaattaaacctttaatttgtttaatgttttatgtacattttccacttaaaatagttttgttttaaagcaactgagcgaccgaagcgacttgtctttcgaggaatttctatggatataaactgggtcgtaaactaatctttttatgtacctcctacgccagattcttcattttacattggtacaaaatattcactgatgaattcaatgctgaatgctagatttttctgatgaattcaaatgaaaagcgtgcagtacttacaatctcctcgtgcagcgcatcttgcggctgcatctgatgtcgcagacgcagtgcctccagatccagggcattaatgcccgagggcatggatatcgaattgcgtcggagtcccggtgcaaaggcctccggcgacggcgtcgccgactccggctccttttcgttgaccatcttcaaatgcggtagatccacattgcgtcgctcgctgagagattgcttcctgggcatggcacccagtagctggagctgctcctgctcctgcccatgctcctccagtcgctcatctccgtccgtgtccgcatccgcgaaggccaactccggatgctggccgttgagcgcctgcgcggctcccgattgcgatggttgagccatttcaccggccgcttctcagttccagcggctgcgttccaaacgcgatcgcgttccactggcgaatgaaaaaaagggttgagcgcggcaaccggaacccgaaatcgccggcggagcgaaagagagcgctgggcggccggacagagggagacgggcagtgagcgggcggcttcgattgccatcgctgtttgcctttaatcagcgcttatcatcggtcggcgataatcgcacacaccgatcgaaaaaaaaaaaatgctcaatcacagttgcacatacatatatattatggctaaattaatcagttaacagtgtaaatgaaaaatatagatatcaaaaacttaaatcatcatgctgagccccaaataattgtgctagaatttcggtttttgaaattcaaatctttcagtgtatttgtgatccgggtgcgctggttacgcagatattgctaatacgccccgtataccgaacgttaaaagctatttgaactctgcgactgttgccccactgaatgagttaattaagttcgttttctagccataagcccacttcgtggatcgcatttgtttgcctggctaattaggcgtaatctcgcaccgactcccttctcgtcgctctccgcaaaattctcgaccttgttttaaagcaccaagtgtacacgaataaaaagtcaaacaaaatttaatcaactggcaaagtcaagagccaaactcgttcgcccgccgatccgatcatttcgatcgagcagcgcctttcaataattacatgtgttacctgataaggtaaaccaaaccaacgcagccacccacatccaaacccaaacccaacccccccatgggcaaacttctctcaccaagtgctccgcaaattgataatctaacggtgcggaatgccacaactaattcgcaatattgtttaacaaattgcactcataaattgtctagagtgcgcaaatatttgacgattgaactatatttatgatcattgccacgggaaagggtagaag

SEQ ID NO: 40037 - DNA, 414 bp, DROSOPHILA
atggctcaaccatcgcaatcgggagccgcgcaggcgctcaacggccagcatccggagttggccttcgcggatgcggacacggacggagatgagcgactggaggagcatgggcaggagcaggagcagctccagctactgggtgccatgcccaggaagcaatctctcagcgagcgacgcaatgtggatctaccgcatttgaagatggtcaacgaaaaggagccggagtcggcgacgccgtcgccggaggcctttgcaccgggactccgacgcaattcgatatccatgccctcgggcattaatgccctggatctggaggcactgcgtctgcgacatcagatgcagccgcaagatgcgctgcacgaggagattgtaagtactgcacgcttttcatttgaattcatcagaaaaatctag

SEQ ID NO: 40038 - protein, 137 aa, DROSOPHILA
MAQPSQSGAAQALNGQHPELAFADADTDGDERLEEHGQEQEQLQLLGAMPRKQSLSERRNVDLPHLKMVNEKEPESATPSPEAFAPGLRRNSISMPSGINALDLEALRLRHQMQPQDALHEEIVSTARFSFEFIRKI

SEQ ID NO: 40039 - DNA, 2313 bp, DROSOPHILA
cgcttgtaatgtgcttaagcacttaaattgcctcatcgcgtgtgtcagtggagaaatctcgacaaactcaagatgtacgtatgtagatatatgtatagttagccataaggtgtataccctttctttcgagaaattagtatggagaaatctttggagaaatctcggagagactagtgaacttttgggtcatctcctatagtttgttatgcttttaataccctctgattccttgcaactatggagttgctatgctgaattgcaatcacctcgattcattgtatattcattgtattcactgcattcactgataagagagctgtcgaaaaaagtatgcaaagcattcgaatcgtctggtttgaactgctttgaattgatataaaaccggataattaatctgggattaattaaatgccgtgtcagcacactcattgccgtaaatatttatgaacaaataaatcctgagctgcaccgaaagttctttaatagatacttttcccaaattatcgatatgtaacagatataattgatagtaactattgcaaatagctaaactgttttttacacccgccatttgtgtgcctatcactttgataataactgccattggtccaacaccttggcgtttccatgtgggtaatcataggaattcgcagtgtcgaggcgggggaaaagtcaaatgaaaatcgctgcggaattagcatggaagtgggcagtagttgcaaccgatactcggaatgggcggtaggtcgggaggaatgtggggaaaggcacgttccactggcagtgccgacgccacaattgaattactgtcgttcggagacaaaaggcagcgactttcgattaattaatctaattgcccgatgaatcaaatgggcaaaagtgcccaacgacagcgtgggtcataattgaaagtagctccaattatttaaatacaagaaccgcatatatgaaatttacttagttagttatcggtggtagtggtagtagttgatctaatcactcaccgatgaactggtcttctggcgttcccgaactcgtcatcgctgtcatcgttggcgaaattgatggccttatccggcgtattggccgttgtcgtcggcgccgtagtgcccggcgtatccggagtggccggtgtgcccaggctggaggtcgcatcgtcggctatctgaaaaattagaatttatatagtcaaacagatagatttccttttttgctacactacacagatagctggattgatagagcaaacagcaagcgattgtaactgaaaagtatggcattttggttgggctataccataccataccattcatatacatatgggttctgggcttttgacacctgcacttgggcaaggtgagtgcaattagcacagaggcgttaccgcagagaatacccagtcaaggtgtctcccgtacaatataacggcaagcccggaaaaaatggcatcgaatcgaatggagtacgtcataagctacaagccacacttagtacctgccttatccttatccatagccgcactgatatcgagcacaacggcgttgtgtctaacattcggtgctgggtgttgctgatcctcgatgggaacgctcgagaggatgaatcggctgttggatgagctcattgtggacactcaacgattataccgtgcaatacttatgttatcacagcactaaattgtgggttttcaatcaaacacttcactgagtcacagaataggtaaaacaaaaacaaattgtttatatttaattaggatagtcgttgttctattagtttgctgttaactttgattgacctagttcgcatcgccgatattttcgagttgccaaataattataaccgatccgaacgacgttagtgccgcgatcgcactgttaaccgttgataattgctggttcgctattgcctgaatattgtttttgaagcctcaatttatgcgttttaatcgcttcgctctcgcagcctctgccgcagtcggcgtcggcagcgctacgttgagtgaaaatatcgacacccacactcagaacaatcatgagctagttgagtcggctcgaaagagtgcggaatttgattttgatagaataatccggtagtcgtaaattaattgcggctaccctgattggcgacgtactgcggtcttggtatattagccgtacttcatgacgaatggccataaatatgaatgcactgcaagtaatttgaacaaactgaatgctaaatattccaatttaaaatgagcttcgttccaaaatcaaatgttatttgaatagcttgaaatgaaacagagagaatctgtctaattaaatcgtcgtg

SEQ ID NO: 40040 - DNA, 177 bp, DROSOPHILA
atgaatggtatgatagccgacgatgcgacctccagcctgggcacaccggccactccggatacgccgggcactacggcgccgacgacaacggccaatacgccggataaggccatcaatttcgccaacgatgacagcgatgacgagttcgggaacgccagaagaccagttcatcggtga

SEQ ID NO: 40041 - protein, 58 aa, DROSOPHILA
MNGMIADDATSSLGTPATPDTPGTTAPTTTANTPDKAINFANDDSDDEFGNARRPVHR

SEQ ID NO: 40042 - DNA, 3872 bp, DROSOPHILA
aagcgaaatgccgttcgacaaccaccgtcagccggcaccgttatgcggcgctttctctcaccatctctctcatttcgttctctcaccatcttacgctcttgctctcgctctcgcttgagatgaaaactcattgcgctgtgggttccattgcgagttgaaactcggtcttcttcattctagaattaagtgccgccgcagcaggagtcgcagagccagtcggctaagtaaatgtaaatcgagcacaagtccgtgcgttcaccgagcagccggaacggaagaatacacggacggagtccgaaaccggaacacgaaccataaccgttgatttttttttctgtgtgctaaaagctgttcagtgccaaataatatgttttttttttctaaattaaaagtgtgtttatggtttattacgtttgtggaaccaatgcctaattttgccatttgcagaaaagagaagatggaaatccctattctcttttctaatccttttttacccaccccattattcccagcttcccacttcctactacgcactttcacacactcacgcactctaattgcgtaaaaagccaaatgcgcagcaaactgcactgccacgccccttccaaaaacgcccactgctctgcaaaaacagagagagagcgagtgtgagtggaaggagcagacagagagagcgggatgctgtgcgtatgcgtgtttttgacacttccttgtgcattttagggatacacacaatgtgcgtgtgcagtgaaatcaagtgaaaagccaaaaatcaccaactaactaacttaaaatattgaaaaacttaaagaattgagcgaaaaagcgccaggaaaacaagattggcacgcagttgaacggaagccaacgctagagggcgccactgttggcgtgtgtgacggaatttcctttaaaaggacaatagtaagagaggagtaggggaggagaaatagagagagagcgagcgcaaacaaaaggggaagccccgtgtgcgagcgagatggacagctcgccggatctgtcgctcaaattgcgacgcggttccagcgattcgcgggataacttctacatggattttgcccagggcatcgactccgatatcgaggaagtggacaacacggccaacaatcaggaggccggcgaggttccaccgccgccgctgcccacagtttcactggccgaggaggtgctgctcctggtggcgccaccgccgccaccgccctctttactgggtcagccgctgcctacgctaacggaaacggatgatattccgcccactcccacaccgccaccacagcaaaaggacgatgagggtgacgatgaggacgagcgggaggaacccgttccagaacaggatcaaggagccccagcagccccttcgccaccgggctcaccgattaattcagtcctggaactggagctgataccaccacctccattatcgccaatggacgatgcgggccttcgcaccgatgacgatggcgaaggcgaggaaaccgatgatgcagaggaggtggcggccattccgccgccacacgaaatgctggacattgaaagcaatcccgatgaggaggaggaggaggaggagcaggagcaggcttcccaggaggacactcccaaggaagaagacgaagaggaggacgacgacaagtccacgccaccacccccactgccaccgcttccctcgaatttctcctatgtgcagggccacaatctcggccaggtgaccccacccctgaccaagtcgccatccaactccccctccccgcccgtgacaccaccaccctgcccggagctcaacatcagccggatggtatcgccacctgcccaacacatcagccagataccaccgctcacgccctccgatgagagcgagggcgaggcggagtcccagccgaactcgccaccactaagactggatgcagagcagccaccacccgatatggatcaaccggagccagaggatcagccacctgagccggaaaacgaacccgaacccgaacccgagcccgagcccgaacccgaacccgtgagcggagctcgggaggactacagtcgttcgctggacaacgaggatgagtccaccaccataaccacaccacccagcaacgggtactctgcctcctccatcatagctccaccgccggagcactttgcggaactagacgaggacaggggctttatacccccaccacccttggagcaggagcccgaggaggaagtggaggaggaggaggaggaagaggaggaagagctgaccaaagagacggacgagatatccgtggacagggaatcgctgcaggatcagggcggcgacagtatcagttcacctcggcctgccagcatattgactggatccatttccacatccgttggaggcggagcaggaggatcaccgaagcccgagagtcgcggcccaagtcgcagtggcagccagcgatcgcagctgagatcgggatcccagcagggatccattgccgaatcccgcggtggctctcgcatcggatctcgcacaggatccgtggcctccgcccaggcagctggcgttctctcaccccaggcttcgctcaagtcccaaacatcgattcgctcgcaaggacaggcaggcgtgcgaagtcctgccgggtccatcaagtcgggatcgcagcgtatgcagagtccacaggccggagaaggagctccggcgatgccctcgccgccgctgatgaggagtccaccgccggagctggcccgccagatgcacagtccgccaaggatcacgacgccgccgcgggtctgcagtccgccgctggtcagcagcccacccaagctggccgaatccgctgctgctgccgtgggagttgctgccaccgtcaaggagcagatcgggtgagttttcgagaaagtaaagtgggtcttgtatatgatgatataatgatatgatatccaatgacaaaccgttccacctgttgacatgcttttgaaaatctcattgataatgtttaaagattattatgttatgttattatgctattatgttaaatgctttgcgtatgattatcacattaagttcgttccttattacctaatcataaagaacttagattttcgcttaagattcgcgcaagttttcgcccaacttgagatgtaaatctcacagggcttcgggctaaagaaacttctacttgagatgctgctgccgcctctcgtatctaagtgaaccatcacgtctggttctggtttcgaagttcctggggcactccattaattgcataatcgtactcagaacgccgtgcccccctattcctaatttcatctaactacttcgtcgtcagcctccattagtcgctgctaatagctgaacaaaactgtttaacttgtgtgctcgtgctggcatcgtgtcagtgctctacctgggccactccttcactcctctacgcctccactgcctcattgctgcacttggtcctctggggcgggcgctgctcctgccacgaaaggcgccatctgcattcgcttcgctgctccgttgcgacgtcgtctgcctgcatcctactccgtatcgtatgctctccacattaattaaacaaaccgtttccagagcaacaccctcacaagtttcacgccgtaaacagagccgtaaactgagagaaacgaggacgatgcactgggaaaatggcaagctttaagtctcactcacttgaaggttcaatatttgatagttagcgtaatgattgccaaaacttgaaagcataatagttccattacatcaatacccatttcaatgaatttgtaatagaatgtaatagaatttcatatttcgcgtgcaaggaccacacggcgtatgcggcattttaagtgcgtatacgcccggtatgccgacggccgtgtgt

SEQ ID NO: 40043 - DNA, 1872 bp, DROSOPHILA
atggacagctcgccggatctgtcgctcaaattgcgacgcggttccagcgattcgcgggataacttctacatggattttgcccagggcatcgactccgatatcgaggaagtggacaacacggccaacaatcaggaggccggcgaggttccaccgccgccgctgcccacagtttcactggccgaggaggtgctgctcctggtggcgccaccgccgccaccgccctctttactgggtcagccgctgcctacgctaacggaaacggatgatattccgcccactcccacaccgccaccacagcaaaaggacgatgagggtgacgatgaggacgagcgggaggaacccgttccagaacaggatcaaggagccccagcagccccttcgccaccgggctcaccgattaattcagtcctggaactggagctgataccaccacctccattatcgccaatggacgatgcgggccttcgcaccgatgacgatggcgaaggcgaggaaaccgatgatgcagaggaggtggcggccattccgccgccacacgaaatgctggacattgaaagcaatcccgatgaggaggaggaggaggaggagcaggagcaggcttcccaggaggacactcccaaggaagaagacgaagaggaggacgacgacaagtccacgccaccacccccactgccaccgcttccctcgaatttctcctatgtgcagggccacaatctcggccaggtgaccccacccctgaccaagtcgccatccaactccccctccccgcccgtgacaccaccaccctgcccggagctcaacatcagccggatggtatcgccacctgcccaacacatcagccagataccaccgctcacgccctccgatgagagcgagggcgaggcggagtcccagccgaactcgccaccactaagactggatgcagagcagccaccacccgatatggatcaaccggagccagaggatcagccacctgagccggaaaacgaacccgaacccgaacccgagcccgagcccgaacccgaacccgtgagcggagctcgggaggactacagtcgttcgctggacaacgaggatgagtccaccaccataaccacaccacccagcaacgggtactctgcctcctccatcatagctccaccgccggagcactttgcggaactagacgaggacaggggctttatacccccaccacccttggagcaggagcccgaggaggaagtggaggaggaggaggaggaagaggaggaagagctgaccaaagagacggacgagatatccgtggacagggaatcgctgcaggatcagggcggcgacagtatcagttcacctcggcctgccagcatattgactggatccatttccacatccgttggaggcggagcaggaggatcaccgaagcccgagagtcgcggcccaagtcgcagtggcagccagcgatcgcagctgagatcgggatcccagcagggatccattgccgaatcccgcggtggctctcgcatcggatctcgcacaggatccgtggcctccgcccaggcagctggcgttctctcaccccaggcttcgctcaagtcccaaacatcgattcgctcgcaaggacaggcaggcgtgcgaagtcctgccgggtccatcaagtcgggatcgcagcgtatgcagagtccacaggccggagaaggagctccggcgatgccctcgccgccgctgatgaggagtccaccgccggagctggcccgccagatgcacagtccgccaaggatcacgacgccgccgcgggtctgcagtccgccgctggtcagcagcccacccaagctggccgaatccgctgctgctgccgtgggagttgctgccaccgtcaaggagcagatcgggtga

SEQ ID NO: 40044 - protein, 623 aa, DROSOPHILA
MDSSPDLSLKLRRGSSDSRDNFYMDFAQGIDSDIEEVDNTANNQEAGEVPPPPLPTVSLAEEVLLLVAPPPPPPSLLGQPLPTLTETDDIPPTPTPPPQQKDDEGDDEDEREEPVPEQDQGAPAAPSPPGSPINSVLELELIPPPPLSPMDDAGLRTDDDGEGEETDDAEEVAAIPPPHEMLDIESNPDEEEEEEEQEQASQEDTPKEEDEEEDDDKSTPPPPLPPLPSNFSYVQGHNLGQVTPPLTKSPSNSPSPPVTPPPCPELNISRMVSPPAQHISQIPPLTPSDESEGEAESQPNSPPLRLDAEQPPPDMDQPEPEDQPPEPENEPEPEPEPEPEPEPVSGAREDYSRSLDNEDESTTITTPPSNGYSASSIIAPPPEHFAELDEDRGFIPPPPLEQEPEEEVEEEEEEEEEELTKETDEISVDRESLQDQGGDSISSPRPASILTGSISTSVGGGAGGSPKPESRGPSRSGSQRSQLRSGSQQGSIAESRGGSRIGSRTGSVASAQAAGVLSPQASLKSQTSIRSQGQAGVRSPAGSIKSGSQRMQSPQAGEGAPAMPSPPLMRSPPPELARQMHSPPRITTPPRVCSPPLVSSPPKLAESAAAAVGVAATVKEQIG

SEQ ID NO: 40045 - DNA, 1829 bp, DROSOPHILA
atttcagattcacctgtcatccaacatgtgtcatgtgtcatatgcatgccgtttcgccttaattaaacatcgcaatcacgtagcgagcatatttcatatttccattaggccagcaaacattctgcgattgtgtgagtgccgccagctgaaaaacatgcacaaatctctataatctcttatcgggcgtacagtgcgcgccattatgtatggcacacattgttggatttggtggtggtaatatctagttttaccctgtgttcgccatttgctcactaagcaagctaatacagtttgagatcaaagttgaagccaccatagttacatgaaacgcactgtatgtttcgcacttgtatcccgatttgtgctgtatgtccactagacggcgattagtttcaattgcccgtggcgaatggttggggacttttcattaagtttctgtttcgagtggctattgttcttttttttttttttttgctgttattattcgccagctctatgtgcttatctcgatctgaatatgtatctgtatctgtatctgaatctgaatctgaatctgaaactggatctgctattaagcgcaattggagagggcatgctgtgtctgccggtgggtggaagtgggacggtgggtgttccggaaggccagagattcccccggaatgccagcgtctataaatagagggccatcttctggcagggtttaaagttcagtcgaaggctggcggctggacaccaagttcaatgtatccgcggcggaaatgtctggcatccgatacaataaatcccagcacactcatccacatatagatatatatagagatgtatatatatgtaccattttggtggggggaccattatttaattaagccggtcgcatgtatttgtatctgcaaaatcgggtgcggggcccagagcccagaccaccgattcagtgagtccacgtcggtccgccaatccagccacgcataccatatatattcaccaatcgctgatcgcactaatgtcggccacatccggttcatcttcctcttccatatccagctctagcagctccaccgccgaaccgctggagccatcgaagccagagccactgaagccaccaatagccaccgtcagctatcaggatgaacagaagccatcaccaccaccaacagctgctgctgctccagcggtaacaacaacggctgcaactacggcggtcaccagccagccgagatcgcactttacgagcagccaccatcactaccacttgccgcatcagttccagcatccgcaccaccagaaccatcacacccacagtgtccgggtgcccacgccgacggtgcccagcagctatgcccccccaccgccgcccgacagcggaagcagcagttcgcccgtcgatcgccggcgtttgttcatggccggagtggctcctccgattgccgctggagctggctccctgatggccatgccagctgaaccagcggtagccatatcaccgggaagggtatcagcacgatcaggttcgcagcaccacgtgaccatcgatgagtcgagtttgcccagccacaagggcaacatacaggagactccgggtcccagtggcctgatcattggcgggggagatggcgacggcgatagggatattggaggtggcggtgggccggacagctcggatccgccctcctcgcccggcggcagcagctcccagccagcgctcagcggcagccaggcggacggacagctggcattgatgtaccactcgcaccagctgaccaattatccagtgctgcccgccattaagcgcacacatcggccatccttcgtctatccgccgatgccgaggg

SEQ ID NO: 40046 - DNA, 785 bp, DROSOPHILA
atgtcggccacatccggttcatcttcctcttccatatccagctctagcagctccaccgccgaaccgctggagccatcgaagccagagccactgaagccaccaatagccaccgtcagctatcaggatgaacagaagccatcaccaccaccaacagctgctgctgctccagcggtaacaacaacggctgcaactacggcggtcaccagccagccgagatcgcactttacgagcagccaccatcactaccacttgccgcatcagttccagcatccgcaccaccagaaccatcacacccacagtgtccgggtgcccacgccgacggtgcccagcagctatgcccccccaccgccgcccgacagcggaagcagcagttcgcccgtcgatcgccggcgtttgttcatggccggagtggctcctccgattgccgctggagctggctccctgatggccatgccagctgaaccagcggtagccatatcaccgggaagggtatcagcacgatcaggttcgcagcaccacgtgaccatcgatgagtcgagtttgcccagccacaagggcaacatacaggagactccgggtcccagtggcctgatcattggcgggggagatggcgacggcgatagggatattggaggtggcggtgggccggacagctcggatccgccctcctcgcccggcggcagcagctcccagccagcgctcagcggcagccaggcggacggacagctggcattgatgtaccactcgcaccagctgaccaattatccagtgctgcccgccattaa

SEQ ID NO: 40047 - protein, 261 aa, DROSOPHILA
MSATSGSSSSSISSSSSSTAEPLEPSKPEPLKPPIATVSYQDEQKPSPPPTAAAAPAVTTTAATTAVTSQPRSHFTSSHHHYHLPHQFQHPHHQNHHTHSVRVPTPTVPSSYAPPPPPDSGSSSSPVDRRRLFMAGVAPPIAAGAGSLMAMPAEPAVAISPGRVSARSGSQHHVTIDESSLPSHKGNIQETPGPSGLIIGGGDGDGDRDIGGGGGPDSSDPPSSPGGSSSQPALSGSQADGQLALMYHSHQLTNYPVLPAI

SEQ ID NO: 40048 - DNA, 3004 bp, DROSOPHILA
accagaaagttgttcctggcggtgagatattccactctgagccctaatcttcgcatctccatgtctgctacatgcaaacatatcttttagatggcgggcacggtggccacttatgaactagtgctcattcagtttcacgaggataaaaagacctgggactgctcacccttcaatcttgattagacgcactaattggcatgtagataaatatatatcatacaatattataaatatcactcatacgccctgttgcccagtgaatattttgtatattttgtaactaggatcctatagatagtgcaaattaaccgactgcagttcacaatcagtgttggcacatttttcctgatggattatctcatatcactcatacgccgcgttgccatgcatattcatgagcaacagctgagtcctttgaataagttaattagtcgatttgcggttacacataatatgttatttacccgctattggcacagttaatggcaattaaaacactatgctacacagctgcgaggagtccatgcagtaaccagtttccatccatccatccatctgcccgctttttgcacgcgctttccacttttcacatcgactcggctcgcgttttcattttcatttgcggaccatttactttggtaatccagtataagtatgtgatgcaattgttggccataaatggcgcacgcttcctaggcacactgaaatgcgtgaacagcgattggattcgaactgaaccagttggccaaatgccaatgccgattgctcctcggctgtgcagctctgcagaggcagctcttgaggcgtccatgacgcttccggtcagcgggcccaggtccatgtccatgtccagccgtccgatctagtccggttgcagccaattgttaacccaattcacgaacggagttcggggatcagatcttcgatgggagtatataagctccgctatcgtttaacttcgcagacacaaatcgcgcacagcagctccagttaagtcataatggccagatatcagagtagccttagcctcggaatccttgtggtcctgctaatcgatcagctggccaacgcccagttcgttccgggcccaatctctggaccaattccccgccagcagagatcgctctttgggtccggtccgccgcccggttggagtagcggtggcctcagtcacggctggaatagtcccagctttgagtttagcccgctgccgccatcgcacagttcgcatgtgaccaaggacgagttgctggccctgctagccgcctggaaggatgtggccaagccgacgactccggcaccggagccagagcccgaggagcccgaacccgagccggaggccacaacgccagcgccgccagaggatgtggacgaaccggaaccggagcccgaggcaccggcaccggcaccggcaccagaggcgccagctggtccaccacccggcgttcccgtcaccgtctccctgcccgccctggtgcccattcaattggcggccatgtggcaacagccggcgctgggagcagcggccggcggactgggtcctctaaatctgggcggcctgggtctgggcggtggcattgcattgaacacgctcggcggcggtgcggtagcagccggaggagctatagcggccggaggcggtggagcggcggccgccggagcagcagcagcagcgtcacgttccggagtggcacgccctcgagcccgggccaggatcggaggacgtgcgtccaatgcccagcagcccgccatacgtttcccggtggccaatccgcgcagcttcacctcgaacaactatgtggcgcccaggccgcgttattatcgcgatacggagcccatgcggtaattgtgcactgatttccagccaaaattcaattccagttggatctaatgatgtcattctcaacttgcagcgtcaacgtaatggcaccaccgccgccgtcgccctaccaaatggccaatatccagggtcccgttcagctggtgcccgcctactggcaataggcccattattcagctaccaagtcttacaagtcgtactgccacttctctctaagctaaactgtacaaagttatatgttatagtaatacgcgccagtgcatatagaatatagaatgccatggcctgttaacaagtcgtatgtatgtatgtttttttttttttgattataccaataaaatattttaacaaactatatttcaaatggcatttgattttgcggtgtagtgatatcattaatttgtttccaagtttaagacatctttaagccgccttttaagctaccgatcataattgcatatatgattataattattaactagtttcaactgcgagctgtgcaatatcaacaaatagttaagctaattaaagagcacgcacaaaatatgatacgatccatacgccaaatgttgcacaaccatcaaaaagttgttaactgactttggcaaactgtttggctccattaaggatttggttgagctgagtgagctacttaagccgctattgaaatggccactttttgccgatattaacatatgtacattgctcggcgaactgccatttggttatatcacaagtggcacgaatattgaccactttcgtcacacgttggatgacagatgtcggcatgaatatatggaatatatgtacatatgagctggtgtccacatccttatcgggacatcgtgtttggtcagtgaacaaaaagcccgctccgaacgactcccgtgggcactgttgacttgccactgcaatggaatggctcacccagtttgcgtggtgctggtgtggggttgtgaacatgatgcaccgactgatccagatatccacgatgcgcaaataagacattaaattgatggtgttgatcgaacgcaaccagatccacattcaatcggcatccagttgggtcgatcgatgaatccgcacttcaacgcccagctaaactggtcagcaaattggcaattgctcgtttttggtagttataaaattggtataaaattgtat

SEQ ID NO: 40049 - DNA, 933 bp, DROSOPHILA
atggccagatatcagagtagccttagcctcggaatccttgtggtcctgctaatcgatcagctggccaacgcccagttcgttccgggcccaatctctggaccaattccccgccagcagagatcgctctttgggtccggtccgccgcccggttggagtagcggtggcctcagtcacggctggaatagtcccagctttgagtttagcccgctgccgccatcgcacagttcgcatgtgaccaaggacgagttgctggccctgctagccgcctggaaggatgtggccaagccgacgactccggcaccggagccagagcccgaggagcccgaacccgagccggaggccacaacgccagcgccgccagaggatgtggacgaaccggaaccggagcccgaggcaccggcaccggcaccggcaccagaggcgccagctggtccaccacccggcgttcccgtcaccgtctccctgcccgccctggtgcccattcaattggcggccatgtggcaacagccggcgctgggagcagcggccggcggactgggtcctctaaatctgggcggcctgggtctgggcggtggcattgcattgaacacgctcggcggcggtgcggtagcagccggaggagctatagcggccggaggcggtggagcggcggccgccggagcagcagcagcagcgtcacgttccggagtggcacgccctcgagcccgggccaggatcggaggacgtgcgtccaatgcccagcagcccgccatacgtttcccggtggccaatccgcgcagcttcacctcgaacaactatgtggcgcccaggccgcgttattatcgcgatacggagcccatgcgcgtcaacgtaatggcaccaccgccgccgtcgccctaccaaatggccaatatccagggtcccgttcagctggtgcccgcctactggcaatag

SEQ ID NO: 40050 - protein, 310 aa, DROSOPHILA
MARYQSSLSLGILVVLLIDQLANAQFVPGPISGPIPRQQRSLFGSGPPPGWSSGGLSHGWNSPSFEFSPLPPSHSSHVTKDELLALLAAWKDVAKPTTPAPEPEPEEPEPEPEATTPAPPEDVDEPEPEPEAPAPAPAPEAPAGPPPGVPVTVSLPALVPIQLAAMWQQPALGAAAGGLGPLNLGGLGLGGGIALNTLGGGAVAAGGAIAAGGGGAAAAGAAAAASRSGVARPRARARIGGRASNAQQPAIRFPVANPRSFTSNNYVAPRPRYYRDTEPMRVNVMAPPPPSPYQMANIQGPVQLVPAYWQ

SEQ ID NO: 40051 - DNA, 3717 bp, DROSOPHILA
atgctttcgaattgcattttggatttgacattaaatcgctccgcgcagcacagtaacaaaaataaacggaacaaaataaatacaaccagccgattctggccttctcacaattccgacttttgaattatcgaaacagaagcgctgcttgggccaactaagccaacttaactaaccgatcgcagagcgcaaagtgtcgtattttcactgtcgtcaattaacaacagcggcaacaagaacaacaaacgaaatgagcggctgggctacagttttttagtccgagcgcgatcgaacatgttggctgcctggcaacaagttcgatgcgaacttttctattgatctaagaaatcggcgttctatcgattgacgcgctgcgcaggcgcctatcgatttttgaaattctaagcccgccttaaaggatatttgtagaaaagtagcttgcaaagaaattaaattccttgaaataaaaaagaaatttagtactctcgttctatactcacttctattcacttgcggttagttagttagtttttaatgccacatttttatgatgatgactttttttcagctcatctatgcgcaatcaattttgcgccaagcgacagctgcacatagtttcttttgaccaagcaatcatttatcatataattttccaagtagtagtgccaagttcataactgatggagtgtgctgccaatttgcatgttgtggagccattcagtttcaaggtcgcgctaattaaatactcgttacaagtgatgccaaatgtataaatatttgaacagaacgtattaaattaatattatccactaagagcactattttaaattcttaaaaaccagatgcacgtcaaatagatgtacataaaaagtatatttacttacaaatatcatacacggacctgttttattcctcatcactggccattagttgataacatgtggacttctatgatatcctgctgcatttttgccgtttagtcaggatttagagcttgtacacaatgcgacagctgaaagggcgaaatcggtgcaatcgtgctgttcggcatctgaaagttcagggcaagatgtggttgaaaaatcttaaaagcggtttggaacaaattcgaggtgaatctatccaaatcgttagaatcccatgagtacgttcatcttaattaccttttacaatccagaaagccaggtgcggggaacgcgaaagaacttcctacacgatggctccttccatgaggcagttgctccagttctggcggtggcccagtgcttttgcctaatgcccgtgtgtggaatcagtgctccaacgtacaggggattaagcttcaatcggcgcagctggcgattctggtacagctccttgtacctctgctccacgtcggtggatctggccttcagcattcgccgtgtggcccacagtgtgctggatgtgcgcagtgtgggtgagattaaatgatgcttttcttcgcaacataccaattgcatatgttaattaccatttagagcccatcgtttttcacgttagcatcctgatcgcctcctggcagttcctgaacctggcccaactctggcctggattgatgcgccactgggcggcggtggagcgacggctaccgggctacacctgttgcctgcaacgtgctcgtcctgcccgtcgcctcaagttggtggccttcgtgctgctggtagtttcactgagttgggtcaccaaatttgtttgggtttggatttcgctgagtataaccgggcgtgcttttttttccagtggaacacctgctgagcatcatttcggtggtttactacgacttctgcccacgaagaagcgatcccgtggaatcctatttgcttggcgccagtgcccagttattcgaagtgttcccctactccaactggctggcttggctgggcaagatccagaatgtgctgctcaccttcggctggagttacatggacatattcctaatgatgctgggcatgggtctcagcgagatgttggccaggctgaaccgcagcctggagcagcaggtgcgacaggtgggctaactaactaactttcctaacacacatccatcatgatcgaggatggatatttatagcccatgccggaagcctattggacgtggtcacgcactctttatcgctccatagtagagctcatacgggaggtggatgacgccgtgtccggtataatgctgatatcgtttggcagcaatctgtacttcatctgcctgcagctcctcaagagcatcaagtgagttagttatgcagacgatggcacagcttgaaatgattctcttcctgctaatcagcaccatgccctcctccgcccacgccgtctacttttacttctcgctgctgttcctgctcagccgatcaacggccgtgctcctcttcgtttcggcgatcaacgaccaggccagggagccactgcgtctgctgcgccttgtcccgctcaaaggatatcatccggaggtcttccgcttcgccgccgaattggccagcgatcaggtggcgcttacggggctcaagttcttcaatgtcaccagaaagttgttcctggcggtgagatattccactctgagccctaatcttcgcatctccatgtctgctacatgcaaacatatcttttagatggcgggcacggtggccacttatgaactagtgctcattcagtttcacgaggataaaaagacctgggactgctcacccttcaatcttgattagacgcactaattggcatgtagataaatatatatcatacaatattataaatatcactcatacgccctgttgcccagtgaatattttgtatattttgtaactaggatcctatagatagtgcaaattaaccgactgcagttcacaatcagtgttggcacatttttcctgatggattatctcatatcactcatacgccgcgttgccatgcatattcatgagcaacagctgagtcctttgaataagttaattagtcgatttgcggttacacataatatgttatttacccgctattggcacagttaatggcaattaaaacactatgctacacagctgcgaggagtccatgcagtaaccagtttccatccatccatccatctgcccgctttttgcacgcgctttccacttttcacatcgactcggctcgcgttttcattttcatttgcggaccatttactttggtaatccagtataagtatgtgatgcaattgttggccataaatggcgcacgcttcctaggcacactgaaatgcgtgaacagcgattggattcgaactgaaccagttggccaaatgccaatgccgattgctcctcggctgtgcagctctgcagaggcagctcttgaggcgtccatgacgcttccggtcagcgggcccaggtccatgtccatgtccagccgtccgatctagtccggttgcagccaattgttaacccaattcacgaacggagttcggggatcagatcttcgatgggagtatataagctccgctatcgtttaacttcgcagacacaaatcgcgcacagcagctccagttaagtcataatggccagatatcagagtagccttagcctcggaatccttgtggtcctgctaatcgatcagctggccaacgcccagttcgttccgggcccaatctctggaccaattccccgccagcagagatcgctctttgggtccggtccgccgcccggttggagtagcggtggcctcagtcacggctggaat

SEQ ID NO: 40052 - DNA, 1335 bp, DROSOPHILA
atgcgacagctgaaagggcgaaatcggtgcaatcgtgctgttcggcatctgaaagttcagggcaagatgtggttgaaaaatcttaaaagcggtttggaacaaattcgagaaagccaggtgcggggaacgcgaaagaacttcctacacgatggctccttccatgaggcagttgctccagttctggcggtggcccagtgcttttgcctaatgcccgtgtgtggaatcagtgctccaacgtacaggggattaagcttcaatcggcgcagctggcgattctggtacagctccttgtacctctgctccacgtcggtggatctggccttcagcattcgccgtgtggcccacagtgtgctggatgtgcgcagtgtggagcccatcgtttttcacgttagcatcctgatcgcctcctggcagttcctgaacctggcccaactctggcctggattgatgcgccactgggcggcggtggagcgacggctaccgggctacacctgttgcctgcaacgtgctcgtcctgcccgtcgcctcaagttggtggccttcgtgctgctggtagtttcactgatggaacacctgctgagcatcatttcggtggtttactacgacttctgcccacgaagaagcgatcccgtggaatcctatttgcttggcgccagtgcccagttattcgaagtgttcccctactccaactggctggcttggctgggcaagatccagaatgtgctgctcaccttcggctggagttacatggacatattcctaatgatgctgggcatgggtctcagcgagatgttggccaggctgaaccgcagcctggagcagcaggtgcgacagcccatgccggaagcctattggacgtggtcacgcactctttatcgctccatagtagagctcatacgggaggtggatgacgccgtgtccggtataatgctgatatcgtttggcagcaatctgtacttcatctgcctgcagctcctcaagagcatcaacaccatgccctcctccgcccacgccgtctacttttacttctcgctgctgttcctgctcagccgatcaacggccgtgctcctcttcgtttcggcgatcaacgaccaggccagggagccactgcgtctgctgcgccttgtcccgctcaaaggatatcatccggaggtcttccgcttcgccgccgaattggccagcgatcaggtggcgcttacggggctcaagttcttcaatgtcaccagaaagttgttcctggcgatggcgggcacggtggccacttatgaactagtgctcattcagtttcacgaggataaaaagacctgggactgctcacccttcaatcttgattag

SEQ ID NO: 40053 - protein, 444 aa, DROSOPHILA
MRQLKGRNRCNRAVRHLKVQGKMWLKNLKSGLEQIRESQVRGTRKNFLHDGSFHEAVAPVLAVAQCFCLMPVCGISAPTYRGLSFNRRSWRFWYSSLYLCSTSVDLAFSIRRVAHSVLDVRSVEPIVFHVSILIASWQFLNLAQLWPGLMRHWAAVERRLPGYTCCLQRARPARRLKLVAFVLLVVSLMEHLLSIISVVYYDFCPRRSDPVESYLLGASAQLFEVFPYSNWLAWLGKIQNVLLTFGWSYMDIFLMMLGMGLSEMLARLNRSLEQQVRQPMPEAYWTWSRTLYRSIVELIREVDDAVSGIMLISFGSNLYFICLQLLKSINTMPSSAHAVYFYFSLLFLLSRSTAVLLFVSAINDQAREPLRLLRLVPLKGYHPEVFRFAAELASDQVALTGLKFFNVTRKLFLAMAGTVATYELVLIQFHEDKKTWDCSPFNLD

SEQ ID NO: 40054 - DNA, 3226 bp, DROSOPHILA
aaaactattggtcgtcatgggcatagcgtttcccatggcagaggttatatcaacctatatcccaccctctttctatgaggtgagctttataactatttgttatattatgactataacacattccattttccgtttaggtgtactatttgtacttgtacattggcagcatgatattcttgctcttcatgtacgccactttgatatggggtcgtcccaagttaccagttccgattggtaagtttcgaaaaagtactaaattaagtggattatttaatcgaaagcgtgtcctttgcacaccagcatcgccgagtaaatcggcaacgaaggcgagcggaacggacagcatggacgagtcggatacggatagcaactccgtgcaccatcgacttccgccgccgattcccgtgaggcgaccatcgctgctctcgccacttggacggcgggacgcacactacggcagcttctatctgcgcatgggtgcggtgggtaagtgtcctccttctgtactcctccaatcatttgtgcacattattctaattctttatgttgtcaattatagcctttggaattggcagcatgatctattcgggcttggaatttggccagtactttgagctcaatccggacaccaagtgtcacaacgtgctgctggccttgaccccggccacccggatggccttcatcttcatccagatgtacttcatcttcctgaacaacgagcagatcaaggtgtatcgctacaagatcatcgctcgtttcggtttaatgcacatgattggcacaaatctggccgtttggctgaatgtcctgatccaagagacaaagcacgagatattgacattctacaatccggagaatcgcacgctgaggatttcgcacaggataccgggacactctagaggtcatgccataatccagcacgatccgacggcccatctgcgagtgccgcgcggcttgaagggaccgtaccagatctttgagtgccggcgaacgaacatcatcggtacattggtccaggacgcctcgccatttctgttcccctgcaccatcgagtactcgctgatctgcgcggccattttgtacgtgatgtggcggagcatttccaggccgcagactccgacgccccagcgtccggatatgatcagttcgccgatgaagcgatcgccgcatcactattccgtcgactgtgcccgtgcccacaagggattgttcgtgggcatactcatcctggtgctgaccatcatatcgctgatcatcttctttgtgctaatctcacggccggaattcgtggccatggccgtaacggaggtgaccatttgcgagctgctcatctatggcacggccacgatagccactctggtgggaatgattcagatacgtcatttgcagtacgatgcctacaggagtttctcgctggatgatatcctactggtgggtgcgcagaccggttcgtttttgtacaacatctttacggtcatcgccgggcactttactctgcgcagcgatgacatgctggtgcccatcaatgccctggcctccattgtccagaccgcctgtcagaccatgttcattttggatgccagccggcggcaggccgtcagtccggaacatttgcgcaagaagcccggacgcgagatcgtcacatttatgctggtcgtcaatctggccatgtgggccatcagtacgctggagaaatcacgcgctgaatcgcatcccatacagctgaacttctacggtttgtgggcctggacgattatcacgcatgtgtcgatgccgctggccatattctatcgtttccattcgaccgtgtgcctgtgcgagatctggaagagggcctacaagctgaagcccacgtatatgtgagaattcgcccgctcgcgcatccagagcattgcgcagcagcagcaattctgcgaggatctcaagacgaacctgtcctactgctactgctccactacgctggctggcggcgagctggagaccgttgaggaggttgatagtggcgagagtaattcggctgaggatgccggtgccggtgctggatcgggaggatcaaggggatcgggcggaggagctggagccgccgaagctggagaggccggtgaagaagggcaacagggcggcgacagcagctgtggactgaaggcacccatccgggcactgtcgccgcaatccctcaatacggaaaaggccttctgtccggtttacgtgatcaacggcgaatgagtttacgcgcactttgagttcatcgacgcgatcagcggccatgagctcagctttgtctaggacttgcatctgctggacaccacaccataacaaacacaccaccattaccaatccacccaccaaaccaaaaccaaaaaaccatgcaactaggcacccatcttcgagaaccaccaccaagtaacaacatttgaccaagcggatgcaagcgttgagagccataaacatatcctagagagggaaaaaattagaaggacatgcgagtcctcaagcgggtctcaagcgatgggaaatcaagaagttaagcacaagcgatgataaaagaatgggttaatcttaggatccgcagcaaggataaatcaatgtggaaatcacaagcaatgccagtagggcgtatacgcaataaattcccaagcaattgtcactagtgcgtatacgcaatatcgtaaatggtttagcctcataacgttcactcactaccacaatgctccaaatcgcatttgctccaataatgagtattgaaacggaaagtcagttgataagcataaatatgctgattttagcattaaacaaaatattgtaggcgctttgaagggggccgcattttgggatctgtgtggtagcaagtgagcgcaatgagtatagtgttgtaggcaaaacacgtaacagtagatgaattcatgtttactacccccccttcacaatacagccgcaaaatctacgaaaatatcacgtttgataaatgttgaaaacggtcgcaatcaagaaagtgaaagtggacaacattttatatatttatatatagcaactgactgagcgctaggatcagcaaaacgggttgtgaaccaaccgaactacaaggtatgccgccaaactaacgatcaaccaaatagagagcagtataccaattatgcataaccgaacacagcgagttctatcaaagataaatatttacaatgataaaataatcggcgttccaaagcaaactggatatatgtatttc

SEQ ID NO: 40055 - DNA, 1932 bp, DROSOPHILA
atgggcatagcgtttcccatggcagaggttatatcaacctatatcccaccctctttctatgaggtgtactatttgtacttgtacattggcagcatgatattcttgctcttcatgtacgccactttgatatggggtcgtcccaagttaccagttccgattgcatcgccgagtaaatcggcaacgaaggcgagcggaacggacagcatggacgagtcggatacggatagcaactccgtgcaccatcgacttccgccgccgattcccgtgaggcgaccatcgctgctctcgccacttggacggcgggacgcacactacggcagcttctatctgcgcatgggtgcggtggcctttggaattggcagcatgatctattcgggcttggaatttggccagtactttgagctcaatccggacaccaagtgtcacaacgtgctgctggccttgaccccggccacccggatggccttcatcttcatccagatgtacttcatcttcctgaacaacgagcagatcaaggtgtatcgctacaagatcatcgctcgtttcggtttaatgcacatgattggcacaaatctggccgtttggctgaatgtcctgatccaagagacaaagcacgagatattgacattctacaatccggagaatcgcacgctgaggatttcgcacaggataccgggacactctagaggtcatgccataatccagcacgatccgacggcccatctgcgagtgccgcgcggcttgaagggaccgtaccagatctttgagtgccggcgaacgaacatcatcggtacattggtccaggacgcctcgccatttctgttcccctgcaccatcgagtactcgctgatctgcgcggccattttgtacgtgatgtggcggagcatttccaggccgcagactccgacgccccagcgtccggatatgatcagttcgccgatgaagcgatcgccgcatcactattccgtcgactgtgcccgtgcccacaagggattgttcgtgggcatactcatcctggtgctgaccatcatatcgctgatcatcttctttgtgctaatctcacggccggaattcgtggccatggccgtaacggaggtgaccatttgcgagctgctcatctatggcacggccacgatagccactctggtgggaatgattcagatacgtcatttgcagtacgatgcctacaggagtttctcgctggatgatatcctactggtgggtgcgcagaccggttcgtttttgtacaacatctttacggtcatcgccgggcactttactctgcgcagcgatgacatgctggtgcccatcaatgccctggcctccattgtccagaccgcctgtcagaccatgttcattttggatgccagccggcggcaggccgtcagtccggaacatttgcgcaagaagcccggacgcgagatcgtcacatttatgctggtcgtcaatctggccatgtgggccatcagtacgctggagaaatcacgcgctgaatcgcatcccatacagctgaacttctacggtttgtgggcctggacgattatcacgcatgtgtcgatgccgctggccatattctatcgtttccattcgaccagcattgcgcagcagcagcaattctgcgaggatctcaagacgaacctgtcctactgctactgctccactacgctggctggcggcgagctggagaccgttgaggaggttgatagtggcgagagtaattcggctgaggatgccggtgccggtgctggatcgggaggatcaaggggatcgggcggaggagctggagccgccgaagctggagaggccggtgaagaagggcaacagggcggcgacagcagctgtggactgaaggcacccatccgggcactgtcgccgcaatccctcaatacggaaaaggccttctgtccggtttacgtgatcaacggcgaatga

SEQ ID NO: 40056 - protein, 643 aa, DROSOPHILA
MGIAFPMAEVISTYIPPSFYEVYYLYLYIGSMIFLLFMYATLIWGRPKLPVPIASPSKSATKASGTDSMDESDTDSNSVHHRLPPPIPVRRPSLLSPLGRRDAHYGSFYLRMGAVAFGIGSMIYSGLEFGQYFELNPDTKCHNVLLALTPATRMAFIFIQMYFIFLNNEQIKVYRYKIIARFGLMHMIGTNLAVWLNVLIQETKHEILTFYNPENRTLRISHRIPGHSRGHAIIQHDPTAHLRVPRGLKGPYQIFECRRTNIIGTLVQDASPFLFPCTIEYSLICAAILYVMWRSISRPQTPTPQRPDMISSPMKRSPHHYSVDCARAHKGLFVGILILVLTIISLIIFFVLISRPEFVAMAVTEVTICELLIYGTATIATLVGMIQIRHLQYDAYRSFSLDDILLVGAQTGSFLYNIFTVIAGHFTLRSDDMLVPINALASIVQTACQTMFILDASRRQAVSPEHLRKKPGREIVTFMLVVNLAMWAISTLEKSRAESHPIQLNFYGLWAWTIITHVSMPLAIFYRFHSTSIAQQQQFCEDLKTNLSYCYCSTTLAGGELETVEEVDSGESNSAEDAGAGAGSGGSRGSGGGAGAAEAGEAGEEGQQGGDSSCGLKAPIRALSPQSLNTEKAFCPVYVINGE

SEQ ID NO: 40057 - DNA, 3177 bp, DROSOPHILA
tcccgatttgctggctagcttgcaactaaaaacaaaacaacaataatttacccttgaattgcccggaaagtcagatcaacaagtggattttccagaggcaaaaactggcacaatctttatgaccctccaatgccggcaaatccaatccgatacgatccaaagctaaagatgatgatgccgatggatgtgtgccaagcacattttgacagattgagtagcttctgcttctggtgtttctccagatttcacatatccaaatgaaaatcttgattcaaagtcacgagctataattttttgcttcgatcttttgccacacttttcgtttggctgcgggccagaaagctaaaaaattgccgatctgtattcgtattacaatatgtacatatatccaaaagcactaaatcggaaaaatcgggtggcagcaaatgcatgctgcacattgtagttgcaaattgtttatttttctttcggtttttcgtgcgtgcggaaaaacaaaatcagcgttcgtttcaaaataaactcataacatagtggtttttcgactccatttattagcatctttttctatagatttatatatgtacataacaattttggttattttctctgatttcagaacgaccaatttgcgcaaccaaaagtcttgagtattcaactgctgctgcaaaccgtatgactgatttttcaatttgatcaaagcctagcgattacctccctaagaactttataccagcttacaaatacgaacatatacacccggatatcccatttgcatatttgaatggcacggcaatagctccgattaccttggatttactatagtaaagcgctagcgaaagatttccaactcacgataccgtagatagtgtaatcacacagctggtcgaaagtatctacacatatataaatacaaatatatatacaatatatatctgatctgatctgatccgatagatagggaggaggatcgggagcgagcgtgctgagcgaggggaaaggaatgcagcggtgtccctacattcatgagatgcgcgaaagattactggaccagccgcgggagacacttcaactggagaacatggagcgggccaatttgctcgacaaccgccaatcggcatccgaatccaaccaggtcggcactgtggtcaaggtaggggccatcgatatactcgctacaaggattgccccactccatatacaatatataatgccatctgatcatctaaccaaatcgaaacacacacacagtttacacaaccaagccattgtttcacacgccaaattaacgaaataaccatatgtcatttaactctgatattcaaaaaacgatcatgcttacatttataaaattaacactatttcatacaaagatacattgcgaacatcactcatgaacataattgtatatacaatatatcgtaatggaaattaaccgaaagaagcttgtatattgcatatgaatataaatatccttgaatatccttttttctacgcagtgtgtgtgttgttgtgtgtgagacagattaatgacttctttttcaaaagatttttctccctagccaaagaattcgatacggatccgaaaacttaagtcatcaaaatccttgcacgagtaaccgattcgcccttttctttatgtttctcgaaatccaaatgaaaaacgaaacgagccaaaacatttatgagtaatatcatttgcaataaattggaattgttttaatctaaaatacaatatatatatatatttgttaatatcttattttcgaaacgcatgtgaatgaatctgagaggttaaatgccacagaaattgctttcaattcaaaaaatcttgaacttccagttgcaaagaaattaacttagaaactttgagtgaataacttttgatgtttgtgtggcaacctctagaattaacgttgtgtatatacttactaccttgtacattttgtattatatgaaattccaatttattgtcgtcaatcgagatgagtccttcgcctcgcaaactaatcgccaatgtgttttgtgatccactccaacagctgcagggcgatggctatcacacgagtcctgcccaccagcgtactccactagtgccgcacgatctcggcgaggacttcaatttggatttcgacgacgacttcccgatcgatgcgcgccgaccgaaaaatgccaagtaagtgtgttccatggctgctggcccatgtccttttttgccaaagtccatgtcctgttcaccgctctatgtgtttttgtgttccgtgttcttctgcattccatttcctgcgttactaagcttccgtttcacattccaacgttccaaaaaaaaaaaaaaacagtaaataaagcataaaatgtgccagagatagcaacccttgtggagatctctgcttctgcaattcgtattaacttttatgatctgtgatctgtgtcaagtcccacgtagaaccgtaaataccctttactcgcaattcgtgttcaatttaatcagttggcaaccgttacagcgacatacatccagcggttctcacgcgcccacagcaaaggtcagatttgctattaatcatttgtccaaaccccaaacttagtcgccaaagtccaaacacatatattgtatctgtatatcgaacaagtagtacccacataattcaatttctttcttctactaacccgcgaatgatactctagctagttcgctctgaaacttagttaatcttttctattacctgcattttgacttggcttcttatagcagtagtaactcctttacttaggccaactaaccacaagtacatatgctgtacaactcgaacactaaagaccatacgctaacaaccgaaaatctcattaggagccatagttttaggcaacttctcgggtttctgggaattatgcgacgtttgtactctggtgcgcacataaatccaaaactaagtactacatttatccgcttagggagtcgcaaagacacatgggccaaaaaaaaaaaaaaactcagcccaaatttcattcagctttttctttgtatctttatggctttgtctgcttctttctgtactattttttattttattttttatttttttaggcatccaggggattatagtgtcaatgaactggacgcaaggcacattgccttacatttccgatggtgtggcatcgtttatttttttttttttc

SEQ ID NO: 40058 - DNA, 288 bp, DROSOPHILA
atgcagcggtgtccctacattcatgagatgcgcgaaagattactggaccagccgcgggagacacttcaactggagaacatggagcgggccaatttgctcgacaaccgccaatcggcatccgaatccaaccaggtcggcactgtggtcaagctgcagggcgatggctatcacacgagtcctgcccaccagcgtactccactagtgccgcacgatctcggcgaggacttcaatttggatttcgacgacgacttcccgatcgatgcgcgccgaccgaaaaatgccaagtaa

SEQ ID NO: 40059 - protein, 95 aa, DROSOPHILA
MQRCPYIHEMRERLLDQPRETLQLENMERANLLDNRQSASESNQVGTVVKLQGDGYHTSPAHQRTPLVPHDLGEDFNLDFDDDFPIDARRPKNAK

SEQ ID NO: 40060 - DNA, 2179 bp, DROSOPHILA
atgacgatagtaaaatcagtagagacaggccgggcatcgtgggtaattgagttttgggctgttgcttttcgatgactgatggatggttgtgttggattctgttccgttcttcagttccccgtcagcccggctgatgcactctgcacattggcatgcccgctgattggcatttggcatgcccccactgaaaacttcaggcttttcccaaagtgacccatttacatcgcgtgtgcggccaaaacaatgggcctcagctttctgatgcaaaattcaattaaaagatacgttttgggacaggtctcaagaccgagatgagcaggagaataaaaatgaatggttcactttgaaaatgtagagaactagatttgcggtataataggcaaattttaaatttcaatgttttgataatataaaaattcaagtcaaaaatgaactaagtaaatggggcacattcgaggaatatataaacccaaatgtacaatactaacaaaagaacacaaaaaaaaaccaaatgcaggaaatcaaaaatgagttgagccaccagcttacattccaatcaaggccgaacaaagcccagtgaatgctggatgcaaatcgcatgaatgacaagcctctttgggggcaggacccccgacaggacccacaatgcgaatataacccagcaaaacggagagcaacaagagcaaacatcgcacatcaagtcgcgcagcgaaatgtgtcctactttctggcatactcaaaggatatacttcccctgcatcctatcgagagcatcctgcgagctacagaaagagtgaacgagggagagagagagagagcgagcgaaagcgagagagaaagcgcgaggcgattaaggagggagcactggcgaagaaagagacggggctacgcgaggagaaagagagagtgcgagagattcggcgcagattgagggcggctgctggccgaaaaggatgctggatttatcctgccagggcccgtttcagttgtagttggatagtaaagggtcttggacgtatcgagcgaatcgttcgccaggttcagctggagttctacggcttcgtgccctggtcgatcatccagcgcatcacactgccgctgtgcatcttccatcgattccacagcgccgtgacactcgccgagatctggaagaccacctacaaggcacgtctggagtaaggcgatgcctggatcccgatgtctatataggccgatgatgggtgggagttatgaaaatgcaccaaaaccaaaatgtagcgagccgagaacgcgaacggaaatcaagtgaagagttaggttctaattacgtactaaacatatatgcatactacatataatatatacattagtgcagatatgtacgagagcatattatgacgtttttttttttgtttgaggaaaccaaagcgaaacgaaatgagtaacgaaacgaacgaaacaatcggaccaatctgcgcgattaacaattaacgattgccaaccgataacgattgcaggtcgcttgttcatttccccccaccacaaaaacactttccttttttactttgttaactcgtggagaacttaagaaccttaagatctaagtcatagcgtttacagtttaacgaaaaacttagaaccaagaaccacggcacatgtttttaatctgatttacgtatttaatttagttttagtttagtttcgcctctaacacgctgcaatatcttgttactaaatcgaaactacaagttaatattaatttcataattgtttaaccattatccgcttcggcaaccgaaaccaaaacgaaatcgattaaaaaaattcacattacaaataagatggaaaatattctgaaaacacaaaacaaatggttgtttacttttcgcgtgtttttcgcgactgcgaatgaggggaaatccccgtgactatacactgaaacacaaaacagggacacacaatgatgcaatgccatgaagaacgcggccacaggaaacggaaatgaaacgaaacggtaacacagcccggaaacggaaacgaaattcgatctgatctgacttttccaccaatcgagaacaacaacaacaagaacaacagtaacagccgaacaacaacaaactgtgatgaattcatatgatttactggtataatttgcaattcgattacatttctgttcccgacttgatttaagcctttaagc

SEQ ID NO: 40061 - DNA, 2973 bp, DROSOPHILA
taaagggtcttggacgtatcgagcgaatcgttcgccagagttgccgcaatacataattacgaactgtgaagtgaaattgacggataatataaaaccgaaaaaatagtagaggtaaccggcgcgaaggaccaaacaatcctatcgcctatcgatagagaaatcggaaatcagatcgtcgacaaaaaagccagcacaacggagaccgaaacggaaacggaaacaatgggcggcggtgaagtgaaggtcgctaccgtcgacgtcgagggcggggacaatatggccaccttgccggtgtcccgctcgcataccgccggcagcaccgacagcgccgagaagaacaacgccgccaacaaggagatggaactcaagaacgtcatgccgcagccgctgcagaggacatcgctgttcatcgtgaccagtctggtgtacgcgatccttctgatcgtcgtgtgcattgcatacgttatcagcgatgtaaccacccaccgactgccggttttgtactacgagacattcttcacatatctatacggcgtcagcatactcttccttctctacgtcttctgtttcctgctgcaggagagctcttgctgcaatggcggcaatggtggcagcaaaccgaaaccccagcccaaggagaagaagtcgaagaaagccaaaaatgccgatccggccgattcgaaggatgcgaagggctctaaggactctggcaaggcagccaagggcgccgcatatcaggaagcacccgtggacgccgaggtggccgtcactccaaagaatgtgcgcaagcgcaagacaacccatagtgatctgacgcacggcagctttttcctgcgagtgggagccattgctttcggtttgggcgccatgatctatattggcctggagtttggatcgttctttgagatacccttcgattcgccgtgtcatcacatcctgatcggcgtaaatccgctgctccagatgatcttcaccttcatgcagatgtactttatattcatgaatgcccggctgaacatccatcgcttcaaggtgatcgctcgctttggcctgatgcatgtggtggccaccaacatttgcgtatggattcgcaccctggttaaggaatcgctgctggagatcacgatctatcatcagaagaacgagccagaggccggcgcctcgtccatagcccactcgattcgtcagcacgccctgcggcatgcgggcaccgtgctgcgcacccatgcgggacccaacagcgaattcgaggtgctcgacggcgaggacattctgcccaaggatgtgtacaagagcgacaatgtgctatccaagctggtgcgcaataccgtcgatggtatttcaaagagcctgggcatgggcggtgaccaggcgctagacagcagcaccaccagcagcagcaccacaacgaccacgcgagctccgttcaccacaccgaactaccaatggcacagcactactatggcccgcaagctgaagaagtttatcaccagcgccaccaccgcggccacaacggcggcgggcagcagcagcaccgccagcagtaccaccaccatttcaccgaccatcagtagcaccaccattccgtcgaccaccatcagtagcaccaccatctcatcgagcaccactttcagtccatttagcccctccaccaccaccaccaccaccaccaccgctgccgccctgaatctcgagaccagcggcagtgaatcgcccttcggcggcctgcagcgcatcctctctagcgctgcgccgccgagcctggcgccagtcgatgggttcggttccgcttccgctgccacgcccacatccggttccggcgccggctcatttgtagactccttcctggccagcacactaagcccggccagcagcaccgagggctcggccagcattatgaacaaccttttcggccagggacccatggagaatagcttccagacatacaccgatctgggccacgaggaggccaccggtctggtgagcttcgagaatctagagagtctggacaacatatacccggcggcgctgtcctccaatatcggcacactcaactccaccgcctgcggacgcatcgacataatgggcaccattgtctacgattcggcgccctacctctatccgttcatcatcgagtattcgctgatcggggcggtggtgttgtatgtcatgtggaagcacatcggccgctatccgggccggatgaacgacgaggatttggagcatcggctggaggtgatgttatcgcggcgggcggttgccatggcgcagcaggcgcgatccggacgcgtcgactgcgtcggctcgtcgaagggcctgttcttcgggctcctgctgctggtcggggccctcatctgcctgatactcttcttcgtcttggtgcgccatcagcagttctcgctgttggccatttacctcgccgacgccagccactgcatcctgatggcgttcgccattctggccattattgtgggattcatcagggtcaaaaacctgaagttccgctgcgaggagcagtccaatctgaacgacatcttgctgcgcatctcggccttcggcctgttcacctactccgtgttcagcattatcgccggtagcctgaaggtcctggagagcgagcccagcctgctggtcacgaccaccggtggtgtggccgtcttccaggtgatcctgcagctgctgttcatcgcggacgtgtcccgccgtcgcgtccacctgccggagcacgaccggagcaagccgggccgccagatcgtcacgttccttctcatctgcaacgtggccatgttcgccatctacacattcgaagctcaaaaagtattcgccaatcctgttcagctggagttctacggcttcgtgccctggtcgatcatccagcgcatcacactgccgctgtgcatcttccatcgattccacagcgccgtgacactcgccgagatctggaagaccacctacaaggcacgtctggagtaa

SEQ ID NO: 40062 - protein, 916 aa, DROSOPHILA
MGGGEVKVATVDVEGGDNMATLPVSRSHTAGSTDSAEKNNAANKEMELKNVMPQPLQRTSLFIVTSLVYAILLIVVCIAYVISDVTTHRLPVLYYETFFTYLYGVSILFLLYVFCFLLQESSCCNGGNGGSKPKPQPKEKKSKKAKNADPADSKDAKGSKDSGKAAKGAAYQEAPVDAEVAVTPKNVRKRKTTHSDLTHGSFFLRVGAIAFGLGAMIYIGLEFGSFFEIPFDSPCHHILIGVNPLLQMIFTFMQMYFIFMNARLNIHRFKVIARFGLMHVVATNICVWIRTLVKESLLEITIYHQKNEPEAGASSIAHSIRQHALRHAGTVLRTHAGPNSEFEVLDGEDILPKDVYKSDNVLSKLVRNTVDGISKSLGMGGDQALDSSTTSSSTTTTTRAPFTTPNYQWHSTTMARKLKKFITSATTAATTAAGSSSTASSTTTISPTISSTTIPSTTISSTTISSSTTFSPFSPSTTTTTTTTAAALNLETSGSESPFGGLQRILSSAAPPSLAPVDGFGSASAATPTSGSGAGSFVDSFLASTLSPASSTEGSASIMNNLFGQGPMENSFQTYTDLGHEEATGLVSFENLESLDNIYPAALSSNIGTLNSTACGRIDIMGTIVYDSAPYLYPFIIEYSLIGAVVLYVMWKHIGRYPGRMNDEDLEHRLEVMLSRRAVAMAQQARSGRVDCVGSSKGLFFGLLLLVGALICLILFFVLVRHQQFSLLAIYLADASHCILMAFAILAIIVGFIRVKNLKFRCEEQSNLNDILLRISAFGLFTYSVFSIIAGSLKVLESEPSLLVTTTGGVAVFQVILQLLFIADVSRRRVHLPEHDRSKPGRQIVTFLLICNVAMFAIYTFEAQKVFANPVQLEFYGFVPWSIIQRITLPLCIFHRFHSAVTLAEIWKTTYKARLE

SEQ ID NO: 40063 - DNA, 2240 bp, DROSOPHILA
ccgcccaccacagctgtctgcagtacatgctggagcacctgaagcggtgagtgtgactgccagcatggtcaatgcgatcttaagtaaaaaaaaaaaccttctgcccgcagggtggcctcccactacgccgttaacaagatgaacgagcacaatctggccaccgtatttgcgccgaccctgattgccacgccccagcacatgaccaacctgacggaggagatctttatgctctcctcgctcatcacccactgcaagactatattcgccacatcctgaggacgaggtcatcataccatgctgcccataccaagccaataactaactttatcatcaattagaggagcacggccaagcgaatcgcgtctgtgcccacctgtctctttcgaagcgaatccttaacttccaccaaaaaaaaaaactttagcctaagatcaaaatcgatgatttttatacaaacatttatatgaaaaaaaaaacaaatcaaccagtagaaaaaaacgaatttagcgatttttcgaaatatttttgcgctaattaaatatgcgtcacaataaaaaaaaggatatttattatacatatatacaaatacaaattcaaatacctatgtgtattaacttgacaaacttatttgctcgctcgttattttttttttttgctcgtttttttttcgctttttttttaacggggcaggcgtgtaattcgctgtagcacatttttcctaacgattagcaagcaccgagttttcctgtaagcgcaaggcactagccaaaatcactttcgtttcgagttcatagaggctagtcgaatttactgattgtgctcctgaatatttttcggaatattttttctgatttttgtgcgcgttctgttttttttttttgttttttgctttttgtgaaacaaaaagttacattgtgcgctgccccaaattgtttcgaacacaaagttgttgtgaattgaatttgttttgcggttttatttcgatttgatcaaagcgaaaatggcaaacgattcggatagaaacgatggccgggagaatggcaagaagaacaacaagaacaataagaagaacaacaagaagaagaacggaatgctgaagccgcttggtaagaagaccgagaagattgagaagaaaatgaaggagatcaagtgccacaaggcgcactttaacgaaatgaccgactgcttgcataagcttttgactccagtgacgcccagtagcatgaccaagaacacgtgagtcctccttgccgccattttaactctaaccttaaaaagtttttttttttttttttttggacattgacattaattcgtattggcatgactttcattttttttttttttttcgaaatcacgtagaaacgtcgagaatcccaataatctggaagaaatggacgacggtaatgctgctgactctgtcgtcgccatggacgagggccaagatgatgctgctactggtggagatggtgctgcagttccatgcgctggtgctgcaattggtcgtgattggaatgcagttgcaggtgttggtactggtgctggtactggaggagattgggttgcaggtgctgaagctgctactggaggagatggtgctgcagttgctgttgttggtgctgcaactgatggagatggtgctccatttgcaggtgctaatgctggtgaagatttggctgcagttgcaggtgctggtgctggtgctgctactggaggagatgatgctggagttgcacgtgctgttcctgctactgatggaaatggtgctccagatggtgttccagttgcaggagctgttcttgctactgatggaaatggtgctccagttgcaggtgctactgatggaaatggtgctccagttgcaggagctgttcctgctgctgatggaaatggtgctccagttgcaggtgctattgatggaaatggtgctccagttgcaggagctgttcctgctgctgatggaaatggtgctccagttgcaggtgcttttcctgctactgatggaaatggtgctccagttgcaggtgcttttcctgctactgatggaaatggtgctccagttgcaggtgcttttcctgatactgttggagatggtgctccagttgctgttgctggtgctgctactgatggtggtggtggcggtgaaggtcctagcacctcagctgctgctcctggtaacatccagctggatgtgcaaacttatacgcattccttgtcattcgtgcaacagcaggatggct

SEQ ID NO: 40064 - DNA, 240 bp, DROSOPHILA
atggcaaacgattcggatagaaacgatggccgggagaatggcaagaagaacaacaagaacaataagaagaacaacaagaagaagaacggaatgctgaagccgcttggtaagaagaccgagaagattgagaagaaaatgaaggagatcaagtgccacaaggcgcactttaacgaaatgaccgactgcttgcataagcttttgactccagtgacgcccagtagcatgaccaagaacacgtga

SEQ ID NO: 40065 - protein, 79 aa, DROSOPHILA
MANDSDRNDGRENGKKNNKNNKKNNKKKNGMLKPLGKKTEKIEKKMKEIKCHKAHFNEMTDCLHKLLTPVTPSSMTKNT

SEQ ID NO: 40066 - DNA, 4324 bp, DROSOPHILA
caaaaaaaaaaactttagcctaagatcaaaatcgatgatttttatacaaacatttatatgaaaaaaaaaacaaatcaaccagtagaaaaaaacgaatttagcgatttttcgaaatatttttgcgctaattaaatatgcgtcacaataaaaaaaaggatatttattatacatatatacaaatacaaattcaaatacctatgtgtattaacttgacaaacttatttgctcgctcgttattttttttttttgctcgtttttttttcgctttttttttaacggggcaggcgtgtaattcgctgtagcacatttttcctaacgattagcaagcaccgagttttcctgtaagcgcaaggcactagccaaaatcactttcgtttcgagttcatagaggctagtcgaatttactgattgtgctcctgaatatttttcggaatattttttctgatttttgtgcgcgttctgttttttttttttgttttttgctttttgtgaaacaaaaagttacattgtgcgctgccccaaattgtttcgaacacaaagttgttgtgaattgaatttgttttgcggttttatttcgatttgatcaaagcgaaaatggcaaacgattcggatagaaacgatggccgggagaatggcaagaagaacaacaagaacaataagaagaacaacaagaagaagaacggaatgctgaagccgcttggtaagaagaccgagaagattgagaagaaaatgaaggagatcaagtgccacaaggcgcactttaacgaaatgaccgactgcttgcataagcttttgactccagtgacgcccagtagcatgaccaagaacacgtgagtcctccttgccgccattttaactctaaccttaaaaagtttttttttttttttttttggacattgacattaattcgtattggcatgactttcattttttttttttttttcgaaatcacgtagaaacgtcgagaatcccaataatctggaagaaatggacgacggtaatgctgctgactctgtcgtcgccatggacgagggccaagatgatgctgctactggtggagatggtgctgcagttccatgcgctggtgctgcaattggtcgtgattggaatgcagttgcaggtgttggtactggtgctggtactggaggagattgggttgcaggtgctgaagctgctactggaggagatggtgctgcagttgctgttgttggtgctgcaactgatggagatggtgctccatttgcaggtgctaatgctggtgaagatttggctgcagttgcaggtgctggtgctggtgctgctactggaggagatgatgctggagttgcacgtgctgttcctgctactgatggaaatggtgctccagatggtgttccagttgcaggagctgttcttgctactgatggaaatggtgctccagttgcaggtgctactgatggaaatggtgctccagttgcaggagctgttcctgctgctgatggaaatggtgctccagttgcaggtgctattgatggaaatggtgctccagttgcaggagctgttcctgctgctgatggaaatggtgctccagttgcaggtgcttttcctgctactgatggaaatggtgctccagttgcaggtgcttttcctgctactgatggaaatggtgctccagttgcaggtgcttttcctgatactgttggagatggtgctccagttgctgttgctggtgctgctactgatggtggtggtggcggtgaaggtcctagcacctcagctgctgctcctggtaacatccagctggatgtgcaaacttatacgcattccttgtcattcgtgcaacagcaggatggctcgcacgaggtgtacacctcttgcgacctggttaccgatgaggaacagatggcgcccatgcgcgagatacgcgtcgaggatggcgaacttgtgattttagccggcgatgatggggtgtaccatcgtcccgatgacgctgtgattctcgaggccgaggatgatcgtatctacgttgtcggtgctttggagcgtaatgttagatacgtccacgccgaggtcgttcaagaggggaacgaggatatggcccaggacccaccggtcgaggattaggaggattagcgtgtgaacggagagcgtcaagccgaactgccaaatgtgctaaatatatgaaatgttcattcctattaattaattaaataaatattctcaattttattattatttttattgttatttattatttatagtatctagtactcagtatattgagaaagaaatatttatatacatagcaatccttgactttcacgttctccagatctcaagcagctgaaattctcatttcggattcccatttcggaatcatcgtacaatgctccagaatttcgcgtttgagaatcaccccacaatcggattcttttccaagcaatcggagctaatgagaatgctgcccgagattcccaagctgcgcaacatcttcgatctgttcgtggtcaatgaatgtgaccaggcggctggcggagaagatgtggcgggtaagtgatcccggctctagcatccaccgtccacctaatgtgtgccaccatttgttaagccccaacatgcttggatcttggcatcgggatacggatgacggatgtggcggactgcctgcgcatcatgggcctgaatcccagtgacgacgagctgcagcagcgactggaggagcatgtgcgtcgacgcgagtcgttgggcatgggaatgaagaagatcgcacagcgcgccacctttgagctggtgctcacgctgtactgccagctggcggagcaggaggtgaaggagatggccaagggatgcatcgtcgagaatgtgctgcgcgtgttgcgtagccgcgattccgcgggcactggcatgttgccctacagtcagctgcgccatttgctgaccaccatgggcaatcgattggacgagacggaggtctacggcgtgctccatcgcgctgcggacattaatggcaatgtcctctacgagcacctagtacaccagctgttcgccacggatccgctggccgaggagcggctgcaacaggcgcagctttacctgcaggccgtcggacgcaatgccatcgacatggacatggataagcgggacgagttcatcgatgccatccggcgggcggatcccgcgcgctccggtttcattgagccgcagcgcctgctcgagctgctcaatcgcaatggggagcagttcaccggcgaggagctgcagctgctcatccagggaatggaggatacacggtgcaagcggggcatcaactattgtcgcttcctggagttcattatgaacgagtagtggctccagtggtgagatcccttccaatgaattcgccatcgcttattaaatttactgtgaaatcttgcatttaaattactttaaataaaacggtgtttttttcgagcgacagagtggcagcactgtctgttctatttttagggtgccctctatgttacgttacagccatttgcactgctttactttcatgttttctacataaatgtaagtcaaatgtagaatgttagtgtatttcacctgtagaatacgtttgaactgtttaccttacaacgtataatacatggagtatcttacttacttacttacttttacacttacatcttacactacatgactttgcattacatcatgtcaactactactatgtcaactacttgacatcatgtaaaaacaagtgatttacatgtaatttacacgttagattgttttgacgtgagaaataaaatttaaaaagagaaattaaaattttatttcatctgtgatatattttttcgtcattaataatctgaagccgctgataaagaaagattttattgaaaataagacgaaaaaacttttttattttttatatatcatccattttatttcatctaactttcatatatatataagtgtgtgtattgtatgtggatttcttttgtttttttcttttctaagtaattacacaatttgcagttacctatgtatctttgttcttgtctcgaaaagttcgaaactgaagtaaaaaaaaatttagacgaaaatcatagcagaggcagtggactggtttttgtttttttttcgatcgtgaaatatattggattgattaaatttgaatttggtatgtacatttttacaggacgtaagacataggatacaaaaaaaaaaaaaaaaaattcactaaatttaattcgcaaaaaaaatggtcttaaagtataaaaagccttgtttcgaatggacaactaaattaaatcacatttagcatattttaaaaatttcgcaaatcgttgcatctcatttt

SEQ ID NO: 40067 - DNA, 1923 bp, DROSOPHILA
atgctgctgactctgtcgtcgccatggacgagggccaagatgatgctgctactggtggagatggtgctgcagttccatgcgctggtgctgcaattggtcgtgattggaatgcagttgcaggtgttggtactggtgctggtactggaggagattgggttgcaggtgctgaagctgctactggaggagatggtgctgcagttgctgttgttggtgctgcaactgatggagatggtgctccatttgcaggtgctaatgctggtgaagatttggctgcagttgcaggtgctggtgctggtgctgctactggaggagatgatgctggagttgcacgtgctgttcctgctactgatggaaatggtgctccagatggtgttccagttgcaggagctgttcttgctactgatggaaatggtgctccagttgcaggtgctactgatggaaatggtgctccagttgcaggagctgttcctgctgctgatggaaatggtgctccagttgcaggtgctattgatggaaatggtgctccagttgcaggagctgttcctgctgctgatggaaatggtgctccagttgcaggtgcttttcctgctactgatggaaatggtgctccagttgcaggtgcttttcctgctactgatggaaatggtgctccagttgcaggtgcttttcctgatactgttggagatggtgctccagttgctgttgctggtgctgctactgatggtggtggtggcggtgaaggtcctagcacctcagctgctgctcctggatggctcgcacgaggtgtacacctcttgcgacctggttaccgatgaggaacagatggcgcccatgcgcgagatacgcgtcgaggatggcgaacttgtgattttagccggcgatgatggggtgtaccatcgtcccgatgacgctgtgattctcgaggccgaggatgatcgtatctacgttgtcggtgctttggagcgtaatgttagatacgtccacgccgaggtcgttcaagaggggaacgaggatatggcccaggacccaccgaatttcgcgtttgagaatcaccccacaatcggattcttttccaagcaatcggagctaatgagaatgctgcccgagattcccaagctgcgcaacatcttcgatctgttcgtggtcaatgaatgtgaccaggcggctggcggagaagatgtggcggccccaacatgcttggatcttggcatcgggatacggatgacggatgtggcggactgcctgcgcatcatgggcctgaatcccagtgacgacgagctgcagcagcgactggaggagcatgtgcgtcgacgcgagtcgttgggcatgggaatgaagaagatcgcacagcgcgccacctttgagctggtgctcacgctgtactgccagctggcggagcaggaggtgaaggagatggccaagggatgcatcgtcgagaatgtgctgcgcgtgttgcgtagccgcgattccgcgggcactggcatgttgccctacagtcagctgcgccatttgctgaccaccatgggcaatcgattggacgagacggaggtctacggcgtgctccatcgcgctgcggacattaatggcaatgtcctctacgagcacctagtacaccagctgttcgccacggatccgctggccgaggagcggctgcaacaggcgcagctttacctgcaggccgtcggacgcaatgccatcgacatggacatggataagcgggacgagttcatcgatgccatccggcgggcggatcccgcgcgctccggtttcattgagccgcagcgcctgctcgagctgctcaatcgcaatggggagcagttcaccggcgaggagctgcagctgctcatccagggaatggaggatacacggtgcaagcggggcatcaactattgtcgcttcctggagttcattatgaacgagtag

SEQ ID NO: 40068 - protein, 640 aa, DROSOPHILA
MLLTLSSPWTRAKMMLLLVEMVLQFHALVLQLVVIGMQLQVLVLVLVLEEIGLQVLKLLLEEMVLQLLLLVLQLMEMVLHLQVLMLVKIWLQLQVLVLVLLLEEMMLELHVLFLLLMEMVLQMVFQLQELFLLLMEMVLQLQVLLMEMVLQLQELFLLLMEMVLQLQVLLMEMVLQLQELFLLLMEMVLQLQVLFLLLMEMVLQLQVLFLLLMEMVLQLQVLFLILLEMVLQLLLLVLLLMVVVAVKVLAPQLLLLDGSHEVYTSCDLVTDEEQMAPMREIRVEDGELVILAGDDGVYHRPDDAVILEAEDDRIYVVGALERNVRYVHAEVVQEGNEDMAQDPPNFAFENHPTIGFFSKQSELMRMLPEIPKLRNIFDLFVVNECDQAAGGEDVAAPTCLDLGIGIRMTDVADCLRIMGLNPSDDELQQRLEEHVRRRESLGMGMKKIAQRATFELVLTLYCQLAEQEVKEMAKGCIVENVLRVLRSRDSAGTGMLPYSQLRHLLTTMGNRLDETEVYGVLHRAADINGNVLYEHLVHQLFATDPLAEERLQQAQLYLQAVGRNAIDMDMDKRDEFIDAIRRADPARSGFIEPQRLLELLNRNGEQFTGEELQLLIQGMEDTRCKRGINYCRFLEFIMNE

SEQ ID NO: 40069 - DNA, 2597 bp, DROSOPHILA
aaatagttgttttcttgcgcctttttttgcgccaccccagccctgttgaccatgccctctcccactcttgcgctctctggctctctttcactcacacaaaatgggcgccgcacactgtggcaatcgggcaccaatacaacggcaagcagcgcaccaacactaatgcgtttcggtccgaactggaagttcgcgggaaaactggaaggttacgcgtgtgcgagaagagcacggctagatggtgcttggaaggcgcttgctgctctcctcactctaacggcgaatggatgtcgcacatgcgccatgttgccgaggggaaggcccatatgctgctgactccctcgcactcgctgagcggcgaagagtgcggctagcgtgcgacagagaccgcccctgaatatttaccgttgccgggcagcgcagtcgacgcgagcgtcgctgtcggcgcgctgcttttgccgccgttgccgccgttactgctgttgctgctgctgttggtgttgctgctgctgctgcaaatgttgctgctgcgcttgccatgcgatttgaggtcctcggaagagcaaagctccgctggccgtttaccgtttgttagctgaatgcctccttggccaaatccaaagcgaaatgcaaagccaagtcgaaagccaaccaccagcagcaacataacggcagcaacagcacgacagcaacagcaacagcaaacagaaacagcaactgcgacgacaaaactcctggtgcacattaacgcaggcaacagtttaacgtggaaattattgcgaatttgttgtgtgtttttctgcgacgcgtgccagcgcaaaatctcaaaacctccattcgcaaatcccatttcgcgtagtctttacaacattgcaaaacttgcctttgctttgtttttttttttgttttctgggtttctcaattgggactgcatgatgttttcaagcgatttgttttgacaacggcaatatctagacgtaaatcgaaatattagcaatcgaaaatgccgcagcgttcgccatttgccattcaggagctgctgggcttggcggtggcggcggccacagaagcgccaaccgatctgacgacaactgccggtgcaacggtggcaaaagagcgccaaacgccaacgccgccaaagacaacaaatgccacaatggcaacagcagcaacatcagcagctacggcagcaacaccaacaaatgcggccgaaggcaatttaacgagcgtttcggagccacagcagcagccgcagcagcagcaacaagagcagcagcaccaccagccgcaccaccatcagtacagggagcaccaccaaatgaccatggcggccgcctcgcgaatggcctacttcaatgcccatgcggcggtggcagcggcctttatgccccaccaactggccgcggcggtgcaccatcatcatcagcatcagcaccagcaccatccacaccaccacccgcaccacccacacggagccgttggcgggccaccgccgccgccgccgatgcagcaccaccacccccaccatccgcaccacccgctgctgcacgcgcagggtaagccaatgtccccgccagcgaaccactcaaattgcagttaattgcagttagtaaaacacagatatatatatttttttcatttatgcatatactgaacatgggaaagttgaaaagtgccgtagctaacttacatatatttcgctatagcgattttaaaaatcttttgttcgatgtatttacactgacaatcaaagcttaaacgcaattagcaatcgcaactggttttgtcacctgccagacacaccaacacaggcgcacatatacacatgctcagatacatttacagattcagattcagatacagatacattcgattcacacgcacacgcacacacagtggggcgaatcggtgtctggagtgccgcttagttagcataaaaaaggaattaatcagcggtccatcgtccgccaaatcagctttggccccactgcaaacgacacaacgcccgcatccgcaccaccgctccaccgatccggcaatccggcaatccgcctccgaagccactccaatccaaagcaccaccactcaagttgagctgctaattgcactgtgtgtggatgtgtgtgtgtgagtgtttgtgtgtgtgttgcactctggtttgagcatagcaaaaactgggcttcacaattgttgcaatagtttgggcacactaacgacaatagttagttttcatattgtttaaataaaattctagaatcagtggaaatccgaatcaatttataataagcttggtatgcttttcgagtaggtttttggtcgcttttgtgccactgtaggtgcgcctttgtttggcgatcagcacaggcaatgaaacacgcacactgcaagaaaatcccacacactaacagtgaactcgagtcgacctgctgtctctctcgattcaaagctcatttgcaagtggcaatatcatacgaagttggagcgatgacagtgaaggcagataaacagaaaggcatgaaaagccgtgcagggattggatacacggtaaaaaactaggaactagttgctggctgccagaagtaagcagttgattaacaaca

SEQ ID NO: 40070 - DNA, 597 bp, DROSOPHILA
atgccgcagcgttcgccatttgccattcaggagctgctgggcttggcggtggcggcggccacagaagcgccaaccgatctgacgacaactgccggtgcaacggtggcaaaagagcgccaaacgccaacgccgccaaagacaacaaatgccacaatggcaacagcagcaacatcagcagctacggcagcaacaccaacaaatgcggccgaaggcaatttaacgagcgtttcggagccacagcagcagccgcagcagcagcaacaagagcagcagcaccaccagccgcaccaccatcagtacagggagcaccaccaaatgaccatggcggccgcctcgcgaatggcctacttcaatgcccatgcggcggtggcagcggcctttatgccccaccaactggccgcggcggtgcaccatcatcatcagcatcagcaccagcaccatccacaccaccacccgcaccacccacacggagccgttggcgggccaccgccgccgccgccgatgcagcaccaccacccccaccatccgcaccacccgctgctgcacgcgcagggtaagccaatgtccccgccagcgaaccactcaaattgcagttaa

SEQ ID NO: 40071 - protein, 198 aa, DROSOPHILA
MPQRSPFAIQELLGLAVAAATEAPTDLTTTAGATVAKERQTPTPPKTTNATMATAATSAATAATPTNAAEGNLTSVSEPQQQPQQQQQEQQHHQPHHHQYREHHQMTMAAASRMAYFNAHAAVAAAFMPHQLAAAVHHHHQHQHQHHPHHHPHHPHGAVGGPPPPPPMQHHHPHHPHHPLLHAQGKPMSPPANHSNCS

SEQ ID NO: 40072 - DNA, 17736 bp, DROSOPHILA
acagtctgcttctacttcattcttcatatcgaatttcaatgcgaaatgtttttttccctgcttttttttttgtttttcttctcatttcgctggctggcacgaatgcgccgctggtcgtgtgtgttttgttttccatacttttccgtactttccaaactgcggagtggtccagaccactcgatcatcgaccgagacactgtgcatttatgttttccgggtgcttcgcgctccaagttcgatttggccgaaaacaaggctgcttggcagccctcgaagcactcggtttctcaatccgccaagtggcttcgatccgcagactttggctcatcttcagtccccagactgcatcagcatcctcaactcagcggcaggtcgctcaactttgtgcggtgcacacaatgatatgtgcattataaaatcgatgattatacatttgtttttttaccgcttgctaaatacagaatacaattcggatatttaactgtggtatttgaatacaccactttttccactgtgcaaaaactgcagtgccactgccactcatcgaaaactcaaatcgcgcctgtcaacggctgtcagctccttccttcgatccgaatccgaatccgaatagggatccccaagcagtgtcagtgtcctccttcgacgctttcacttttcatcccgctcttcgcagccatctcaagtgggattttccttggaacaaaagatgatgtgtgtgtgacaagcccccaaaaaaagagaaaaaacaacaaaaaaccagcagataagcagcagacaagtgggaaactagatacaattattaaatattaaaataacaaaccactaaaaccacttcaagtcgcgcttcagcgccacatgttttccggcatcgggtcgtgggattgtcgtcaactaatttgacaagaatatattaagattttccaaaaataaaacgaagcgcagattgaaagcaattgttgttgggaaaagtgaaaaaaaaaacgaattcttattgcaggatcgctggcgcccaaggacttcggcatggagagcttgaatggcttcggtgtgggaccgaatagcaaaaagaagaaaaagaagcgacgacacagccgcaccatattcaccagctaccaactggagaaactggaggaggccttcaaggaagcccattatcccgatgtctatgcccgcgaaatgctctcgctgaagacagagctgcccgaggatcgcatacaggtgagtcagcatcggcaggtaatccgatatgcgggcattgtctcgcgtccgataatacagtcctttcactccacaccatgctcgcattattcccctaatgaattaacaaactaattacatccgccgcgtaggtgtttgctgttggcaaaacagaaaggcggccaagcaatttgcatttccttttgtcttttcaaaatacgcttcattctcatacgcttgtttggatgtcttcggcctgatttttcacacctccttcagtttctgtgtgtgcagcgtcatcacggcaatcaggcagtaggggaaatctcaagtgcagctccttcgacgtgaattcttcacttcattactctacatataaccaagggtagagttggcctgcttcaaagcttcaatgtatgccacttggctatatgattatcgatcgatcttgctgtacactcaagtaaaatcgatagcatttcgataatttcgatagtttgcattatgttgtttaacagttaagtgtaaggctagtaacattgtcatatgtgcatataggtagaagtgtgtgcacagctttgcgaacaacgcaaaatccggaaatcatttaacgtccgtttcacgctgggcaagcgagatggcgattgggtgtgagggagacaactggcagcgtggtgtggtgaaaaaaacgtagaaattttcagcaacgtttgcgaatttataattaagcattttaatggccgttattgttctaagtccctagcctgcgcgagcgtgcgagcgagacgggcacactgtctgtatgtgtgcgtgcatcgagtgagcttcagttgtgccaaattgccacccttaaaaggcaaaccccaaaagtgctgcgagtgtatgcgtgtgcttgtgtgtgtttaattagcacagaaaaaaaaagagtaattatggcgcgatttcttggcgaatttgcccttttttaaccactcacctcgctcactcaattgctttaagttcgggatcgtcgaacggatgggttggaaatcggttttttttttcacggcatttcgccgaattgctaatggcagactcttctgggttccgggccattaaatattagcgaaaagctatcgtcgttctggcttcacagaaaacaagtgtaatttaagggcagaaagtgttaaaagtgaatgaaaatttaaaaaaaaagtaacctagaatccccctattggcgacatctaaattaaatcgttctaataatagagagtgtgcaaacgaaattattatgatcgctgccaattaaaatatatagctggcacgtaattaacccactgatgcccccgtcccattatccgcatatcgattggcatttcaacatttcaactggcatgctgcatgctgctgttgaaattgatgttcgagtgtgtaaaattttccaattatagactttcgagaaggacacccacaccaacacgcaaactaaaactgtgcatgtatgtattgtatgtatgtatgtatatatgtggagcactttgaaggagcttcggctttgggattgggattgggattgggtcctcgggatcgagattgcttgggggcacatgaagcgttgctaaaagcgagtccaattagtagcattactactaacacttcaattctggccactggagccacgccccccaccccccttgccttctctggccacaccactttggggttttccgtctctctccaacttggcaataacggcaatagtcaacaagaacaacaaggagtcaggagcgaaggacaactggagtgaagcaatggcgccaaagcacggccattttgtgtgcacagctgtgtgttggtggggaaaatgggtggaaaatccaaggagagaggcggcatgtttcgggaaaggggggggggggacccagcagggggtgcgggagccacgctagttgtacaccagtttgtggcaggagtggcaggagcgtaaatttgcatttaacgttgtttgcggtgcccacaaatggagtctatccttgtctgtgcctctcactctctccaaccacaccatacccattcacagtgtgtgtgcgtgtgtgagtgtgtttgtgtgcgtgtgtgcagggggcaaggactcaacagttaggcggccaaaaaatactgggtaagaccgaaacaaccgcaaaacgatgcacaagtgtacaagaatgatgggcgaagtcactcacacagagagaaaatatgtaattttctaacaaaaaagttaggaaatcaacatcaaaagtatgaagtgaaaagggaaactatctgtcgaattaaaaacttacttatctcctggtatttttccagtgcaacgaactcacacagacagtgtcattgaaactaacagcactatttgaaccgaaaaagctttagaattttactctagcgtgatgacagcagcggcgcccgaaaaaccaacatcacatacataaacaaacataaacctacatccttacaagcgcacaacccacacatatgaagctgctatctttcacacacgcaagcacgcacacacacacacacacacacacacaagcaaagttggctcgtcgaatgcgttgcatattttcaggcacttaagctattttcatgaagtgcacacacacacacacacacagacacaggcacacatgcagattaccctgacagcagaaccacgcccacttctgcgccccttaaccccacaatgcccaccttaaccctgcccgacgtaaaaggaaactacggctacaagtacacactccgtattgattttaattgaaaaattgttaattttccatgccagtagcagcagctacgactgccacgcccacccctattccaccgcccactttttccacgctttccccccgcctctgccgacctcgccccgaactttgcctcaactttttctcgctcgtagcaaagagagacgaacttgaagtgaactttttgtgctgccaattttcgaggtgtgtgtgtgtgtgcgtaagtgtttggccttgtgttagtgagtgtcggagtgtgtgccggtatgcatgtgtgtgtgtgtgtgtgtgtgtgcattgctgattctgctgtgttttgtgtctgggtaattacacgtttctgtgtgaataaatttccaaccccgcaagaatttcgacgcagaattatacattcgctttttgagttgactttgaaagcccttgatgggtttttgccgccttattggaacgaaccagctgacggatttcagatcaagcaactatatataattggcagcaaattctagcctcgatttttctccaagtgttcggttgaaagaccgcttagtgtgggccgtcttggaagttctacgaaactaatttactgaagtgtcgacgcttccaagtgaagaatgtctgaatagagagggccgccgaatagaaatggatgcgaatgcgtgtcgggtcccaagcttgtggattgtggagtcattggagtagccacagtcctccgtttggcacacacacacagacgaaatcgaccaggcttgcagcctgggaacccgaaaaagtggggcccaaagtgctggcaactcggcagacttgtggcagacaggtcgactggccgttgctgccacttgacgcaatacagtccgcgttgccggcaatcgagatgcccagccagatctggcgaaagatcaccaaaagtagccaaatcagcagcaacatctacagcaaatgtatatcaataaaaagtattggttctttaatagctaaacttaaatttcttagatttttgtgaaaccacatatgtgctgaaataagttgcagaaaccttttaatatattatagaattagaaaatcctaaactggcgttaaaaatctaacccggcatctctgattacctacctcagctctcgttttggctgcattcttcgttcttcattcttcagtcgcccgtctctccaatcttcgcaggggattcgcgcctctttctcatgatcttcattttgttgactctgtgccgagtaccaattcgtttaaaatggtatcagttccaagaaaaatattattttttcataatttctggagtgccttaatctgttgcctgcagttcgatgtgcataatcacgacgatcggccgagtatacccagttctcgattctttggatactgaatactggtctggattggtttggctgtcttgagtgaaaacaggcggtctggagatgagttggtgagttggtgcattgaatcgtggattgcgatgcccgtggcccctttaacccctcgacgatcggcggggtgttgacgtgccccgccgcacaaaatgaaacgtcaatttcaagagtttttcctggtaataattagtagctgaggtgggcatttaaatactcgtcgtctaccattttttttttttttttctccagcgattctcgcggtcccccagaccattggcatattccgcgtatttgtgtacaaaaatactcgcccagcagccgaataataatgcatataattgcattttaagtagttgctgcctggagtattgtgttaccttcgagctcatgtcaaccctgacatcgtgtgtgcgtatgcctggtatatattttttttatattatttcttctttatttcttggggccctcgaaagggaggaggggtgagtggattttaattttccacactcgaggtttccaggaaaatgcaacggaaacgcagccagcaagtgggtggcgaaggcagcgaaagagtgacctattaaaggggtttttgctgcttggcattaaatattcatatttgtgtaattagtaagtgtgcgcgcgccaatcaattacttcgcatacaatgccagcaaacaattgataaacggctggtaatcccaggataacggcacagggtttgtgtgtgtccttctaagggtttgtattttttctttggtttgctgtttgctgggctgctgaacatcattgcccacacccttgccctaaagtcaatggcaacaatgtgccattgtggttagtccgaagtttctggcgaatgcccggattcccttgggagaggaccaacatttccggggtgagtcctgaaatcctgaaagcaagtgcgtagcaagttcccgcgattttggatggacaacggatgatgatgctgcgatgacacgtgtaagtgcagccacattgtcgcaattacacttatttctgtgtcgactggtgcggggtccttttgcattgtttgttgtttattccggacgctgccgcccatccatcgaacaccacccatggcgcgaaaacgtgaccttcgccggttttcccacttcaacggcggatggtaatgattcgtcttgcacgcacacaccattaccatcaccattaccatcatcctgattaccattaccatacgcattatagatatcatcgaacttattagtgcgaaatgagcacgctgctcgctcacttgtccagcctacgaaaaagccctgattttccaacccattcaaccggtactgctcactggatcttctaattggcccttctgccaactaattggttaactaattttctagtttacgcaagtacatatatgaatggtaaggtatttatgataaaactatataagttgtagttcctccaaagtgaaacaaattgatcaattgaatcaccaacttaaacggttgcaagataattgaaacacctcttcgcatcaactgcccaactggagccaaatcaaaactcatccaacaattaggcgcagtccaatgattttctggagctgtcatcgaccgaagtagaccagttggatcccataaaaaaaaaaccataacaacaccaatccaatccaaatccaaatccaaataaaaatccaaggaagagggcaatctgttggagctctcgatcgcctcgattgaatgaggcctattatcgcgttttgaaaggcgtaattatcgcatgacaattcaaacggaatgtgttaactcgcatttgtatttactcaataaacattatcgtcgatcgtccagattgggcaaccagtctaatttccagctcccacacataaaactcgttattacagtccgattggactcatcgaaaagtatatatgtacatacatataaatgagaaaagagtgagtgtgagaaagaaactgctgtttgtacatcggaaaattagtcatttggaaattgttttcatttgcgggaatttcctgccactaagtaaggtgggaaatatctaacaaatccaaatattctggctttctttttgtagttgtttggtaatgaatacctcttaaataaataagatacttaatattcgaattactgccataaatatttcaaaaatttttcgaacatttcacgatgccaaaggtgcgcaacttccccgcaaagaaggccaaaaaaaaaggggggaggcattacgaatcgtaattggcggctctataaatagccccaagcgaaaaccataaacgaacagttgccatatgaggttgagccactcggcagtgcattcaactcgaaaaaaaaaaacggggcgaaaaaagggtaaaaaacggcgtaactcaggtggaaagagcggcgatggtgtgagtcacgaggcctggtcacactaatcaccatcgtagattgccctgatcactctaattccgcaactatggcaaattttggttaatttgcacttcggctgtaatgcctttcactttttttttttgttttttgtatcttttgcatcattgtctggggacggaacaaaggccgaactaaaaatggggagtgaaggggtagacaaatataattaaaaaggtgttattatattttcacgcctcgactgcgcggaaaagttaacagacttagtccgccggggcagcgagtggttaaagttaaacaaaaaacgtcaacgactcctacgaattatttgcagaatcatcaaattaaaggtttgatgttgatttcaacaagccccacacagcacgaggatgaagacgacgttgcatatgccacagctccgtgtctacatatgtacaaatatatgtatgtatatatatatatctcatatatctctgtatatatgcttatatgctgagaaactgaacagtcatggcctgcaactgggcccccttgcgatcgagtgtctgtataattttcgttcgttctctcgaattggctgtcataagttttgagtagaaaattggtgtgcaacaggcaacaacaaatccgatttcatctgacagagcaaacaataatgttgttgctctggctggcaaaggatttcatgggtttgcttgattgcgataatgagttatacttaatttccacgcaccgaaacgtaccgctggccacttgagaatccctgccaaaaggaaggccagcgtatgtaatggttgagatgtcttgattgagagtttcgaattgatggatttcaatatcagaacaacgagaagctaacatattgcttttcatctagattgtttggctaactctaagttaatgttccacattggttctgtcacacctgaaacccgaaagaagccaactaatttccttcctgccgtcgctcagtccatttgttagaaaagcaaagcgaagttttgacactttcattgtttgcagtcgaaaagctacaaaaaaaaagggaaaaagggttgctacctggctggaaaattaggcgcggctctgtgcaattagggcaaatagttttcccggaccttcaggattcgttgcgaagccttgattgatggtcattacacaattcacaactggttgccattgattgatgttggtccgaaggacttcggaaaatgtttgccctgctttcgctgatgacattttgtctaactaatccgcactttcatctcctttggcagcgaatatttttcaattttccatttttccaagccggcgagaatgagaatgaaaatgaaaatgagaatgaaactgaaacgagatccaaacacaattgacaatattaatcgcgtttcacgctaatttgcaacaacaagtggcttaaacggcaaaatattttacaattcgagctacgtgtgcccctggggacttgcgaacggcaaacaaaaaacactcgcagaactcgaggttttgagaaaattaattttatagattgaaaacatgcccatgcccagcgcctgttcagcgctcccgaggggtgtaaaatgtgaaaatgtgacaggggcgggcgaaaacggggcggtcaatgagccacgtcatcccccggacttatcaacttgccaacttaacaacttaccagtttaccagtttaccagtttaccacctttccacgtaattgaggaattgtcggcgaattatgggcgcataatggacgtggacatggacttgtggggctgcgcagcatgatccagactatttatatggccatggcgcaacttaacccgcacaagttgtgcactttatcaactgttgcaattcgtggggggggggggggtgcggtggaggcgtggcgccacgcggcgatttcttctgccgatgacactccaattggtttgacgcaatgcaaaataaattcacaaaaaattactagagacactactgggggcataggcgaacatggaatgcgcttcagcttgtttgtagggcatattaacaattattcaaggtgactcacgcaggcattagaatataatattaaattaactgaaagacaaaaattgtgcgaaatcttagaacgtagctaaaagatattgtatctacagggtacagacacaggcgattcggaagtttttctgtgggtggttagtgggtgtgtgcgtgagctgtgcgccaaaacaacaaataacatggttgtcgtttgtgggaggggggagtgggcgttgggggggggagggtctccagcggtgggcgtgacatggcgcctgccacgattcaactttggtttggcacacgcaaatcagacaatttgtatccagcggcgaatataattgaaaaatgattggtttaccattaatgaaaatgatgatgacaacggcaacaacaaccacagcaacaacagcaacaacaacaacaacagcagcagcagcagcaacaacaacaacatcgtctgctgtcatcgacagacacctgcagttgcgtcttcgattgttgggtcaatcggccatcgagcgacttgataatcgagatggcagcgataatgacgacgataatcgcgataatagcgataaagtacccgttgactggcagcaatgtgcgcatttaatgttgagtgaatgctgaattgcattctaatcatatatcatcacattagccagtagagtagtacacgtattgtatatatgattcgggaattccgcagccaaacaaatcaagctcggggcaactttaaggcaaaaaagaaaaagaaatgccaagcaaaaaaaggaagacgaaatggtaaaggaaacggaacggctaacccgctcggtcgcctcgtaatctgtgtcacaggattcactcgcattgccgcacgtccggcgtggaattcctattttgtggaactcgaggaacgcgggacttattaacattaaatcgccggcagctgcctgtcgccgcaaattggaaattccatcattaattctaataagattattagttccccgatcgagtgatgcgaccgttagaggggttggattttccggtatcccgacacctcgaagtcaagtccaatcagccggccgcaaacttcgtcttcaccggactcacgcttaatgattgcggtcgccggtcgtgtgaattcaggactcgtcctgcagatacctacttagtagttggctcatcccgaccagaagcactgaatctacgaaaccaccaccaaacatttccggcgatttccctgacaacaacgctcgagtaaatccaataagcataagtgtgcaccaaaatcccgagagagccgaggccattgagtgcgaaatgaatgaaattagcgcgcgttaatcataaacaaacgagcgaataagggcttttccgggacaagcggggcgattttcaaaactccccccccccccccccccaacagcaaccctttgtctcgtttcgaagtcgcagggaagtgaaggcaaaaaaaaaaaaaagaaataagaaccaaagactggaaaacaaacaaacaaattgctacagttctcacaacgaagggcaacctgctgcgatgacacgcgttccacgtgcacttgccaatttgcgatgatgataactactcaactgggaaaccgaatcttgtggcagcacgtttttggttcagtttcggatgcgaatccctgcggctgagatttatggctatttttaatggcaagtttgtcccaaaatgacaactcaacgttcggaaactagcaactagcactcattgtggcaaacaaacaaaaaaaaaatttatgcttaatagcaatagcagtaatatcaatggggattttccaattaaaacaaccacttggacctattcgatgggcaagccggataaactggccgggattacttaatgcatatcctaattgtttcgtaattgtttgagtcggagttttggcattgcaccacccacaaaacgccccagtctgtcggaaagcccattccgcgcccaaagatcgtctaacgtaattagaaaatcggttcattaatcattaggcatttaaaacatcgtttgaacgtaattaatagttgagcggcaatggcaattgcacagccagctcaatgtcgagtaaaggtcattaacaagagtccgactcacatgtgcacttctctactggacctcgtttcacttttacccccccttttcgaacaccaaagtcaagcctttagttccgtttgcgcaaattaatactcgactcacgaaacgagatgaaaccaaaaaaatcattttgcatttacatttcttaatccggatccggatgcggaaaactgaaaagtccgctgccccgccccttcttttcagtgagctttttagccttctttttcagcgagtgaaatagcgaaaaaagttcgcgagcgttaaactcatatgaaagttggaaattgaagtttcagcgaaaaaaatggaaagatgctagagacaaaggcgctgaaaagcgtggaaaactgggaaaaaactcaaaggatttcgcgtatactctgccaataaatagcgcaaatatgaaccattgaatattttgtgttattttgtgtgaatatatgtaagttgtactcattggctctttctttatatatatatatctatgctatatatctaacgaaagtgagtttcaaactctggctgaaaactgaagtactctttttgcgcggaatttgaaaaccaaattccgcgaatgtcaattgaatattgcatataaactgcggactgtcgttatgaaatttccacacgcctcgccggtctgactgactcgcaaccagttggcagtagtagtagtcgctccacatctatccacatccatccaccacaccgacatccatccatcgatgccccagcgaagccaccacccgtaagccacccaaccactcagtcgttcgagttgatgaagtaaaccaataaaggccgcacacgaactcaaaggcaaattcccgcccgaatgcagggcaaaatcgaatgcacaggtgcacatgtcacctgaaaaggacgacaagtcctgcgacccgttgcatatgcaatttgcaattcgcaattttgcagccccagtgagcaaatattcgccacccacccaagccagcaatccgcaaaccataatacccgggcacaggtaacctgaaaatcccttttcattttgatttcgatatgtggaaaggggcaggggcagttgctggcgtaggcccaaaccattgagaatctttgattggttaccaatattttaattatgccgacaacggccagcaggcatgtccttttgaccttttctgcgcgttcagtggaccagtggagttttcgcaaattggtttgacaattgcgagtgtgtcgaaggattgggccacatcattggaaaaagtggatagtagctgcaaaatggaaagcataaatgaattaaatattaaaacatggatccaaagttaggcgccccatagatgatccccgaggaattacttttgtcatcggtcaaattcggttgggcagccagcagaatgttcgatagataaatcaaaaaccatttccaccaaccggacacacagcggacaagggggcgtggccccttcggttgcgccccataaaaatgtccttcgaactattcaccccttcgtggccatcccgccccctcttctcccctttccccatcaggcgacgccccgtccaaggataataataaattttcaatcagcaaattgatgtcgtgattcgcagcgtattggaatcgaagttgagacgggaatggtcaagtaatcatttagcggcagattgtccaagctgttatctatattaaagtggttggcattatctgctacagcagccctgattattcgattatatatcattgtttggtggatgttttgcgttcgcatcaattgattaaaaaattgcgattagggctttcgcagtgacaaatcgtatatgtaattctatcgaatgtattctaccattttaccattattatttaaaacgtttactaatttaaaataacacttagaacaaaggtatatacatataatattcgctaagttgcagcttagagctgttagttggatttttcacgccacctttgtaggccccagcaaatcgacttggtggcgcatttccgttttggaaatttatggcatttccctctttgatttccgcactcaaagagccctaccgaaactggcggtcccgcttttccggtcgccactccggtatcataatgactggaatgattgggtctgtatctggatctgtagctggagctggagctgaagctggagatggagatggatctggatgatgggatgttgatgttgccgggcctccaaattgcaaaatgatataattcaatgagagttgattaaattatcagacgagccactggcctccggaccagcaagttgctgtcgtgcttccatgttgctgctgctgcttttgctgctgttcctgctgctgcctgtgtgccttgttaatgaaattttccgctcctttggcagaggctctcgtatctgtgtgcctgtgtatctatgtatctgcctgtgtgtgtgtttgcgtattgtttacacccgggcgtgccactgtgtgtgtgtatgtgtgctgccatttattattgcaaaatgctgttgaagccgctgctgcagcagcccttttgtctgttgttgtagctgatgatggtgacgttgacgttgcatgatgaaataacaaaccggattaatttgattttgcagccagaaagggccaagatcccgattcccaaggctccacagttccacagttgccgagctttcaagttccctagctcccgagccgcaggctccaaattcggatgctgatccttgccagaaacaaagtatccgggtgtgtgtgtgcgtgtggaaattaatttgacatccggggaagagtgaagggtaatttcagagaacggatatcggatttatttgcagctccacgcctgagtaatccaactaaatcgcacgctgagtcacactcggtgcagtgcgagtcagtgatgtaaggattgcggagcaagtggctcctattctgacttaagtttttctgaaaaataataaactccaaactctagctattgaatcattagaatggaaaagcttaggccagcgtacttcaaaaaggtttccaactgaacctaaactgctgaaacgtagtgtaccaaataggcggcactttgccaaaaaatcggcaacgagctgcaaattttccgggctgcaacgcaacgcactgagtggctgcctgggaaatatatgcatttagtttcggaagtcagaattcgggtctgccaatttctcagaaagtggatgtccaagatttatggggctcctggtaggcaaccaagctccggtgacagagccccaagccaaaccactttatcttcgtttcgcgccgaacttgtttttcagttttttctccctttttgtatattttttttttttgttttcgagtggaataccacgcccagttgcccacttaacccgcgatttgctcaatccgtgaggttaaggttgggatttgggacttggaacttggaacttggctgcgctcctggccattcggtgcctgattcttggccaacaaattcctgggcgagagcagtcgccagcttttaacatagcacccccttattttgccagctttgcctattttgcatatattgcttttttattataaatcttcctttagccgccacttccaagagccacttcagttcgggctcctttcctacgtcctcgtcgatttcacattgctgggcaatctttggtgtcctgtcctgtcacaccccttccccccacgaccctgacaaaccctgcccctgaacctcccccttttgcgtatacatgactaatagcagaactaaacgatttgatggaccagaaaaatgatgacttctttttcagtgcagagggtccggatgccgggattccgagggtggttcgtgctgaatttgaatccttttggccgctcgtctgtgtggcaaatccttttattgtgacagttgttgttgctggtcgggttgtctggcggtctggttgtctgctcggtctggttgccttttgtgaacaacatttaatgttttcatattattatcattgttgttgccggcagagaatcggtttaatgtttcggaagataatctaatttggtcacttatatgcgaatatgtatatcatttgccattatgtgtggagtggcagcgagtgggatgtcgctggtgtcgcattgatgttgccaaccatcgttgggtccactgatttttaggtatccactgctaatatgtactttatttataaagttctaactcaacatggttgtttgtaagaaatctattagcaataagattaagcaaaacccaagtaaaagttcaaaaagttcgtgatatagtccccttttctacgtgtaaaccacgccactgccgcaaaggtctacatatatacatatatacatatataagcatttggggcagctgagaggcttatggtcgaagtattagcatttaaagaacattccatttacattttttcaatttgaatgagctttttatttaataattcgcaatttgcattgcattttcccaacgactagagttgatagccattggccactgaggaggtcggtgtccatatggcgaaacactttatgcggaagagtttgcaaatggctagagcggtttaatgtttaaacaattcgatataaatgtaatactaatagcatatcgtttaccttctgtttgcaggtgtggttccaaaaccgacgcgccaagtggcgcaagacggagaaagtctggggcggcagcacgatcatggccgagtacggtctctatggggcaatggtgcggcactcgctgcctctgccggacacgatccttaagtcggccaaggataacgatgcggtggcgccctggctactaggtatggagcagaaatgtaaatgcaacaatcatatcaaaactatcaaactagccagctaagacccatcagcacccccacaatcatcgcattctcccattttggttttgctatgttctatgatttgattacttaacaaaaagtagttacgcactaaaagtacttatataattttttttttaatctggctttctgtcttcattgatagcctcctggttttttgagcaaatctattttattcaccagacttttcacttcaatgccatgttgtacagatcgcacacatatgtatgtatcggcgaaccttgaagagagtttaattaaatttcgagcccaaaggaccacggttcggggattataaactcggatagatatagcggacgggtcgagaattgtgagcatatttggcgagcatgtccaacgatgcttttcccgctattgccgtcatatgttgcgcacatttcccgggaatgactttgcggattatccgggtattcgccgctcacaagtgtcgctggttcggggtgactgggctcctttattcgttaataatcgcttaataaatgcaaaatgcacacgcgacaaggacgagggacgcaggatgagggttcgccaccgaattcccgtcttatttggcatttatcgtttatctatttccattgctggggtggcgatagagacgactgactgggtggttattgtatgctccagccaaccaactttacgagcaggccgactcgataattaattcccaagtagccgtggccaaaggtttgctcgaacttaagtggcttatcgaggacttagcggatcctgcgccgggggaatcagcgcaatcggaacgggaatagtttttaattaagtcgatatgtcaaattagttggcaattgatggggcggccagcgtgcgactgtgagctctaaattggttataaattcaatattttgacagcaccgaatttcacattaaacattttactttagcatcttcctcaaagacatgcatagaatatcatacgcttttttttccaattcaacaaactttatttattacataatccca

SEQ ID NO: 40073 - DNA, 455 bp, DROSOPHILA
gatcgctggcgcccaaggacttcggcatggagagcttgaatggcttcggtgtgggaccgaatagcaaaaagaagaaaaagaagcgacgacacagccgcaccatattcaccagctaccaactggagaaactggaggaggccttcaaggaagcccattatcccgatgtctatgcccgcgaaatgctctcgctgaagacagagctgcccgaggatcgcatacaggtgtggttccaaaaccgacgcgccaagtggcgcaagacggagaaagtctggggcggcagcacgatcatggccgagtacggtctctatggggcaatggtgcggcactcgctgcctctgccggacacgatccttaagtcggccaaggataacgatgcggtggcgccctggctactaggtatggagcagaaatgtaaatgcaacaatcatatcaaaactatcaaactagccagctaa

SEQ ID NO: 40074 - protein, 142 aa, DROSOPHILA
MESLNGFGVGPNSKKKKKKRRHSRTIFTSYQLEKLEEAFKEAHYPDVYAREMLSLKTELPEDRIQVWFQNRRAKWRKTEKVWGGSTIMAEYGLYGAMVRHSLPLPDTILKSAKDNDAVAPWLLGMEQKCKCNNHIKTIKLAS

SEQ ID NO: 40075 - DNA, 2768 bp, DROSOPHILA
ttacttaacaaaaagtagttacgcactaaaagtacttatataattttttttttaatctggctttctgtcttcattgatagcctcctggttttttgagcaaatctattttattcaccagacttttcacttcaatgccatgttgtacagatcgcacacatatgtatgtatcggcgaaccttgaagagagtttaattaaatttcgagcccaaaggaccacggttcggggattataaactcggatagatatagcggacgggtcgagaattgtgagcatatttggcgagcatgtccaacgatgcttttcccgctattgccgtcatatgttgcgcacatttcccgggaatgactttgcggattatccgggtattcgccgctcacaagtgtcgctggttcggggtgactgggctcctttattcgttaataatcgcttaataaatgcaaaatgcacacgcgacaaggacgagggacgcaggatgagggttcgccaccgaattcccgtcttatttggcatttatcgtttatctatttccattgctggggtggcgatagagacgactgactgggtggttattgtatgctccagccaaccaactttacgagcaggccgactcgataattaattcccaagtagccgtggccaaaggtttgctcgaacttaagtggcttatcgaggacttagcggatcctgcgccgggggaatcagcgcaatcggaacgggaatagtttttaattaagtcgatatgtcaaattagttggcaattgatggggcggccagcgtgcgactgtgagctctaaattggttataaattcaatattttgacagcaccgaatttcacattaaacattttactttagcatcttcctcaaagacatgcatagaatatcatacgcttttttttccaattcaacaaactttatttattacataatcccaactttcacgttaatttgaaagtgcacaccactgacttatgtctgtacttgcttttccgcgacaggcatgcatcgcaagtcgattgaggcgcagtcagcgctcaaggacgactcgggggtgagcgaccacgaggactcggcgggatcgaagtcggcccactcggaggatctttcacgctcccgctgccacgccctcagctcctccaccgaatcactgaacgtcgtcagtcctgcgcccagtagctgccccacctccgcctcaacctcggcgccgcccacctcgacgagcggctatgcgggagccgcctcctcggcggccaccacacccacaggagcgtcgaccaccaacagctccagcagtccccacatcgagctgggctcaccttcgccgcagcagcagcagcacctgcaactgcagcagcagcaacagcaacaggcgtcgctctacttgggcgctggcgcggtggttactggctgtgccccgcccagctatcatccgctgctggacgccgccaatgccgctggtgccggcgcggccgcctccagcaaggacttccacatgatcatgaacaccgccgtggcagcggcagcagcagctgctcagcagcaacatcagcaacagcaacagcagcagcagcaggccacggcgacagcacctggactgcatgcccacaacttggctgccgccctcatggaacacgatccggatgccttcaggtgacacagagcgcttacttaactcccccacctgccaacaagtgcatcaaattgatattgaaatacgtacttatattttgcagaaacaactcaatcgcctgtttgagggccaaggcgcaggagcaccaggcacgactcctgaacaacggtgggctcttcctgcaggtgcgtcggttcgcccagggtcaggcgcagatccaggacccaagtgatatgctcaagctcagcgaggagcacaacaacaacagcccgattcccattccacccgcccactcgactgtcaatacgcaagtcaatgtgaaaatggagctgaccgccaatgggggttcaatgaaaaactatgaggaggcctaacgacagccccaacaagtttaattcatctaagctgcccaatgcgaatgctatgatcccaaaaaaaaaccaaaccaaaaatgagaagaaaacccttttttttactagatctaagaaacattacatctgtaatcgaaacagtaattttaaacagcagcattggctgcttcaaggtgtaaaaatacgaaatcggaatattttaataaattcatcagcgaaaatatttttttattttccaacatcaatttgggcaccaaaacatatatataaaatagttaacagcaatggctgaaataaaaatacgaatatgtgacaaacaatctggtgtcttgtatttggacaatataattgttttattatattattattatattattatttataataatgtgtgggtaataagtataatgtaatattacaatgtataatgtaataagtaagatgtaatgatgaactccaattaagaacacaagtccgttttaagttgaaggcagccgtcgggctgacatatatttattcaatttcttcttttgattttagagtaggcagaaatggttctgtcagctcaacgtctacagagtctctctctgattttacagtttttgaatatatttggacttaggctaatccgcgtagctgcgctgccgggtacgccagcagcggagcggcgttcttatgtatatcttatatatctaggcttatcgggagagcgagatatgtatgtacgtatgtaatatgtatttggtcggcgtgtgaatgctgaccat

SEQ ID NO: 40076 - DNA, 921 bp, DROSOPHILA
atgcatcgcaagtcgattgaggcgcagtcagcgctcaaggacgactcgggggtgagcgaccacgaggactcggcgggatcgaagtcggcccactcggaggatctttcacgctcccgctgccacgccctcagctcctccaccgaatcactgaacgtcgtcagtcctgcgcccagtagctgccccacctccgcctcaacctcggcgccgcccacctcgacgagcggctatgcgggagccgcctcctcggcggccaccacacccacaggagcgtcgaccaccaacagctccagcagtccccacatcgagctgggctcaccttcgccgcagcagcagcagcacctgcaactgcagcagcagcaacagcaacaggcgtcgctctacttgggcgctggcgcggtggttactggctgtgccccgcccagctatcatccgctgctggacgccgccaatgccgctggtgccggcgcggccgcctccagcaaggacttccacatgatcatgaacaccgccgtggcagcggcagcagcagctgctcagcagcaacatcagcaacagcaacagcagcagcagcaggccacggcgacagcacctggactgcatgcccacaacttggctgccgccctcatggaacacgatccggatgccttcagaaacaactcaatcgcctgtttgagggccaaggcgcaggagcaccaggcacgactcctgaacaacggtgggctcttcctgcaggtgcgtcggttcgcccagggtcaggcgcagatccaggacccaagtgatatgctcaagctcagcgaggagcacaacaacaacagcccgattcccattccacccgcccactcgactgtcaatacgcaagtcaatgtgaaaatggagctgaccgccaatgggggttcaatgaaaaactatgaggaggcctaa

SEQ ID NO: 40077 - protein, 306 aa, DROSOPHILA
MHRKSIEAQSALKDDSGVSDHEDSAGSKSAHSEDLSRSRCHALSSSTESLNVVSPAPSSCPTSASTSAPPTSTSGYAGAASSAATTPTGASTTNSSSSPHIELGSPSPQQQQHLQLQQQQQQQASLYLGAGAVVTGCAPPSYHPLLDAANAAGAGAAASSKDFHMIMNTAVAAAAAAAQQQHQQQQQQQQQATATAPGLHAHNLAAALMEHDPDAFRNNSIACLRAKAQEHQARLLNNGGLFLQVRRFAQGQAQIQDPSDMLKLSEEHNNNSPIPIPPAHSTVNTQVNVKMELTANGGSMKNYEEA

SEQ ID NO: 40078 - DNA, 2719 bp, DROSOPHILA
gcttacagagcaccgaaaccaaaacgaaaacgaaacaagaagcaaaatcagacaggggggcaccatagtgtacctgtttattttcagtttcaatgcggataaggtaaacaaaggttggcgatatctttttcatggagcgccggttgcaaaaattctatccggcaatgttaggtgaaaatagcttgttgtgcaagcaaacatggtcgcaaaagtagttcgtgtagtaaaataaataaacaatagcctcgggaaagtggccttttgcgtaaatgaatcaataacaatatgcacgatcaacaattgacattcaagcccaatttacgcatatgaactctcatcattaaaaaacacccttcatttacaaattacatttatgtatttttgttttattcttccattgcaaacgatttatttgtttataaatacaacaattcagtggtcatgaaaagcattgtgctaaaaactaactacttcaatgtatattcacttgagacacacaaatactatgtacttaataaaagtaaaaaaaaaatcgggtatatatatgtacatatatattcacgcattgttaaccagttatcagaagaagggaagaagcagagccagaaggcacaatacaacttatctctttggaatttgctctcttgttagtggttttctctcgctttctgttcgctattatatctacgttattgctgcgatcgactggctttatcttcttcacttcttgacctatatctagcgactattagataacacatacggtaactgttcccgcgacaaaagcttgccacaatttcaaacttcagacttaaatgcttcaagcaaacgcaagcgatactcgctctctcaaaacaaactcacacacacgcgcacgcactggcactcacacagatactcgttcgcacacagatactcgctctcacacagatacacacacagagtaagcctaacgtagtaagagccaccaaaagctgggttcgtgcacctgaaaccaagtctatatcgtttgggtggccacctcccgctggcgactgcgccgatagtttccataggcctccagtccgttgatgcaaaatgctgtcaggccaaagaactgtaaaaaaaaaggtgaagaatagggtgtattagacggatctacagagagttcatcacagcgagggaatgaatcggctccaactggaggctcagtgtttcgtttaccagtatctttcctagcttaatcattagccgaaacaatgagccgtaatacttttggtttccgaacttatcctaactgcgagaacgccacttaccgccgccgccgtataggctccaatatccagggagagtacgagtccggaggccgtgaagtaggccagggccaatgaggagtgcaccgccagggaccagagcgtgggatcgcatcggcagaactggcgctgccacaaccggagatacctggccaggagcaggcagccggtggccacgaatccgatggtgactacggccaggtagaaactgccgcggaaattgctcacgcgcaccggtccgcagatgatgcacaatattccaacaaagctgcacagctgaaagacgcacacatacaagcgcacacattaagggcgatacacaatggcacatatgtgtaaggctaattaccaaacaggccagcttgcacaggcccggcatgctgagcaggtatttgcgatcgtagtcctgggttcccgtcaacgacatcgcggccaatacaagatatatacgttttggatgcagttaatccagattgtccagccgaatagatgcctcagaaacgagcgattaaagccaatgtagcaaatgtagcgaagcgccgctgactaattcatattgcgctcgccagcacgcacagaatgccactgaagtaatacaaacaacacaaatactcagaattctcccatcgttacactcggcgaataaaactacaattgcgagagcgagagaagcagcgggcgaaagagagagagagagagagagagagagagagagacagagagcgagcaacacatggcacagtgggacgaaacgatcaggaaatgtagtacatattgtgtacaaattgtgttatctactcaaatggtatctaatgaaactataaatattaaggagattagctttagctgggtatttataaaaaataggattattagtttaagaaagctgtaatttccaataaatgaataaaccatattaacttgtcttactaactgtagttttgggggtctgttcattgtgaatgcttcttcgttacattatactaattttcgttcgggggatgtcaaggggtgaatctaacacggtgtgactcactgacctccagggatatattaaatatatgtatattcataaggcaaggtgaccggttactgggtgagcaaagcttttttagtcgtgtgaagtgccgagcttttatgactggcattgcttgtgacatgcagtttgaggttgggccctttttggaccactgtgcattcgaatttccatctgtatcttaatgcccagcatcattagattgtgccattcgaatcgtatttgttatcggctatgaccgaaacgcttctcgttattttaatcggcacagcaggctaattgatttagttacttaacggataaatcgctgcacaaatccgaatgcgaatgcaaatgcgagcctcccaaaatcaaatgcaatttcgtcgtgattcacattgcaaaacacaag

SEQ ID NO: 40079 - DNA, 447 bp, DROSOPHILA
atgtcgttgacgggaacccaggactacgatcgcaaatacctgctcagcatgccgggcctgtgcaagctggcctgtttgctgtgcagctttgttggaatattgtgcatcatctgcggaccggtgcgcgtgagcaatttccgcggcagtttctacctggccgtagtcaccatcggattcgtggccaccggctgcctgctcctggccaggtatctccggttgtggcagcgccagttctgccgatgcgatcccacgctctggtccctggcggtgcactcctcattggccctggcctacttcacggcctccggactcgtactctccctggatattggagcctatacggcggcggcgttctttggcctgacagcattttgcatcaacggactggaggcctatggaaactatcggcgcagtcgccagcgggaggtggccacccaaacgatatag

SEQ ID NO: 40080 - protein, 148 aa, DROSOPHILA
MSLTGTQDYDRKYLLSMPGLCKLACLLCSFVGILCIICGPVRVSNFRGSFYLAVVTIGFVATGCLLLARYLRLWQRQFCRCDPTLWSLAVHSSLALAYFTASGLVLSLDIGAYTAAAFFGLTAFCINGLEAYGNYRRSRQREVATQTI

SEQ ID NO: 40081 - DNA, 2802 bp, DROSOPHILA
aagcggaaacggaaaccgtatctttcgtcaccaatacatataaatagttaacacattccattcagacagacaactttcagctatagttatggttatagttcatagttgtgtagttgtaattcaagttgtagtattagctttagccgtagttgtatgcttagtcaactagttttgtgtacactgaaaacatttaaaccggaaactgcaattgtaactgttagacgagtgtacacatattaacattgcattacaattgtatatgctgttgcttacactagaaaaaaaacgtacgcgtagcctagaacattgagttgaaattcgttaggactgatttgttatgttcttatatattttttttttttttgtttttgtgtattcttaactttcatttaaatcggtaaacactggggctcaaaaggtttacgaatttaaacgagttttccatcctacaactaactacgctaaagaaccctagttaaaatacaaaaatattttacaaatgggcgcacaaaaagttgctctcaaataaacatatttacccaggcattgtttcaaaatttcgtaaataccctagaagctaaaactaatcgtcaatactatcgattatttcgattaattcagtttcgcttttcaatccgatagttatgacttgtgagtttcctgtaagtatttttcctaactttactgtagtattatgttattgttgttacccaaaatcttcacccagcactttcaccctaccactatcacttcttgaaagtttcaccgcatctcttagacttagacgtacacccttagccataaaaatagcatatacatatatgagcttaagtactaatctgaatatttaatctgaatatgacaccaacgcacagagaaatacacacagattcgaatggagaaatttgtgtcttattcgcgggaatagaacagacacttaatgttcggtttgggtgttattcggtctacccggggatatctatgtatttcttaacgtttttaaactgccttaagttatttaaaagtgaaaatcgctcatttgcaaaatccatcaaaattcagactgcatcattccaaatactctacgcatttttggttattttgatattgatatattagtgtttttaattaaacaagttcctgtgtacctatgtattgtagttttctcctgaaaccttacttcttagctctgttcgaaaaaaaaccatttgtgtagtggagttcttttgatttttgctggattagttgcaattgcaaattctgttaaaatttcatgctgagaccattgacgaataaagaactgtattgtaaattgcgctcctcggcaggcagccgatagttttcaacagtatattgggatctctgatttccgatagccgcacccaatcgattccgaacccatccgattctcgcatccagtttacaaaatccgctcctcggtgatgatgtccatggtgctgacccgccgctgctgactgggctgtgagtgggtctgcagatggtgcgttaccagatgctggtgctgcgccgaggcctcaccaccgatgatcattgacccaccaatggtcttggtggtggtggtggtggtggtgctagtggagctgcgacgatggtcgctgctgccccgccgcggcaccaacatcaccaattactagaggaccgtctcgttggtgttggtgcaggtgcgggcgccattaacgatcgagtattttgtggagctatcctttttggccatcagccgaccgaggaatatctccttgaaagtctcccgaaactggcgcgacatgccgcagtaaatgccgaagttgatcggatagctgaataccaggaagaagttcgtcagcatgatgcaaatgttggccagtccatagtccaggaactcgataatcaggctactgacgatgtgcatcgcagtgaccacagcaatgggtatctcggctagaaggaacaccgacacgaccacaattagcatcagcgtggtgcaattggtctccctcagtttcttgcactccttcttccggttctcccggaagaggagctttcggcgctcctgtgcctgccgcatcgccgcgaacagcagaatgttcagggtaaccaggataatgcagggcagcaggtggacgaacagcacccggaacagatagtagcttgtgtagtataggtccactccaatgtaatcgtgcacccacatcgacgtctccaagtggcacacctccgttgggctgccgttccactcgatcaccagcggcatgtacgtcctgtcgaagaatctgggcagttggtgcagaaacgccagcaatgcaatatacgccgtgcaccgcctcacacgcggcatcgtgcaccacgttcgggccatgggggcgtggcaaacgtagatgtatctgtggaattaggattaaagcaggaattaggcggtatcaaaaaagtgccgtgccaaaattgattttttcgcataagttggctaaatatggtcatttagttaaaagaaaaactgttttgagcacttcataaccaatgctaattacccctatcatttttcgacggaattagagaaattcatttttgagcaaattttcgcattttttgtaaggggtaatgggggcatcataaaaatttgcaaaaaatggccaaaaaattgaattgccattctagtatacagtttgattggaagagctcacagaggtatgacattcgatattcagacaattattattaaagttgtggctaaaaaacagattattttatgacggaaaatcaaaaaaaaattattttcgcaaaaatttaaaattttagatgactatt

SEQ ID NO: 40082 - DNA, 1335 bp, DROSOPHILA
atgccgcgtgtgaggcggtgcacggcgtatattgcattgctggcgtttctgcaccaactgcccagattcttcgacaggacgtacatgccgctggtgatcgagtggaacggcagcccaacggaggtgtgccacttggagacgtcgatgtgggtgcacgattacattggagtggacctatactacacaagctactatctgttccgggtgctgttcgtccacctgctgccctgcattatcctggttaccctgaacattctgctgttcgcggcgatgcggcaggcacaggagcgccgaaagctcctcttccgggagaaccggaagaaggagtgcaagaaactgagggagaccaattgcaccacgctgatgctaattgtggtcgtgtcggtgttccttctagccgagatacccattgctgtggtcactgcgatgcacatcgtcagtagcctgattatcgagttcctggactatggactggccaacatttgcatcatgctgacgaacttcttcctggtattcagctatccgatcaacttcggcatttactgcggcatgtcgcgccagtttcgggagactttcaaggagatattcctcggtcggctgatggccaaaaaggatagctccacaaaatactcgatcgttaatggcgcccgcacctgcaccaacaccaacgagacggtcctctagtaattggtgatgttggtgccgcggcggggcagcagcgaccatcgtcgcagctccactagcaccaccaccaccaccaccaccaagaccattggtgggtcaatgatcatcggtggtgaggcctcggcgcagcaccagcatctggtaacgcaccatctgcagacccactcacagcccagtcagcagcggcgggtcagcaccatggacatcatcaccgaggagcggattttgtaaactggatgcgagaatcggatgggttcggaatcgattgggtgcggctatcggaaatcagagatcccaatatactgttgaaaactatcggctgcctgccgaggagcgcaatttacaatacagttctttattcgtcaatggtctcagcatgaaattttaacagaatttgcaattgcaactaatccagcaaaaatcaaaagaactccactacacaaatggttttttttcgaacagagctaagaagtaaggtttcaggagaaaactacaatacataggtacacaggaacttgtttaattaaaaacactaatatatcaatatcaaaataaccaaaaatgcgtagagtatttggaatgatgcagtctgaattttgatggattttgcaaatgagcgattttcacttttaaataacttaaggcagttta

SEQ ID NO: 40083 - protein, 227 aa, DROSOPHILA
MPRVRRCTAYIALLAFLHQLPRFFDRTYMPLVIEWNGSPTEVCHLETSMWVHDYIGVDLYYTSYYLFRVLFVHLLPCIILVTLNILLFAAMRQAQERRKLLFRENRKKECKKLRETNCTTLMLIVVVSVFLLAEIPIAVVTAMHIVSSLIIEFLDYGLANICIMLTNFFLVFSYPINFGIYCGMSRQFRETFKEIFLGRLMAKKDSSTKYSIVNGARTCTNTNETVL

SEQ ID NO: 40084 - DNA, 4609 bp, DROSOPHILA
tttacaaaatagttgttcgaagttaaagttcattgatgccataacgttttaggttcccaaataaattgaataacaactgcgatttaaaggcaatggcaacttttcaatcaaacaggctgatgcgttattttttgaattacacggaaaatcgaaatatatacagttggccatttagcttgcatttcccccgggagcacaatttaaaatatgcaacgcttttaaactaactaaatgaatcataaccgttttgaatattcaactcagctggcgaacaaacaaacgctgccctccaaaccttttagcaaatcgaaatcgctcagacaaatgaaagttggctccttttgtttgaattattccccaaacggaagcgttttggaccgcctttcgatggcatttttgctttgcgaaatactgcggacaatgccgaaagttttgctaagactaacaagccggaacaaacaaatcagcggaataacttttacaattgtactttaatgtgttgcagcagaaacaagcgaaagccgacaacttttattataattatacccgttccaaattgtttaaagcatacttgcttacttgcacaaagctaaactttagatgagcacgaaagtaaataagcctgtaagcggaacaccaaacaagattagtaaattagtttactaatatttcaactattgttttttatgagcccgctagttgttgacctcttttcgtaagccaacttcagtagctttcgtatttgtaaggttacctgctcttccaatcagttcagctccgatattgaatcgaataggatatatagtaagataaagctgtataatttagttatagactaattatagatcaatttcaattactttgcagaatgtatggcgtttttgagcagcagtacaactagcgccagcatatagatcacggaaaatgcctgatttgcgagctgcaattgagaattaaggcagcgccaggggaatccgctcgagaaacccacgtccacgagatggacaactatacggacgtactgtaccagtaccgcttggcaccgtccgccagcccggaaatggaaatggaactggccgatccgcgtcagatggtccgcggatttcatctgccaaccaacgagtcgcagttggagattcccgactatggcaacgagagcctggactatcccaactaccagcagatggtcggcggaccgtgtcgcatggaggacaacaatatcagctattggaatctcacctgcgattcgccactggagtacgctatgccgctctatggctactgtatgcccttcctgctgatcatcaccattatctcgaactccctgattgtgctcgttttgagcaagaagagcatggccacgcccaccaattttgtgctaatgggtaagttaaatggcttgttgtttatatcgataatttagtgtgcacaccaaatgaacttccaattcggtatcgtgccacatgcaagtcactcaattttccagttgctccgttcaaggactctcactgaattttacccctgacattggcgcatttcggatatagtataattgttatacagctaaacaaatttagtgaaatattttccagttttaagaacaccacccttgcaccaaaaagaaaaaggccccacctccgattaggcccattttgaattcccccttttgcagacgccgccttttatgattattatttatttttattccatgtcatttcatgccgcaagcctcggcacgtcgcctcttttggcgcttaatgtgccacaatgttaaatcaggcagaagttttgtgagatttcaaatagctggcgaatgtgcgtgctccccagagcctcttccgtatccataaccccccctccccctccaccaaatccccgcccccaccaattccatccacatcgcgtaatgctgagatattccaatagcgtgtgtaatgctaatggcttgtcgtctggcgatgggaaaaacccgggatgactgcagatcatgctaggatttgaaaatggctaacaaggctgctttcagttagtttaaactcttgaacaatagaagggctgtgaaaagcgtagcctaaagcatttgattaactgtcgggatagctaaaaatgaaaatgatactctctcgagcataacggctatcaatgggttaggagtcatcacttaaccgccgcctggaccaactaccacccactaaaagccataatccataaccagtcaccacccgccgggtgtcaagcgcaggccaaggctaatcgcattcggttcaagtgacagcggaccaaacgtgaaatgaactttggccctgcagcagcggcaaccgcaacacaaatggcacgaagcacatgtgcgatatttgtcattggttttggccaacaactcatgtttattctgtggctaaagtacttgtaatatttaaaccatcaaaatgccagctctgaagtcagcagttaggtgctatctaattcgaagttatttgggaatttgttctctctgtcaaccagaccaggccacagaggactgtcaattcagtgagcgggccaaaggtcaggtcatcagggtgtgtcattcagttcaaatgtcactgggccgagaaaaaactactgaaaactacaaatggcgaatagttgatgtttaaattactagagatttaacaacattctgttgccttttgccaagataaattaccaattattgtcggctaaataaatacgtaaatcatttattttagtgcgttcgcattttaattaatttgtaatttaaaacggcacaactttcgatcactgtttgcttaccagtgaaccatgaactccaactccagggtcaacacccaatttaacccattcggcatggtaagtcgccgtaaataattgaacagcccatcgattattggccatgaaatcagtttcaacagatgcgaacaaattttgtacgtccgtaatgtgacatacgtaatgcgcaatcccacagtccgtttacattgaaaattgcaattgatttggcataagcattagcataatttcccaatttctaatttccatttttgactttctctttcactgcaggaatggctatatgcgatatgctgacggttatatttccggcacccggtctctggtatatgtacacattcggcaatcattataagcccctgcatccggtctccatgtgtctggcctacagcattttcaatgaggtaagtcaacaaagacgccagacgttcgtccagtgggccacctactgttacactcagcgaaattgtatgccaactttctccaaaaaaaaaaaaaaaacaattcacaatgttgcatagacacctttgtttgttgagcaatcttagtaatgacctaaccgttaacactacctttaagtaagttataagctttaattttcccacaaatgtccctaactataatccaatggaatctaaaaggatatctaaacaactacagccatctccttattctaatcaaaaaatactccccccacataatttccctccaagaaacccatatacaatacactaataacattccaaccccaataaactacaaactattaacaaatattgccaccaacagatttgggggcgtagcactactagtgcataagtcaatacaacacactgtcctcaacataacaatcgatatagaagcaatagccataaatatagaatctaaacttaaattaaacatattttccacatacatttctccgaccaaaaacataactaaccagacactccataacacatttaacatacaacaaacaccctctctaattacgggagattttaatggatggcacccatcctggggctccccaacaacaaataaacgaggaaaaataactcatagattcattgacaacatgcaccttatcctgttaaacgacaaatctcccacacacttttcaacacacaatacatacacacacatagacctcacactctgctctccaatcctagccccccacgccaagtggaaaatactaaacgatcttcacggtagcgaccatttccctattatcacaacactattcccaacaaccaatccacaaaaattctacagacccttttttaaactcaaagaagccaactgggaacagttcaacgctcttacccaccaaaccaacaagaaataccccacctcccacaacgtaaacaaagaagccgctctaatcaatagaatcatcctttatagcgcaaacctctccatcccacaaacctcacctaacacacatccatacagggttccatggtggaataaacacctcgaccaattacgtaaagaaaaacaacttgcctggaaaaaattaaaccgcacaattactggtgacaacattctagactatagacgcaaaaacgcaatatttagatacgaactaaaaaagaggaaaaaagaagcttccagctctttcacctcaaccatccatcccactactccctcatccaaaatatgggccaatataagacgcttctgcggacttaacccagcaaaacaaattcatgccatcacaaacccagtaaataacgagactacattggctagcaacgaaattgctaacatattcgcacaacatttctctgacctctccggcgactggaacttt

SEQ ID NO: 40085 - DNA, 546 bp, DROSOPHILA
atggacaactatacggacgtactgtaccagtaccgcttggcaccgtccgccagcccggaaatggaaatggaactggccgatccgcgtcagatggtccgcggatttcatctgccaaccaacgagtcgcagttggagattcccgactatggcaacgagagcctggactatcccaactaccagcagatggtcggcggaccgtgtcgcatggaggacaacaatatcagctattggaatctcacctgcgattcgccactggagtacgctatgccgctctatggctactgtatgcccttcctgctgatcatcaccattatctcgaactccctgattgtgctcgttttgagcaagaagagcatggccacgcccaccaattttgtgctaatgggaatggctatatgcgatatgctgacggttatatttccggcacccggtctctggtatatgtacacattcggcaatcattataagcccctgcatccggtctccatgtgtctggcctacagcattttcaatgagatttgggggcgtagcactactagtgcataa

SEQ ID NO: 40086 - protein, 181 aa, DROSOPHILA
MDNYTDVLYQYRLAPSASPEMEMELADPRQMVRGFHLPTNESQLEIPDYGNESLDYPNYQQMVGGPCRMEDNNISYWNLTCDSPLEYAMPLYGYCMPFLLIITIISNSLIVLVLSKKSMATPTNFVLMGMAICDMLTVIFPAPGLWYMYTFGNHYKPLHPVSMCLAYSIFNEIWGRSTTSA

SEQ ID NO: 40087 - DNA, 3665 bp, DROSOPHILA
ttagaaatcgggcacagttgcctggggtactgggaacagtgttcgcagccgcttagtgttcccactgctgttcccagtatttgtatttctcttaaaagcgcttaagagcggattaagcattagctttagctaaaggaaaattaatgtttttcttatatgcaatataagcagttaggctaactattcagttgttaacacaataaagttaaaaggtgtatttatttggacatattacatttaattacaagaatgctggatctctgattgtcaggctttcccctccgcagctgagaacagttgcgaccacaaactgtacccacttgaaggagagaatgcagtcaacattctgcgtccgcgattcatccacaggttgttacaatataaacccaaccaattaatctaaaatgggttaatttgcgagttttgcagtgtcaaaacaataatatttaaccaggtgaaaaacctataatttgataagcctatcaagcttgttatcgctgccattgcattgtcatttggttggggaaaaacctctgcaggaatacaccaatcttatcgcggtgcgtaatgtccataagccccccattcgcatttccccaacttaagcaacacaaatagagtaattactcactcgtaatgtatctagtttaaagtgtagttttaattcatttccgccagctgcattaataatgcaattgagtcatttgcaatcgcactcagaaagtaatgggtattatatagttgagcttaacgaatgcacttgtaccgtggagaagaaaataaataaattaagtttccataaaaaatacgaagtatatagatttgagttttgttttttttttatttaatttcatttttttagatgtttttttaatgattttttatagaataatagaatagaagcttctgggtgttaaatgtatagtaatattgaaggttatatgtgtgggaggttgtattgaaggaatcttaatgcatcttaaacgctggctgcgattgcctaatcacgtccatgtccatgtccatggccatgtccatgtccatgtccatgcccatgtccatgagcgcgttttccgtgcttctttttgcccttcttgcgctcctccctctcgactttggggaaactctcctgcttttccttgcggcagtgggatcgggacagagaacgactgcgacgacctggagggaactcagctggtggtggtcgatgatgggcaataggaaactccggacggggctggtgctcaaaacgcggtccttcaccggattctctttggggaacgtcaaagaatggtccgaattgggggccatgtccatgttcgacaaatggaccatgatgtggaccaaagtgatggccatggtgtccgccgtgatggggacggtaaccttcatggcgcggaccaaagtggtggtggccatgtggaggtccgaagtggtgcccgcgtcgatggggaatcttctgcacttcgccatcggagctggagctggagctggagctggagctggagctggagctggagctcgatgaggagctggatgaggagcgctgctgtcttttcttctccttgccctttcccttgcccttgcacttctgcctcttcttctcatcctccgaggaagaactggagctggaactggaactggacctcggcttgcggcagtgcttcctctccagcgaaccggatgttgaacgggaaagtgatctctctagtcgacggccatgtcgtggacgcgtttggccatatccgtatccgtatcctggtccgaatccgaatccgagatctccacgacagtcgcgcctagatagtctaggcagcgagtggctcctccgattggccgcggcattgtccagggcccacggcaggcccatccattgaaaaaactgggactgatcatgccaaggtccgcgaaaggatctccgatcgaagtcaaagggagagggcccagcgtgaggtccaaagtgtggtccaaaatggggaccaaagtggtgaccatgcggatggtggtggtgcggccgtccatgatgtccatgtcggccatgatgatgcggcccgtgaccatgtttgtggccatgcttgcgaccatgcttgtggccaaaaccgtggccaagacgacgaccgaagccgtgatggccatgtggtcctcggcgccatggattgctgatccagccgtaaccgttatagaatacctcttcgtcctcggagctggagctcgaactggaggagctggaactggatgagctggagctggaagagctggagctggaggtgttggagggctcctcgccagccgccgtctgctcttccgcctgttttttggcctgttgcttggccagcttcttggccttcttcttgtccttcttggccttcttcttcagctgcttcttggtccttttggtgccctgttcctgctcctgctgccgacacctggcctcctcctcggccagcaggatcatggcctgctccagcatgcgctgcaccttggtcaccttcttcagggctttggtgtatcgcttggaactggctggtggcatcctggcctcctcctccaccttggaggtcgtatcctccacaaagtcaatatcgcagtcgatcagctcttgggaaacacgctcccgatcctgatcctgctgctgctgctgctgcagtctggacaactcgctcatgttgatagtatcttcaatgcgatttaccttcactggtgtaatactagttgcttttttgcttggtttaacggtttagagttcgctgggatacgctatgccacaaagctgaaagcttgcaaactgatgccattcgcttgccggccggcactttttatacgctcagcggcgtcggcggttggcggcgccagcggagcggcaaggcggcaaaggggcaaaggggcaaggaagcggtgagaacgccccactggtggagcactgaaatgcgtcgcagaacaaaaacggggaacagtggaacctcaatacaaattaaacatttcaatagacaacagaaaaagcccttcgcaaatttataggtgtgtgaatcttggccttaaaattcaatccatgaaatataaaacgtatctaaataaacaaaatctgcaatctaaatgtgcatctaacatattctaaaaactggcgctaaataacaaaaaaaaaataatattatttgcaacacattgattgagactaacgtgagtgcggttgatctaggtccacgttagggaggctcgtctgtagctcgctgctctctcaccaataccaacgcgcgcgtttgttttcacaatttgctatcgagtacgtggattttgcgtcgttctccgattatcaaaacaaaacaaaacaaagctaaataaaaccggaataacgcttcaaaaaaagctttggcagtggggaattttttgcaagagtttcgtcatgtgatgaaatagctccacaaaacgcagcacaagaaaaaactaaacaaatgattcaaattaacgaaattaagtctatgctgaatttcgccagacactgcaaatatcgaaatggataaagaacagtctggaaaatggaattggtggtcttcctggcaaagttcacagcccaaaaaggaaccgaactcactttgcaggacatttaggcatcggggatcagggatcagggatcattcgttacattctcagatggatatgctcataat

SEQ ID NO: 40088 - DNA, 1665 bp, DROSOPHILA
atgagcgagttgtccagactgcagcagcagcagcagcaggatcaggatcgggagcgtgtttcccaagagctgatcgactgcgatattgactttgtggaggatacgacctccaaggtggaggaggaggccaggatgccaccagccagttccaagcgatacaccaaagccctgaagaaggtgaccaaggtgcagcgcatgctggagcaggccatgatcctgctggccgaggaggaggccaggtgtcggcagcaggagcaggaacagggcaccaaaaggaccaagaagcagctgaagaagaaggccaagaaggacaagaagaaggccaagaagctggccaagcaacaggccaaaaaacaggcggaagagcagacggcggctggcgaggagccctccaacacctccagctccagctcttccagctccagctcatccagttccagctcctccagttcgagctccagctccgaggacgaagaggtattctataacggttacggctggatcagcaatccatggcgccgaggaccacatggccatcacggcttcggtcgtcgtcttggccacggttttggccacaagcatggtcgcaagcatggccacaaacatggtcacgggccgcatcatcatggccgacatggacatcatggacggccgcaccaccaccatccgcatggtcaccactttggtccccattttggaccacactttggacctcacgctgggccctctccctttgacttcgatcggagatcctttcgcggaccttggcatgatcagtcccagttttttcaatggatgggcctgccgtgggccctggacaatgccgcggccaatcggaggagccactcgctgcctagactatctaggcgcgactgtcgtggagatctcggattcggattcggaccaggatacggatacggatatggccaaacgcgtccacgacatggccgtcgactagagagatcactttcccgttcaacatccggttcgctggagaggaagcactgccgcaagccgaggtccagttccagttccagctccagttcttcctcggaggatgagaagaagaggcagaagtgcaagggcaagggaaagggcaaggagaagaaaagacagcagcgctcctcatccagctcctcatcgagctccagctccagctccagctccagctccagctccagctccagctccgatggcgaagtgcagaagattccccatcgacgcgggcaccacttcggacctccacatggccaccaccactttggtccgcgccatgaaggttaccgtccccatcacggcggacaccatggccatcactttggtccacatcatggtccatttgtcgaacatggacatggcccccaattcggaccattctttgacgttccccaaagagaatccggtgaaggaccgcgttttgagcaccagccccgtccggagtttcctattgcccatcatcgaccaccaccagctgagttccctccaggtcgtcgcagtcgttctctgtcccgatcccactgccgcaaggaaaagcaggagagtttccccaaagtcgagagggaggagcgcaagaagggcaaaaagaagcacggaaaacgcgctcatggacatgggcatggacatggacatggacatggccatggacatggacatggacgtgattag

SEQ ID NO: 40089 - protein, 554 aa, DROSOPHILA
MSELSRLQQQQQQDQDRERVSQELIDCDIDFVEDTTSKVEEEARMPPASSKRYTKALKKVTKVQRMLEQAMILLAEEEARCRQQEQEQGTKRTKKQLKKKAKKDKKKAKKLAKQQAKKQAEEQTAAGEEPSNTSSSSSSSSSSSSSSSSSSSSSSEDEEVFYNGYGWISNPWRRGPHGHHGFGRRLGHGFGHKHGRKHGHKHGHGPHHHGRHGHHGRPHHHHPHGHHFGPHFGPHFGPHAGPSPFDFDRRSFRGPWHDQSQFFQWMGLPWALDNAAANRRSHSLPRLSRRDCRGDLGFGFGPGYGYGYGQTRPRHGRRLERSLSRSTSGSLERKHCRKPRSSSSSSSSSSSEDEKKRQKCKGKGKGKEKKRQQRSSSSSSSSSSSSSSSSSSSSSSSDGEVQKIPHRRGHHFGPPHGHHHFGPRHEGYRPHHGGHHGHHFGPHHGPFVEHGHGPQFGPFFDVPQRESGEGPRFEHQPRPEFPIAHHRPPPAEFPPGRRSRSLSRSHCRKEKQESFPKVEREERKKGKKKHGKRAHGHGHGHGHGHGHGHGHGRD

SEQ ID NO: 40090 - DNA, 2713 bp, DROSOPHILA
taatatcctgccattatctgtgccataagggtgttttcaatttggtcattctctacggcatctaaataggaattctatatttagaatattgtgcggaaaaatgcaaactgtttgaaagtcattataaaatattgtagtcttcatttccgcccaagtaccagcacttaaatcgatttatgtatttattttctcgtatttaacaatttcaacttttaatgatcatataaagaaatggtgatattgcactttaaattggccataatttgtactgcataatttacaaacttctgcttgagattgagcgactttgtaaagttctaaattgctacaaaaaaaacgttgccattggttttttttagttagctgcaatcttgagaacaaaagattctctatatattcaattcccagcggttgtatttccttgagcaaaaaccaccgacatttgtgcagtgctttgaaaattcggcaaaagtttcgacactttttgcagggtacaaaagtttcgtggcccaaaccttttccccaagagttccatcgtgtgtctgcgatttgtgcgatttgtttttgtttgcttctgtagatgctttggttgaaaataacttcgaagcgttcagcgacagtggagagagagagaaagagagcgggctagtggcgggaaagagacggaaaagcggaacgcgagcgatttatttatttttatatatcgtagtttggattctgaggcacaacggacacgtggaacccgccgacgaattggcgaatggaaatgggcatacaaatggccagcagataagctagatacgtcatagtttcgtgagcacactgagcgaaaagctagttaagcatcttagttgaatgcaaaagttttcggacatcatgtcgtatgcgtaattttattgtaagcaaataaaacgtatacgacacgtgttccggttgaaaatgctttctagaataactttaagccttttaattttagttatcttcccaaactaaaccgaatctaaatttgccactacaagtgtgaaatttaaaaaaaaaattgtcatcgtggcgtatgcgtaattttgtttcaatcaaaaataaaacgtatacgacacgtgttccggttgaaaatattttttagcacaatttttagatggtttcaaatcacttttgagaatctttagattttagctaagtctgacatctattaaattggcatactattttgttgaatggttttttcgataacccgccccctttttctgtccagtgtagtcttaccagaatgggtcgctcattggcgtaggacagcttgcgtgtgctgcgcagcgtttccagccaaagggagttcctgcgggcggcactcgtggcgccaccaacgctgcccgttcgcgtcatcagcgcggcggccgtgttcaccggttgcgacatttgtgtttgcggcacttgcggctgtaacgattgtagcgcctgtggcgacgtcatcatcaccgtcagcgacggcgaccgcgatggggtgggcgatggcgtcatggagggggtggccgatggagttgatgacgttgacacgaccatgggcggcaagggcggtatgggcggtatgaccggcatgggcggcaagggcggtatgaccggcatgggcggcatgggcggcggcggaggcgtggcatggcatttctggtacaaagcactctgattgcaatcgttatccatgcagaaggccggcgacatgctctgctccaccaagatccaaaaagtggttttgggactccaaagaaaggcggattccttttaaggaatccaaatttgtttgcctatttgggcaagcagttttacttattacttgaactgcttgactttgcccacatcgttttatttaaaagtatccatgaaattgatttatagaaccggatattgaggttcgctcacttaggttcgttttcgaaaaactcactgtttctgtttggttaattgaaagcaaatgtttttgttttcaagaaatttacaggcgcacgcaaacatgttgctttaattataattaaaagattttcaagaaaacaagcgcaatgtttattttaattagcaattctcagatcttgccggttacaggttaaaaccgcactgtttaaacaatgatttatacattttcttcgtggaatacataatttatcacaattttccagccacaaaatcgcattgtcaagccaaccaccacacatatacacggcaaaaaaaaaaagaaggaaggattatctttactgaaacaagtgcacgaaccgccgcagatgaaaatccgagaggttttgatttgattttgattggaattgaaattatttctggccagccgtatttcgactttcgactgcgtaattgtccagaatgtaaacagaattgggaagcagacacaattcagcatttccacaagccgttcacgtccattataatattgaccgatccgatacgatacgatgcgatctgatgcgatccgcaagcgatctggaaaatgaacagagatctggctcccaagttcccaaaatcgagagcgatccctatcgcagacgccgcacaaatggcctggccaccattaagttttatttatattacaatctggtgcgctccggccttcttgttccgccaatatatcggaacagaaaagagcattaaagtgcgccaacttgagtatagacttcgatatgcccattaatagtgatatatatacgactccccaaaa

SEQ ID NO: 40091 - DNA, 462 bp, DROSOPHILA
atgtcgccggccttctgcatggataacgattgcaatcagagtgctttgtaccagaaatgccatgccacgcctccgccgccgcccatgccgcccatgccggtcataccgcccttgccgcccatgccggtcataccgcccataccgcccttgccgcccatggtcgtgtcaacgtcatcaactccatcggccaccccctccatgacgccatcgcccaccccatcgcggtcgccgtcgctgacggtgatgatgacgtcgccacaggcgctacaatcgttacagccgcaagtgccgcaaacacaaatgtcgcaaccggtgaacacggccgccgcgctgatgacgcgaacgggcagcgttggtggcgccacgagtgccgcccgcaggaactccctttggctggaaacgctgcgcagcacacgcaagctgtcctacgccaatgagcgacccattctgtggcaaatttag

SEQ ID NO: 40092 - protein, 153 aa, DROSOPHILA
MSPAFCMDNDCNQSALYQKCHATPPPPPMPPMPVIPPLPPMPVIPPIPPLPPMVVSTSSTPSATPSMTPSPTPSRSPSLTVMMTSPQALQSLQPQVPQTQMSQPVNTAAALMTRTGSVGGATSAARRNSLWLETLRSTRKLSYANERPILWQI

SEQ ID NO: 40093 - DNA, 13560 bp, DROSOPHILA
tgctcgaacaacaacagccaacgaaaaagagacaagcgtttagatctcaaaaacagtaagataaagcaaaggaaagacagtgagatcttgaagctaaaggagcaaaaggggagagaaaaatgggcttagatctgaaaaaggaaactgagagaggaatttaaggaccttttttcacgatctcagatttaatgcaaaataaagagataccagagaaataatgcatactaggctgagaatccgaagaagtccaacctgcgaaaagaataaagcttaaaacgccgatcgtgtagacaggtccccagatagcaaaagagagcgagtgtcggaaagagagtgggagagcaggatcgctgtcaatcagcggcggcttaagccgttactttcagactaagtggtgggtacgaattccccgagggcagtgtgaaaagtctcaaagttggctacttaagctgcaaaagtttgcagcgaccccatttcgacaaaaaagtcaggagcagcagcatagacaaggcacagatgcatccaacaaaaattcataaaataaaaaaacacgcaaagtagttcaaattcgacaagcagtggagttgaatgctctccgttcgtcgccgttgtctcgtgggtgtcgtacacacataaaattacatgtatacatatatatatagatgccagcccatctatatataaacaatatgcatatctatttttttttcttgttattctatagttaatatatatatagttaaacaaaataaaaatatcaaataaaaaacaagtgcaagcaaagagaaaagcgcccaatgcggccaatggaaatgccaaagaaaatgcagcagctacaaattcgacaacaaatgcaaatgcgacagcaacagcagaagaagcagcagcagcaacaacatcaactgcaatttctcaacacataagtccaccgaattttccgtctttgtcgcgcgcgctcacacatatacaagcacacacatccatacacggagacacatgcatgtgcataaatggcaatatggacgaacagcagcagcatttgcgttgtataccaacacagtgacacgcgcgtgccaaatattgccgattttatcacacgaacaacaacaacagcaacaacaacaccagcgggaccagctattaactaaaggagccattacaacaacaataacaagatccagcaaagcaacaacaacaacgaaagcaacgaacattgctggaaggcgtcgcaaaatatcaaagtgggtaccactacaacaacaacaaagatagtgtattatgcttactaacacacacacacacgcacaccaccgcacacacgcacacacctacacacatgccgcctgcacccttctgcacacacacacacgcaaccgaaacgcttggcataccgacacgaacgataataactgtaactgcaaagtgcaagtagcggtagaaaaggacaagggacaatgaacaaatggaggagaagaagcaagaggagcgagagggaatgctaaatgagttatgcgtgcacattcctcaactcacagctgcagttggccactcacgaacacaggcacacacacacacacgcacacgtggactgaaagaaaacttcagtcgaaacttgcaattaaccaacaacttaacttcgtacgcaagatgaacagaaaaaatgcgaaacaaaagtcaaggacacttgtaaatagataaaaggttgaaaagtctcagttaacttgtatagatacatagatagaaagttcagctaatgcaattcattaggctaagaacttcaatgcaagtaattaagaacgttttgaaaggaaaaagcaaaagttgctgactaaattagagggattaaaagtatgtatctagtgtggcaaattatagatgaagggtgcttaacttgtttaaaactcattttcgtagacttgctattggttgaatcaactgcaagtacttggcaaaattaaattactccagtccaaccactaatttaaaacttagtaagtctaaagatctcgaaaggtttccaaaattgcccataacaaactttaaagtgcccgcaaactcataaataaatcacaaattcacgctgccatgttaaatattcccaaaaattgcctgaatcgcagagacgaaccgaaagtttggctcaggaaattaggccaacttggcataccgacaagaactcgaatagattttcggtggtccgtaatccctccccccctaaaaagtcaattttccttttttttcgagtttttttttttttgcaaaggcgaacgggagacggaatacttgacatttttgctcgccgtgcagtatatgcagattaggccaagttggctgagcaaccgcaagccgcaacgaacaggagctttcgagtgctgtgcaatcagaggaaggaccttaaagaacccagcaggacctcccgtttcggataccaagtagaagagagaccccaacgaaacagtaatagtgccagtgtagctgcccttcttgcggtcatgcaaatgcataaggactcacgccttagtcctgggaaaaagggaatacgagattttccagtaaaacaatgaccagaccccatcatcgccgcacttttccgcactttccccccagctcaccaacgcactcactcacggacatgcaaaattcatgaagtaccaaattgagtttgcggtcgaacccaaaaacataactaaaaataaataattgagtgcaaaaggggcaactttaagagcactttctgggcgaacttgaagttgaaacgaaactttttgcattgaagttataatgatattcgaaaaatatattaaaagctactttgattagaatattgaaaagtaaaatgcgtaacgtgataacaaaactattcaaattaaaggataattacattacattcgatacttaaagctacagttggctaagcgaggggttgttaaatcaacaagaatctttgatctaagaaatatgttcatcgttaacgagctcttttacagcctaaaaggcactaaagatttcgaaatttcagcatggaaatcattgtcaattacccattggctaggcggcggtacacacgaaaaccccaattagacattccttgtttttattgtaaataacgaagatcgtaaaatcctgatgtacacacacacacacacactacgagtttagcatccatctattgtaaataaaatgtcaattgtgtttattccccaacctattatccaaaaatacatcaaataaacttgtttgaaaataaaacacaaccaaattttacacattttcccctgaaatttcgttttcgtttgtcgttttgctttggtttcttttaaatatatttaactttttttttgtttatttgcaactcatttcgcctggatgtcgccgctttcgctttctataaacgatgccagatatcccagatatactatacatacatatacatatatgtacatacatacgtacatcccaatgcacttgtgtgttcatttggtgttgttgttgtttgttttttttgggagcattggtgttgttgaatgtgaaatatgcctgagatgcaagaatttgccataaatagatcccagatctctagatgccaatcgcaggttcccagtatttttctctcggcatgaactccaatatctatgcgttcccctgggtcgcaaaatcttaaagtagtcctaatggatattgaaatagcatccccaatcgaaacttgatttatttcattgaacttttcaaaccatttcaaaagtagtcaaacccgccgattttcgatgaaactcgcctgtcgtttggttaatgaccagaaaagcgagcaaagtgagcgtaattaatggaaactgtaatcaatcatgcgctccaattaaccagacccatcccgttcaatattcttgatattcctcgtcggttgtggtactgcagaggtggatatactatactatatatccagcaacccccccccccccccctccacacggcaactgaatgctaatgggaggccccattttccacattttccgccccgtaatgacaccgagcggtcctggtgtacatttcaaaactcattacgatttactcactcgacgtcagcgagggtgtatgtgtacacacacacacatacatatacatacacatacatatatatagtatctatatatatatatatatttatatataggagtcatcatctctgatttcttaatttctttcgcctttcaatgagctccatattgcagcaatttgcttttgtttctcacaagatacttggccttcctcgaaaaactcaaaaagttaattattaataaattaaaattataacatttttttttcacattttgaagatatattagcaatgtaatacctcaaatgcaaatgcgattagtaagtttttccgattgcggctaactaacttatcgcccaaaacacgcataaatattggcattaatttctggtaatacatcgatgataaaatggccaatggggagcagaacacacacacatcgttatctcgttagcgataattaatttggccaaaagcaaaaaaaaaaaaagcacttgggccaacttcagtcgccttttcaccattcaccacttgagttccgtgaatatcgaacattttgtttggcggacagtttttcgggtactctctaatgaatccgcaacgaaaattcaatactgctcaagatactgttattcatgaaaaattcgcctcaagaaagctggcgtcttttattcacatcgataattgtttgaacgattttggtgcataccataaatgaattcatcgattgccagcggccttttgctttctcgcttttacatttttcgcttcttttttttattcgcttcatttacttgcggctctcgagggggcggtggtagtcagatggggggaggagaggagaggagaggagaggagcccagaggaccctcataacctttcacctcgattgggcgggatgttggtgtagccacagtgggcgggtgagtatttcacatttgctgatttttgacgcgtccattttccgttgattgattttgcttgtgcactggaaaaatgcttctatatagaaacctcattctaaactaaattaagagtatttatgccaaaaaaaactatgcatttagtttcaagaaattacataattacaaaacaatataccaacatttttacaacattcatttatttagttttttaaacttttgtttgccgtgtgtgctttatggcattcaatctatgcatatgtgtgcatgtgtgtaagttgcggttgcatctacttaaaaatacatttatttttgcggcatacaatgcgcgaggagacatggaaattgatcaaatatttaaacagttcgcatagtcaatttacataagtccatcagcagtccagctgtccgtttgtgtgtgtgtgtgtgtgcgtgtgcagctgtatgagtgtttgttaaccgcaccacccactgcccaactttccctagccttgccctctgtgtgtgtgtgtgtgtgtctagccttgtcctgtctcatcaatgtcaaagcaatgaacccgaatatccatattgccaacgcttcgcttattcaatttccccgtctgtctatccaagtgaatttcccgccccagacccaaaaacacacatttttcccaccatttcacccccacccccccattttccctccggctaatacccttttcaaaagcctggcagcttaaagagggccactgatgagttgcgggtggcggggtatggtcttagggtattaacagcttcgacttggcgccaaggaaaagcgccttttttgttgtttgcccaacaatgttaatgtgtctatataagcatgtacacaaaaggcaaacagttgcggacaggataatagcagtgcaaattaacctttgtcgtgtgtccacaatattgtagcgcatattgcttaaatttccaacgaatttgaattggctactttagttttgcacttgcagtgttgcttttcagtctaagcagctaactaaattaaactaatgatgaattaaactaatgattgtatctgaaagtatgcaacaatatatttcgtatatacaattgttcaaaggtcacgacaagacaagttctacttagaaactcactttcgctgccttaccacttttaccgggactgtacctgcgcatatgttaagtatgtacgcactcaattagaagggaaaatgtggaaaacggttgaatcgcttatgactcagcatagtgccgcagtaccgacaccccccctccccacccccgaatttcgaatccactccgcagaccgcccgcatttggccattaaaaatgttcaggcatgtgtaattgtttttacacacaagatggccaagatattgagctcgttccgggaagggggatgtgtgtttgatgtctatatggtatatatggtatatatgctatatatatatatatggtatatggtatgcataagtacaagtatatgatgtagatgtagatgtgggtacaacgctggcatccaacttgacaggtgccgacaactttcggatagcgatgtcaatttcttgtcaaaacaatttctttgccattcccggctcactttcgtattgggatttacgcaaaaactccacccgactactacgactactatatatggcctaaatatagcggtacgcctgacacacgattgtaagtagggttttcccgtcgccgttgatggattcattaacttggctcggttcgtttcggttcggttcggtttggcttggcttggcttgctctgctgtccatcagatattgtgagtttgcctgctctgttctttggacactttgtgatggacttttggccccggggggccgggggataagtcagacccatatcgaaaatgtcaggattcgcaaactgctttttcggcgttgcccgtagcaagtagattgtgttgtcaggcttgccaacgctggaggagttgaagctagctctgggcaagtgtttcaatcaatttaagttggcacaaagtctacgattgcagctaaagtggcttaacatccttttgtgcttgtgccatcagccgagtggcaagcagttggggacacctagggttgtctagtgtatttggtgtgcttaaatcttgaaaattaccagctaacaaaatgtcgtgcaacattgtgcccacattcaactgcagcaactgcaaaacatttgacatttgccaaaattgtcaaaagtcaaagttgctagccaaactgagattagaagccagttttagggacggtaagcgttgagatttccggttttgtaatcgtaataccagggtttccgtgcaattagagggtgacccctcaactttggccagcccgtggcatcctttctattattattatttttttttgttacccatatttttcactcgttttcgttcctcgaaaaaaaaaaaaataaaggaaaacagaaatgtgaacacagagcttttgacgaatgcaacgaggtcggcgatgttgttgaggtgagctgtttttcgtttttttgttttttttttttctttttggttttcgggaaggggggcttgtggggagctcagggggcataatgttttgtgtgggactcctggcacaggataaaacagggccaagttaacgattttcctgcttctttttttttattatttttttttttattttgtgtgccctgcaaatgaaatttatgtagagggtcctggctcctgtgccggcattaaaaagccaaaggactcaggcactcggccactcggcactctgcctctgattttgagttgtgcaataaatttttatctgtacatgcgaacgtctactcgtcctggttaccagtccaccataccaccgtcattcagtagctggacgtgaatgcgaatcctgcggattgaagggtttccaaacgagcccaacccagtccagcccgttggccattaaacaacgctgtcaggtctcaatggccacagcctgaaaccagaaaacctgaagcggccaatatacaatagaattctgctggccgtgtcgcctcaacttatatttgtattggcctcgtttcagtgctgtcgcgtctttggctatcgtggaaagggaatgagatacaaaacgggggtacgaaatgtatcttaattatcttgccaatgatatatatatatgcgatactggaaatgccaatctctcgcagacgtaacccgctatcgatgcgaattgataaagccaacaattggcacttaattactgcgtaaccagcattttcacttcgctgaaaggcgaacaattgatgattgaataaaagccgaagcgacagcactaactactcgatggtagttcgaagtcctgggctcctatgctcctcggtccttggtcctttcggctttattgttattggccaagctgcgttgctggccatgttttaacgctgagtgccgcatgacatctgggtcacctggggctacccgagaccgggacacactggagcacggtgctccatggactcgttcaatgtatgtacgtagccgaggtgcttcctctgaccatcgacgaggacattcacacgtggccatcgccttgtgtgtgcgtgtgtgtgtgtgtccttttgacatcggtgccattggatttacggggtgtacgacacgtacagtgcgtctcccggctgtaaggcgattgatggcttaatgccccgtgttgtggtgttgtaataaggttactcccaccttggattactgtgatttgttatgctaagcaatcgtatttgattggctattgaacaaggtaaaagtaaattatcaatttaagtagccaagcttatgctggccattgaatattccgtgatgaaggcatgttattgattaaataaatgccacaaatggtagttagtattagctacttatgtacttgctacaattgtaactttaacaactgctgcaagttgaaatgaaatcatgatacataattaacttataaacgaaaaatgaaaatttcttgttagcttcttgaattggtgttcgtaatgtttgcacctaatctgccaaaatcagtgttcaatttacaaatatttatgaggcgattatcgccgggcaatccaaatgaattacacagctgtgccgcactgtacgtgccagtgtgtgggataaagcaatcattttaatggtgcgattaaaatttcatcagttctactcatcgaacgaaatcgaattaaagcgccgcgcatcgaaagacgagatgtttatcaattattccagattcatctatgaatgagtttttcggctgactcagtctggttgggttttcccacatctttctccattcgcttttttttttcttttttttctctttttttttttgtcagagtgactagctgactgacaaatcaatcaatagccagcgtacgatgttatttatagaatatcccatcaagggaaacccataaacaattgaattcatttgcggccccaaattgccattgcattttccgtcaagcgaatgaaatttttaacccaatttgaggcaagaaaacacccaccaccccccacccgccaaacccctcctccttcgcatcgccgctcttatttttagacagtggcgtttgagagcgttgtaaaatgtacttcctattgcaataaaaattatgacttagtatatgaatactagtatttttaatagatcattgttaccagctcggatcttttgtgccactgtagcccccccccccatcacccctctcccctcaccaccccccttcgaactccattgcacgccactgtctgccgcagtatctgtatctatggcattccgcctggcacggactcctcggatatggtctatggtctatgggctactgggcccccaactattattagcggcacgctcgacatgcaaacgtataatggattcgaatatatatggtgtgtgtggtgtgtgtgtgtgtgtgtgtgtgtgtgtgtggtgtgtgtgtgtgtgtgtgtgtgtgtggtgtgtgcatgcacatgtcggccatacaatgtcggcaatatagaatatatacgaatgtacatacatatatggccaggccagtagtcatccagctgaattcattgctctgcaggtgttcacattttcacattcttcgtccagctgccccaaaaggtccttttgtcctattccagcgttggcccgaaaagagcactgtgagaaaatgcgtgcaattgctaatgactttcaaatcattaccagtacatatgctcctttaacgaacacttattatgggcacattgaatattttaattaattatattgattattattgattgattattaaattatttgtaattagttactttgaatttttgtttttttttaagtacaccgccgcaagcagcacttgcataatttacaatgctggttcgttcgtatttatagttgaattattgatattcatttgttacgttttttgagatttgtttcgaacatttcgttttgtttttttttcgaacgtttttgccttgggccttcctttttgctttttccgcatatgtgagtgactagcggtcaacgagctttcccgcatttcccacatttcccgctttttttctggcacaagtgtgtgcgctggctttgaagcttttgtggcttatcagttctttgtcaacgaggtacaacttctgccaaatagttttcccggaaagctcggccacagctttcgaacccgtctttcatttcattttccatttttcattttccatttttcattttccatttttcattttccttatgggtccttaagccgctcctttgtctttgtcgtgcattcaatgcacgtgccccggattcttgcaatttgctttctgactttctgactttctgcttttctaccttggctttaactttgttgaagataagttgattgtttaatatccatggaatggtttttccttcgcttaatgctacttacttaaaaacgctgcatcggcggatgcaggaataggagcatttggccaaaatgcggatttcttagcggcttttcttctatcttggtcaaattaagtcgctcagccaaaaaagaaaactctgttcaaagctataagcccgaataataacatttgaaagcttttaaaattttaagttttataattttaacgatttattaaatttaaaaataaatataatcacatttttgaatgcaaatcgcttgagaattgaataacgagtaggccaaaaaatatatataaataaaaatataacacgctgattaaaatcggtcgccgctttaggagatggcgcactccatctcgcagttgcagttgcaagatagtaatcatttatcacaacattacaacaacattacattacgctttcaatttgtatgttatcatttcgctaatgaatgaatattattcgactattattctcatcccacagatgtcaattcagaagcttaacgacaccacaaactcgggctacgtgagttccgaggagacggactcgctgctggtgagcagctcgaatccgtcgaagggcggcggtcggacggctctgctccgccaggtgaagagtaactcgacaaatgggccaacgacgggggcgtccacatcgtcctcgggatcggtatcgggcggcggtggtggatccggttccggtggcggatcagcatcgggctcagcagctggggcttccaagccaacgctaatgcgtcaggatcgaacatccacctacctgacaagtccgcagcagtcgcagcacgcgagaatgggttccgaggagagcatgcgaggtggagccagcggagctgccggacacgacgaggatgtggaacagggcctggtccgtagcagcatagtgcctgatatcgaagtacacgaagaggaccaagagcaacacagccagcagttaaatgcaacgacgatggcaacgatgaccaataaccaacagcaacagcaaccgaccatatcaattatgaatttaagcctcaagccaggcgatagccatagccatagctccagtccgggtagtcatcccaatttgggcacctcatcatatcagaatctggcatcgagcataccgcccagcgtaccgagtcgctgcagggcgtgccgcaattgcagtcgacgtgcttccaccacgcccaccacgctgatcgatcgctccgcctcccgcgacagtgtgaaaagtgccttccagcagggcaatcttagcggctccatggccatttgcatatcgaactcggccctgccgcagcagcagcagttgcagcaacagtatcacctgcaacagcaacagcagcagcactatcagttgcagcaacaccatctgcatcagcagcaactgcagcagtcgcagcagcaggtgccgccggtgctaatcacatcatcgccaacgaatggatcacggataatacggcaaagttcacagccggaatcgagcagcacggccatttgttgtggtccccattccgcttgcgttggccacgcccactcgcactcgcacacggtaccgaatgtttcgctgaagcagctgcgcgagagttccggcgatggaatcgcgggcattgcagccgactctctgcggatcaacggtggcatgcggcccttcaagcaggtgagcatatgaatcgcatagccaaacaaaaagcctatgcaaaatgaaagccgtcgctccctttctttcttttttacaaagcgacccacactcgaaaaaaaaaatcagaaaattatttcaaataatattacaagcatttaagtagttaatagaagaaattgcattggttcaaagtgaccagactaggtgttgtaagcactgtcgaagctggtcacattgaagcatccgtttttgtttttttttcgagtgcccacgcaatcccccatgtacataattcatgtacataagccatctgcaatcgcccaacccataaatgtcaaagtggacgccacccaaaagtacccttagcgctctctatgtattatatatatactatctgaactcagcatatcccttctcgatacataagtatatacccataaattggatgttttatggccaccatcgcacttgatgttctatgttcatatcaacgatttccagatcctgcgttgtactaaatgtatagttgggttgaaggctggtagagttttatgggtttcaagtttaataagaaaacgtaacaattaaaaatatgtttcgaaaccttaagtgaccagcctttcgaaatgctgtgctaatagagtgaccgaaatgaatgaaaaagcaaatgcaaaatcaaagctttagaagattatgtttaatggtctcagcagttgctgctataatttattgtatttttaagcgtaatactcatttattaattcacttatagaaactattaagagttcgctacattgcctagatgttaaacttatcaccgccaataagtcatcttcataaacacaagttgtttttatgttcagtttggttttctaataatcataaaacgctggcaatttgtgatttgcttactttgttgctgttgttccttcggtttgttttcgttgaatttatttcttttcttgtttttggccatttaacgtttttcgcgcgctaaaatccaattagtgaaaatcaatattgctcatac

SEQ ID NO: 40094 - DNA, 1338 bp, DROSOPHILA
atgtgcataaatggcaatatggacgaacagcagcagcatttgcgttgtataccaacacagagccattacaacaacaataacaagatccagcaaagcaacaacaacaacgaaagcaacgaacattgctggaaggcgtcgcaaaatatcaaaatgtcaattcagaagcttaacgacaccacaaactcgggctacgtgagttccgaggagacggactcgctgctggtgagcagctcgaatccgtcgaagggcggcggtcggacggctctgctccgccaggtgaagagtaactcgacaaatgggccaacgacgggggcgtccacatcgtcctcgggatcggtatcgggcggcggtggtggatccggttccggtggcggatcagcatcgggctcagcagctggggcttccaagccaacgctaatgcgtcaggatcgaacatccacctacctgacaagtccgcagcagtcgcagcacgcgagaatgggttccgaggagagcatgcgaggtggagccagcggagctgccggacacgacgaggatgtggaacagggcctggtccgtagcagcatagtgcctgatatcgaagtacacgaagaggaccaagagcaacacagccagcagttaaatgcaacgacgatggcaacgatgaccaataaccaacagcaacagcaaccgaccatatcaattatgaatttaagcctcaagccaggcgatagccatagccatagctccagtccgggtagtcatcccaatttgggcacctcatcatatcagaatctggcatcgagcataccgcccagcgtaccgagtcgctgcagggcgtgccgcaattgcagtcgacgtgcttccaccacgcccaccacgctgatcgatcgctccgcctcccgcgacagtgtgaaaagtgccttccagcagggcaatcttagcggctccatggccatttgcatatcgaactcggccctgccgcagcagcagcagttgcagcaacagtatcacctgcaacagcaacagcagcagcactatcagttgcagcaacaccatctgcatcagcagcaactgcagcagtcgcagcagcaggtgccgccggtgctaatcacatcatcgccaacgaatggatcacggataatacggcaaagttcacagccggaatcgagcagcacggccatttgttgtggtccccattccgcttgcgttggccacgcccactcgcactcgcacacggtaccgaatgtttcgctgaagcagctgcgcgagagttccggcgatggaatcgcgggcattgcagccgactctctgcggatcaacggtggcatgcggcccttcaagcaggtgagcatatga

SEQ ID NO: 40095 - protein, 445 aa, DROSOPHILA
MCINGNMDEQQQHLRCIPTQSHYNNNNKIQQSNNNNESNEHCWKASQNIKMSIQKLNDTTNSGYVSSEETDSLLVSSSNPSKGGGRTALLRQVKSNSTNGPTTGASTSSSGSVSGGGGGSGSGGGSASGSAAGASKPTLMRQDRTSTYLTSPQQSQHARMGSEESMRGGASGAAGHDEDVEQGLVRSSIVPDIEVHEEDQEQHSQQLNATTMATMTNNQQQQQPTISIMNLSLKPGDSHSHSSSPGSHPNLGTSSYQNLASSIPPSVPSRCRACRNCSRRASTTPTTLIDRSASRDSVKSAFQQGNLSGSMAICISNSALPQQQQLQQQYHLQQQQQQHYQLQQHHLHQQQLQQSQQQVPPVLITSSPTNGSRIIRQSSQPESSSTAICCGPHSACVGHAHSHSHTVPNVSLKQLRESSGDGIAGIAADSLRINGGMRPFKQVSI

SEQ ID NO: 40096 - DNA, 3825 bp, DROSOPHILA
gcagtcctgcctggtgacgctgaacaaggaaagatccacattggcagccacatcaccgctggatatgcgtcgagtcaaaagctccattgattcgtatcgaaagacgcacctatctccgctggccagcggcagcaattgggttcgggttgttggtggcgcccaatcgtccaccattggatcgcatcagccaagtggaacggtgccgccgccgctaaacgatgaactgcagctggattcgcagtccaattcgagtaggtggcatgaggtctcaatgatgctgtcgtggttcggcgccgcttccgacatcccaaccgactatgccgatgctccgccacccgaggtgcccagtcactacgattgcgattccattagcaatgcggacgatatgccaacgccaactgtgtgccgtcgacagcgcatgttcgccgagcagccgagtgatgctgccacacaggcgcaggaggagcccttctagccagccgacgagcggcagacgcactgcagcacacatctattttttttactgcaattcggtatggaaatccaaaccatccaaccaaccaaccaggcaagtctgcagcgcctgcaaagttcacttatttggcatgctacgctagttttggcttagaattcccggcccatcctgtccagaagttgtgcacgtgcacttggctggcaaccttttcgcatctttatttggtaataaaattatgggtatggtattacatttcacaaataataataaaaaaaaaaaaagaaaaaaaaaaacaaacagcaatttcatgttcaagttacacttttcaaatgatgcagttcatccctgagataaatgattggcaaacatgccagcttgatgatttatgtatgttccgtcgtctggttttgtcctgttttcatcattcctgctcctgcttctgcttctgctcctggttgcccactagaagtgcgtcattcatttttattttgaaatggattcagcgccttgggcacatggtaatccctatggaacgaatgcgaaatcatcatcatcatcatcatcatcatcataatcgtgcagcggcataattagcggctcgaccatcccaaaaggctgcagttcgggcgcatagcaacaggactccaacttgatccgcgactcgattagatcgttgatggtgggcacaaaagtttcatcatacgatagccgcatagagaatataccctgagcggtatccagttcgccgacatgggcatacaataccctattgaatgtcatgcgctggaatgcggtgataccattttttggccacccattggccaatgggcgtacgtgcgacattttgccgcgaaataccaatggcggtgtgcgcgcaaagcttagtgggaggaatcgtagatggttcggtgccaatgtgacagacagggcatgatccacatactctatgttcacacattgggcgtccaacggtgcggtgacgagcaccatggcacgtcgccagccacactcgctgtaggcggcgcatatgtagccctctttatagaaatagctaggcaactcggcacggtagctgctgatcgtcgtatggcgatagaaccagctatgggcattaaataacaatattatcaatcaatcagtcaatcaatcgatttagttagtagcttactttagatcaatggtcatctcggctacaggattcttggcgtactgcggtggcacaatgtggaaccagaactcacacggagagaacacctgcgcaagaaaaaaaaacaaaaaaaaaaagattgaactcctatttcaaagctgtctctttgcttggcacgggaccaaagcgcactcacacagctcatgatgatcgggaagatagagtcctccttgcagatatcctggatacgctgcggcggcagcttccagtgcatgccaacggcatccatgggcagtccatacatcagtgcacacaaactaacatcaccgatatccgggaaatcggaaaacgacggtatcagttccttgacaatgtaaccatccgtcgtttttgattcgagtccatcgctgtcgctatcgttgtccgatgtcgacgctagcagtgtttccactgacgcagcagcttctgccacttggctattgctattcatgaagtcagcattgccggtgtgcagttcatgcatcttcattgggccaggattgttcattgcctggcgctccgacacggtggctaacaactgctccaatggctttccattcacctggacatcggctacatccggcggcacaacgatgttgcaaagcatcttatcgaaaattcgcacatggtgctggtcgtcagtctcagccgtcggcttggaatcggttgtttttaactcgagagcgatcttttaaggggcgaaaaacttattagtaatttctacaatacatatatgtatatatttcgacgcacatgtgctttttcgaaaactttttgcaagtcactcgaatcggaaatcacaagccgtattttggcattgggctggcgcaaatcgagtgctaattcaattgttccattgatctgctgttcagaattagccggcttcttggaatcggtagttttttcctccaaagcgatcttttagaggaaattacttattagtattaactaagcatacatgtgtaatttgaatttacgtacatcttcgacaacttttagcatgtcactcaaatcggctaacactttgttattccgcattttggcactggggcagcgcaaatcgagcggcacatcattgttatcctcggcttcttccgaaatttttctcaatttcgagagcaaagtttgaagtcttccttctttgacgtccatcttgctttgcatcctgattttaactgaatttcaattgtggaacttttcccatgtggcatcaccgccgtaagctagacgctagagatggcaaatgcgccatccgcgaaatccaccacaccaatcggtcattggcggctatcgaacgtgttatcgagccgtttgtttacgcacgtgttgtgtttgatttaatttagttttaatttgtatttaaacgcacagagagcagctagcaaatggacagcgacggtgacgactacgtgatgagcggctccgaccaggagtacgatgacgaggagcgcgaaatactcgaagatctgcgcaagcagcgcaaaaagccacatgatcccgtccaggaagtgctcggtttcagtgatgatgacgacgacgacgacgacgacgacgaggaggagcagcaggatgtggcggaactgatgcgcgacagtgacatcgagggcgccgaagacgatgaccgcgatctgcccaacaccatggactggggcagcaaacggagcacgtactacaacaccgactttgtggaccaggactacagcagctacaatgcccaggaggaggagcaggcacgcgccgaggaggaggaggccaaaaagatccagctgcgtctggccaagcgcatgagcgaggccgatttccagctggacaatgtagaagcagcgcccgcaggcagcagtgatgacaacgagctgagccatataaccaaagtgaccagcgatctggccggcctatcagaacgcgagcgacgacagctgatgcacagtgagtcgccggagttcatcattctcacccaggattttcaacagcatctcgacgaggtgaagaacctattgaaaccggtgctcaactacgttcgcaaacacgatgtgcccatggtgccggcgctgcaatatgccggactctgccacaccgtgctcaccacctactgctccaatgtggctttctatctgctgctcaaggcacgtcgcatcgacgtcaaggcccatccggtgattaggcg

SEQ ID NO: 40097 - DNA, 1377 bp, DROSOPHILA
atgcaaagcaagatggacgtcaaagaaggaagacttcaaactttgctctcgaaattgagaaaaatttcggaagaagccgaggataacaatgatgtgccgctcgatttgcgctgccccagtgccaaaatgcggaataacaaagtgttagccgatttgagtgacatgctaaaagttgtcgaagatatcgctctcgagttaaaaacaaccgattccaagccgacggctgagactgacgaccagcaccatgtgcgaattttcgataagatgctttgcaacatcgttgtgccgccggatgtagccgatgtccaggtgaatggaaagccattggagcagttgttagccaccgtgtcggagcgccaggcaatgaacaatcctggcccaatgaagatgcatgaactgcacaccggcaatgctgacttcatgaatagcaatagccaagtggcagaagctgctgcgtcagtggaaacactgctagcgtcgacatcggacaacgatagcgacagcgatggactcgaatcaaaaacgacggatggttacattgtcaaggaactgataccgtcgttttccgatttcccggatatcggtgatgttagtttgtgtgcactgatgtatggactgcccatggatgccgttggcatgcactggaagctgccgccgcagcgtatccaggatatctgcaaggaggactctatcttcccgatcatcatgagctgtgtgttctctccgtgtgagttctggttccacattgtgccaccgcagtacgccaagaatcctgtagccgagatgaccattgatctaaactggttctatcgccatacgacgatcagcagctaccgtgccgagttgcctagctatttctataaagagggctacatatgcgccgcctacagcgagtgtggctggcgacgtgccatggtgctcgtcaccgcaccgttggacgcccaatgtgtgaacatagagtatgtggatcatgccctgtctgtcacattggcaccgaaccatctacgattcctcccactaagctttgcgcgcacaccgccattggtatttcgcggcaaaatgtcgcacgtacgcccattggccaatgggtggccaaaaaatggtatcaccgcattccagcgcatgacattcaatagggtattgtatgcccatgtcggcgaactggataccgctcagggtatattctctatgcggctatcgtatgatgaaacttttgtgcccaccatcaacgatctaatcgagtcgcggatcaagttggagtcctgttgctatgcgcccgaactgcagccttttgggatggtcgagccgctaattatgccgctgcacgattatgatgatgatgatgatgatgatgatgatttcgcattcgttccatag

SEQ ID NO: 40098 - protein, 458 aa, DROSOPHILA
MQSKMDVKEGRLQTLLSKLRKISEEAEDNNDVPLDLRCPSAKMRNNKVLADLSDMLKVVEDIALELKTTDSKPTAETDDQHHVRIFDKMLCNIVVPPDVADVQVNGKPLEQLLATVSERQAMNNPGPMKMHELHTGNADFMNSNSQVAEAAASVETLLASTSDNDSDSDGLESKTTDGYIVKELIPSFSDFPDIGDVSLCALMYGLPMDAVGMHWKLPPQRIQDICKEDSIFPIIMSCVFSPCEFWFHIVPPQYAKNPVAEMTIDLNWFYRHTTISSYRAELPSYFYKEGYICAAYSECGWRRAMVLVTAPLDAQCVNIEYVDHALSVTLAPNHLRFLPLSFARTPPLVFRGKMSHVRPLANGWPKNGITAFQRMTFNRVLYAHVGELDTAQGIFSMRLSYDETFVPTINDLIESRIKLESCCYAPELQPFGMVEPLIMPLHDYDDDDDDDDDFAFVP

SEQ ID NO: 40099 - DNA, 2593 bp, DROSOPHILA
taccttcgttttgtgttcgatttattgtaatgtcgagcttataaaataaatattgggagtgggagcactgttctagtcgactgactgagtgaaacgaacagctgggactaaaatcgaaatcgaacttgacagccgaacgccgggtgttcaaggactgctgcgatgccatttccaaagccatctagttgatcctagtagttttttttttagcatcatggaattcttcttgttatgtggctatgctattgatttcttttagtgaccaaaagtgcattggcgccccagcattccgtgccttgccgggcatcgacaactggtgcgagatcaattgcctgcgctatccgcccaattgtccggaggacgcctgccaatgtccgtaagtatgcacatgaataatatgtatctaacgagatacatacatagcaagttcgaatctaaacccatatcaattgcacagtcaggagtgcgtggccattggcgagtatgctggacaggatggtgccgacacctactgcatggacaagtgtctcaactatgaatcggagtgtccgccggacagatgccgctgctactaaaccggattgcgagccacagctgtgctgcccacccattgcccatgcggaggatgcgagatgcgatatgcgagatctaatgaattgaatttaatcgaagacactgctctaaattgtttgaatttcaatggcttggcaagggggggtgcctccgtttgttgggctttccgtttcagttctcaggcgtcaccgcaagccttacttactccctcctgtacgcgtcgtacagaaagggtcgggtgaatgcctcgagcagctcgcgctgttcgcgcaatcgtcgagtctgcgccatcggcgactcagcgatgtcgatgttccgccgggcacggaaaagtgccgataccgtgctgcccagctgctgccagcgttcgaaggcccgggattcggtgtgcggcgcatcgagcattactttggacgacatcactgatgccgacaattcagcgatctgtgcagcagcagcagcagcagcaatgtctgtgctgttggtttccggttgaggttgctgttcagattccagattgaactgagattgggactggaggtcgggctccgtttccggctcagatttgccaggagatggcaagtcaacggacagctcatcgggtggcggcattgtctgactgaagatgagcacctcggcgcgctcctcgcgagcatcatcctcgctatcctccaggggcagggcgtcggtgctgccgctaactaaatcccgcacgtgcgcaaaactggaagcgatgcgacgcagtgaggggtcatccttttcctttttcgtcggcattgccggcgcatcggcattggtttccaccggcgccttcttgctgtaggcagcatccattgtggttgctttggtggcgatgacatcgccggcattggtcgtctgcttctggcgcatcctatgcagatttatgctggaaaatttgttaccatagctttgacgcatctcggcgcgcttgcgacgcgcctcctcctccgtcctggccgcctgttggtccctggccatcagttgctgcgcctttgacatcgtctaactccaaacaggaaaacgaaatacggcaaatctttagttaacactagcaaaaaggaaaaaaaaaaaaaaaacaaaacaaaacacggaccgaaacgagcgctgagaatttcgagagtttcaaatgtgcgtcgattgacttggttaccaatttgttttcagaaatataaatacggtagcgtgcactggaacagcttttgcacaacctaccaggatcctatgtactactaattaactactcaattttcgctcgctttcaatcacatctttaatagatcatcctcaatcatcttaagcatagtcttaacaactcatgttgggtggcgaaaaggttttgccaagcgagaaaaattcatatcaattagaatggagtggagcttttggagtggatgcaatgcatccttaagcctttcaatagaacttattgtgcatgtctgcggtgaacaacgtaacgcgatcacaaacatcaatgttataatggaaagtgtgtgttaactgagtgagtgtgtgtgggtgtgtgtgtgtgtgtgtgtgtgtgtgtgtgtgctagaactgcagccgcttcttctgggccaatccattgcccctcaccgtagtctcgaccagcttgcgcttgagcgcaggcttcgtgtcgccggtctgcggattggcgccctccttggcggccagaatggccgacggcattggcaacttgggacccactgtgggcgccggtttgttagcgaaatacggcatgctcagtgcctcgcggcaggacacacgccgcagcggattcatggcaaacaggcgttgcatcagatggatcaagtcattgcccgcggcggtgaatatattgtccaatggtgtgcccggaaagttgcgaaactgcagatagtcgtgcagtttgctcaaatgcggccattcagcttccgtgggtgttcccagtgtggaaaagatccgtgtcagctgatccagatccgaatcgcccggcatgaacggcactcgcagcataagttca

SEQ ID NO: 40100 - DNA, 819 bp, DROSOPHILA
atgtcaaaggcgcagcaactgatggccagggaccaacaggcggccaggacggaggaggaggcgcgtcgcaagcgcgccgagatgcgtcaaagctatggtaacaaattttccagcataaatctgcataggatgcgccagaagcagacgaccaatgccggcgatgtcatcgccaccaaagcaaccacaatggatgctgcctacagcaagaaggcgccggtggaaaccaatgccgatgcgccggcaatgccgacgaaaaaggaaaaggatgacccctcactgcgtcgcatcgcttccagttttgcgcacgtgcgggatttagttagcggcagcaccgacgccctgcccctggaggatagcgaggatgatgctcgcgaggagcgcgccgaggtgctcatcttcagtcagacaatgccgccacccgatgagctgtccgttgacttgccatctcctggcaaatctgagccggaaacggagcccgacctccagtcccaatctcagttcaatctggaatctgaacagcaacctcaaccggaaaccaacagcacagacattgctgctgctgctgctgctgcacagatcgctgaattgtcggcatcagtgatgtcgtccaaagtaatgctcgatgcgccgcacaccgaatcccgggccttcgaacgctggcagcagctgggcagcacggtatcggcacttttccgtgcccggcggaacatcgacatcgctgagtcgccgatggcgcagactcgacgattgcgcgaacagcgcgagctgctcgaggcattcacccgaccctttctgtacgacgcgtacaggagggagtaa

SEQ ID NO: 40101 - protein, 272 aa, DROSOPHILA
MSKAQQLMARDQQAARTEEEARRKRAEMRQSYGNKFSSINLHRMRQKQTTNAGDVIATKATTMDAAYSKKAPVETNADAPAMPTKKEKDDPSLRRIASSFAHVRDLVSGSTDALPLEDSEDDAREERAEVLIFSQTMPPPDELSVDLPSPGKSEPETEPDLQSQSQFNLESEQQPQPETNSTDIAAAAAAAQIAELSASVMSSKVMLDAPHTESRAFERWQQLGSTVSALFRARRNIDIAESPMAQTRRLREQRELLEAFTRPFLYDAYRRE

SEQ ID NO: 40102 - DNA, 1575 bp, DROSOPHILA
taccttcgttttgtgttcgatttattgtaatgtcgagcttataaaataaatattgggagtgggagcactgttctagtcgactgactgagtgaaacgaacagctgggactaaaatcgaaatcgaacttgacagccgaacgccgggtgttcaaggactgctgcgatgccatttccaaagccatctagttgatcctagtagttttttttttagcatcatggaattcttcttgttatgtggctatgctattgatttcttttagtgaccaaaagtgcattggcgccccagcattccgtgccttgccgggcatcgacaactggtgcgagatcaattgcctgcgctatccgcccaattgtccggaggacgcctgccaatgtccgtaagtatgcacatgaataatatgtatctaacgagatacatacatagcaagttcgaatctaaacccatatcaattgcacagtcaggagtgcgtggccattggcgagtatgctggacaggatggtgccgacacctactgcatggacaagtgtctcaactatgaatcggagtgtccgccggacagatgccgctgctactaaaccggattgcgagccacagctgtgctgcccacccattgcccatgcggaggatgcgagatgcgatatgcgagatctaatgaattgaatttaatcgaagacactgctctaaattgtttgaatttcaatggcttggcaagggggggtgcctccgtttgttgggctttccgtttcagttctcaggcgtcaccgcaagccttacttactccctcctgtacgcgtcgtacagaaagggtcgggtgaatgcctcgagcagctcgcgctgttcgcgcaatcgtcgagtctgcgccatcggcgactcagcgatgtcgatgttccgccgggcacggaaaagtgccgataccgtgctgcccagctgctgccagcgttcgaaggcccgggattcggtgtgcggcgcatcgagcattactttggacgacatcactgatgccgacaattcagcgatctgtgcagcagcagcagcagcagcaatgtctgtgctgttggtttccggttgaggttgctgttcagattccagattgaactgagattgggactggaggtcgggctccgtttccggctcagatttgccaggagatggcaagtcaacggacagctcatcgggtggcggcattgtctgactgaagatgagcacctcggcgcgctcctcgcgagcatcatcctcgctatcctccaggggcagggcgtcggtgctgccgctaactaaatcccgcacgtgcgcaaaactggaagcgatgcgacgcagtgaggggtcatccttttcctttttcgtcggcattgccggcgcatcggcattggtttccaccggcgccttcttgctgtaggcagcatccattgtggttgctttggtggcgatgacatcgccggcattggtcgtctgcttctggcgcatcctatgcagatttatgctggaaaatttgttaccatagctttgacgcatctcggcgcgcttgcgacgcgcctcctcctccgtcctggccgcctgttggtccctggccatcag

SEQ ID NO: 40103 - DNA, 255 bp, DROSOPHILA
atgctattgatttcttttagtgaccaaaagtgcattggcgccccagcattccgtgccttgccgggcatcgacaactggtgcgagatcaattgcctgcgctatccgcccaattgtccggaggacgcctgccaatgtcctcaggagtgcgtggccattggcgagtatgctggacaggatggtgccgacacctactgcatggacaagtgtctcaactatgaatcggagtgtccgccggacagatgccgctgctactaa

SEQ ID NO: 40104 - protein, 84 aa, DROSOPHILA
MLLISFSDQKCIGAPAFRALPGIDNWCEINCLRYPPNCPEDACQCPQECVAIGEYAGQDGADTYCMDKCLNYESECPPDRCRCY

SEQ ID NO: 40105 - DNA, 3272 bp, DROSOPHILA
aatcagaggagcagggcgatcgtctaactgaatgtccttgtcaggtgaacaataccactcaaacggacgtggaattgtccaagttggagaaaattcgagaagcggaagaggaaattagttcaccagactttacacccaatcccagtcccaggacaaggaagcgaatgaaagtggaggagccgaacggcaaagtgcaagaggaagacgcgttggaatccaatctcgattcgcgaccaaagaagaccaggaaagtaataactcgtagagcgcccgatccacccgttcgttgtgacgtggagcccaaggtgcgtttgaagttgctcaaaaccgtattggtgggaatggtccagatcgctgttatattagttctcatcatggccatcggatctccggatattatctgctaagctacacaaccatcgaaatattgccaagatgccatagaaaaagaagcagtgaatgcaaaagtaggagagagaaaaactgtagcgggaaatgtggcgataatagcaagtagcgggaaaagcaccgataaccggattcggtgtttgatttcacattatttttcgaatttattgttttcttactcgggcccaagcgaagccacgtcaaagttaataaaatttcatgtgtattgcaaaccgttagcatctaaagcatttcgattcccattcgaatctgtatcggttaagcgaagcggttaagcgaaacaatataaaaagcatttctataggttttaagtttattcaagcatttctttatgtacagcagtgcctgtgcgtgtgtgtaccataaccgtttaaaatcttaaatgtaggcggtggagaaatttacctttacccgttactcgtttgaactctgacccgattcgggcgggattccatccgaacgcgggtgcatagctgtttcgactagggctagaaaaacgtaatcaaatcggtttgcgatcgggtagcgggtaagcgggtaagcggttttaagcaggtatcgggtaagctgtttaacggccaggcggcttagccttgccttgtttgcgtgcatgccgcgtggcattgctagaaaccaaagcaagagttaaaatcgtgttcgcagagctgaacaaagaacacatattctgttagaggaagaacagcgaggagagatggttcaataaagcggaaacggtaaagtatcgtgaaaggtgtgaagtgaaacggttaataagtaactaaagcagaagagaatagcaaaaagataatagaacccaataaactgaataaaaaaggcagaagcggatagtggaaaacagatagcttaaatcctttgtttcgaaatcctgagaactgagaagaaacattgcgtttgctctacttaccgcacaataagtggaaagatgttgttgtccgccggagcacgataatctcgataatagagcaggtatggcgatttgttattcacgaaaggcggtggaataccgccgccggtattcgaaacgatcgccacatccgcacaattgcggaatgtctctgtgttaattgaatgtatataaatcatttcattcgaaaactatctcaactctctgctcacctgccttgccgcagccaacggcttcggtgccattggcacaggtgccccacatattggccgtatagtaggtccattggagtacgcactgtgtgcaggtgacatatggcggcaaacgtaccttgtatcggaatatatccttctttttcgcatcacgcggtatcagataccgatgctctcgactgcccgaaatgagcaacggataacgatcgaagcactgctgtgtcgcctcctgtcgcggattgttgttcggacagaggaacatctcgaaacggccataatgattggcagtcagttccacctcaacatcgatcgtctgaccggcggtatagtagcgtgagatgatgcccttggcgtattgaccaccagcctcgtgcggcctgggcgatttgacgtggtaggcatcgccgcagataccgcaacgtcccttattttgctcccattgcaccgcatagccgccgcagaagagctcattgtcattgtagttcaccggattgggatagccaaaacgccacatggcattcctggccggtggatccattagtcgaccatgtccacgcaccgatgccatcaattgcatcagcaccacaaatcccagctgcaaacgtgtaattaagcattttggctagctaaatgaatcagtgcgttgattacttaccacgcccactggcagcaatacgcccattgtggcagctgtcaagtgtcgcatcgccatgccagattgcctcagatgtccagttgcctagaaagaagcaaacgcgacgtgcaacatgatattatagtgcggcaggatagaacgctttaagtcgaatgcattttgatcagctcaaacgggtttttttttttttggtcctgagcaaacagtggaacgcaatttgcgtagaatattattaattacatgctaagatagatgagcactggtattatcatagtgcatttacaatgacatagcctagagaagttgccacgcttttcaaatcatttcgcaacactgtgcgcagcctctgttgcaattagcaatttatccttaagatgccacactttttagccaatttagcaccactgtgcgcagcacttggtgcattgagtgcagattgcaaggacgtccacctgatccgcttttcgactttatggccgctgccctttataaataaattcatgcccacacacacacacacacacacacacacacgggcacaatctggacccagacagacggggataaatgcgagtgaatttgccactttttgtttaaatatcatcctttttttttaaggcttatcttttatgttaaacatgtttgctcgcttgtcagggcaaaaagggtagaaaaactagtaataaaacgcaagggaaccagactgtcaatggataaatttgctgcctaaggtgtaggattttttttgttttattttcaatttcgaacattacttttaatggcatcatctatgtgtgcatgtatgcatgtacatatgtatgtatgtatgcatgtatgtggcttacgcacactcgcagtcgccggaagggaaatccaatctgtggcaaaaacgagtttacgccgggcacttgaacttggtccggcccccaacgaaatcaaaatatgcagatgatttctgcgctaaaaatatatatatgtgcattggctcgcgttcgaagctcattaaaagccaagggtgcactggcagaaataaaaaagggtgtaattggga

SEQ ID NO: 40106 - DNA, 852 bp, DROSOPHILA
atgcgacacttgacagctgccacaatgggcgtattgctgccagtgggcgtgctgggatttgtggtgctgatgcaattgatggcatcggtgcgtggacatggtcgactaatggatccaccggccaggaatgccatgtggcgttttggctatcccaatccggtgaactacaatgacaatgagctcttctgcggcggctatgcggtgcaatgggagcaaaataagggacgttgcggtatctgcggcgatgcctaccacgtcaaatcgcccaggccgcacgaggctggtggtcaatacgccaagggcatcatctcacgctactataccgccggtcagacgatcgatgttgaggtggaactgactgccaatcattatggccgtttcgagatgttcctctgtccgaacaacaatccgcgacaggaggcgacacagcagtgcttcgatcgttatccgttgctcatttcgggcagtcgagagcatcggtatctgataccgcgtgatgcgaaaaagaaggatatattccgatacaaggtacgtttgccgccatatgtcacctgcacacagtgcgtactccaatggacctactatacggccaatatgtggggcacctgtgccaatggcaccgaagccgttggctgcggcaaggcagagacattccgcaattgtgcggatgtggcgatcgtttcgaataccggcggcggtattccaccgcctttcgtgaataacaaatcgccatacctgctctattatcgagattatcgtgctccggcggacaacaacatctttccacttattgtgcgcaatgccacgcggcatgcacgcaaacaaggcaaggctaagccgcctggccgttaa

SEQ ID NO: 40107 - protein, 283 aa, DROSOPHILA
MRHLTAATMGVLLPVGVLGFVVLMQLMASVRGHGRLMDPPARNAMWRFGYPNPVNYNDNELFCGGYAVQWEQNKGRCGICGDAYHVKSPRPHEAGGQYAKGIISRYYTAGQTIDVEVELTANHYGRFEMFLCPNNNPRQEATQQCFDRYPLLISGSREHRYLIPRDAKKKDIFRYKVRLPPYVTCTQCVLQWTYYTANMWGTCANGTEAVGCGKAETFRNCADVAIVSNTGGGIPPPFVNNKSPYLLYYRDYRAPADNNIFPLIVRNATRHARKQGKAKPPGR

SEQ ID NO: 40108 - DNA, 20366 bp, DROSOPHILA
tattctggatgcgaccacaaaagtcatcgaaacgttccataaagttgggcaagaaaaattctggatcgagagcaataaatacttgacccaagttcgatggttggttctggtccatggttatatgagtggcatattgggcaccagagagcactccacatagaatatctatcacggctgacaggcaatagcctttgtgaccaccagcaggaaatagtaatggtgtccttaaggccaagctgggaaaacaggtggataagccaccctcgttggccgcccagccatgcggtatatactcatcgttggcccaagcccattccacggctccaatatccttcacgctggtcgccatgtctagaacaaaatggtactcctcaccctttacgcagaaggcaaagcagttggagccaatgctggcagactttgagttgggacccatcatcgttggagccgaattggacatcacgattccggctaatcccttgccggcagcgcgaaatgtaaaccagctggccatgccaatgtcgtgagattgctgggccactacgaaaccgatgccagagtcttcagctttcttcaccgccaaatccatacaaaagtttcccacaaacacacccaaggcggaattgccatttacatgggcggtggacaccgtttcactgattattgaaggctctgcgcccaccttggcatgcccgctctgcagatcactgagatagtaatccaggcgattcagcccgcttccgtagtttcctcgatagtccgccacaaccaggaactcgctgatgcagcgcaccttggagggggaaactccaacccgtagcaggcagtcctggataaagcggcgggcctcatccaccagaaccaaggacgtgtcgccccgctgctgcgtagaggcggcatgcatgtgatagccacgaaggcagcttcccagccacagtgctggccggaggagcgccaacattgtgtacagctgattttcatccaatagaacggtgtagctggggttgctatgagtatatatatttagtaagctttatcggaaatggggaacagatttaaaaattactttcacaaaatcatgctatccacagaaattgaaatatttttaaaataaactctacaagtttaaagtatttcattttaaatcttgaaattacattttgtaaaattctaatgttttttgaatgaaaagagtacgaatatagctttagattaaacttttagataccttaggtaaaggctttgaaggaataatttggactaaaatatgggatataatggatatcttgtgcttaacacttagttcaaggccgtggaggtcaaaactgccacgcctctttcgtagaagctatgcgattcctgcccagccgcaacggccaagtcaacagtgaagagtagttctgtacgcgtggagttcaagtaaaccggcaatgtcaacttgctgatgcgtggctccgaggaaatcctattaaaaagtaaagcattagtaaagaattatgcagttaactataagagtggacttactttatccacttgagaatggtgacaggtagatccatcatgatagtggaagccaggagcaattcattgttcttgcactgggcgccctgtaatttgagtccagtgaccccgaagcaacaatccttttgatcgttctttagcccagcatccgtaattgtcacatccagggcgagctcctctagcgaccaactattcgcctgggcaacacactgcctggtggccgtgatgtaggcctccggattgagcaaaccaccgagccagacggggaagccctgcagctccttggcgccagcctgcgaaacaagttgcgacaccttctgcagttgctggacacggttgctgaagtccgtgatccattggatcactgtgcatcctgcaggaactgtataccgcttccaacccttcggaattattccgcgaactagctccgacaacatggaacgatggtggttggtttgtttcttctcgccctggcaaattagaaccacatcctgcaggtccagtatcactgtttgcaacagacgcgaaccacttgtcacctcgcgctcgaagtatcggtacaacggatccttgatgttctccacagtacgcttgagcacttgcagattcttcgggagcagttccaaccaggcagtagctgagttgtgaagtgtcttcatccatgatggacgtccatcctcgccgcgacccactgcagattgctccgattgatcctccacgctgtaagccaactcatcgtcgtcctccagctgctgcatcttgagcagcttactgaccaaatcagtaccacgggtggtaagcaacaccttctccgcattgttcggtaatccaagccacgacggagtctggcggtcagtcaagttctcaatccatttcaagaaatgatcgcgacgggtgccatcgggcatggtaatgtgacggagtcctccggaggcgccatcaacgttagccaccagggcaaagtccgcctcaaagctgcgtgcggtgaagagcttcttcaagaaggaagtcaaaaggcgctgatcgaaatcgttatcgatctttcctccgtaaatggactgcgagagcagggtgaccagggcatcccatggaaccttctctggtggcagattggtgcggcccatggccgtggtgtcgatccaggtgtccaatgtgtcgcaagccacgcgcagatccgattcgttaaactcgtacttcttggcccagccaagaggcacatatcggagtcgctcctggacgatggcgtggaaccaggccagcaggaagtaaagccgagctctttcacttggagtcttcatcatgcgtgccgccggtaccgtagagaaggtgcgcagcagattagctctgatgcctggtggtggctcgaacacaaagatgcggccagcacgcagtaggttaaccggcacctttggattaatctccatcgtgaggaacagccggaagccggaatgaggctgcagggagtgcatcttcttctccagctgcacaagccattggggagctaagtggacgttcttcaagagcacccagcgaccagtcttgcaggccatgttaatagctcgctcagcttgattgaatccttcggctgaaccgatagcaatgctggaaatttgtttattttgctccgctgccaagtcatccactcgcccggatgcatcgaaaccgggcaccgagcacagcagcgcaggagtgttgcagttcaactgcttgtccaccacagaagtgaagtccaattcctgctcggcgttgggcataaagtcttctccgagcacagtgttgaccacattgtgagcggcggcgataacgcgatccggtcggaaggcctggataagcagcagctggtgaacggagctggcaataggactgagagccttggattcgtcccacagctggggtacaacctgttcaggcgagctctgctgcaaccaggcacccagttcgggaatggatcgtaccttctcgagaagctttcggaagatgggaagacgaagggccagccggttgacactctcaatctgctcggcagaaagtccttctacgggcgtgggatttgctagcagaccctcgcggcttcgcaggaagaagttgaactcggcatccaaattagactccgaggtgcccttaaggtgtatcttgcacataagcagggcaaatgtcaagcgatcgatatggatcattcctcgggctactcgctcatagcacacctggaagaggtccctggtgactatgcccagacgctccgagtgatcggttcttccttccagcttggggttattatacagcaccgtggagaagatatcgaggaacatctttagcgagtactggtagaggaagtgcacctggttcagactgtccatggtgaagtagatgttgctgcacgccacagaaagtgggagatactgctgggagacagtctcgatttcggctataaccttgtctgtttcgtccaccttctgattaatatcataggcctccttcttaagcgtctccagtgttgtgataaccgaatcatcgtcaaggatcttgccctttgcgtcgttgagcgcctgcaacagactcttttccaactggcgcaagcgcagacggaattcgccctgcagcttcaacaaatctgagcgcttctcgtcaatatccggacgttcagcctttagcacctggttgaggcactgcgactgcagagagctacgagtgaccgtaaagttaacgaatgttaccctagagcaaatgtcgggcgggaattcgacagtgggatcgcgagtagacaggaagatgacaaaggacggcgacaaatcgatgtcctggtcgcccagggtaatcaacacacgtccaccagtacgacgcaactcgcggttcaacaccgggttaagaataggatcatagttctccacatcctggaccagcaatggattaccgaaacgtagtgcggactccaaattcttgcggaacgaatcatccaagaacgaggtcttcgtgatcttcttacctgcatattcattgagcaggaaagtggtggcctgacccgaaggatcaatgatcagcggatagcggttgaagcgcttcaacataatggcgttctcggtgcacaagtcatccgtgggcagggcatttgcttgccagcggagtcgctcatcgggattggaaagatattcagtgcgggcgatatccgcgcggtactgaatgctggccgcctgcagatgctgtgaccaggttgtgaacaagttcaaacggtaatgctgatcgaagtaaccaccataggcgataaaggcagcggaaagcaacacgtcgccaataatggtggacatctgcgacttgaaagtctcgctagtggactcccagcgctcgcgttcgatgttcaaactcttcagcagtgcaatggagcgatccaccttcgcttggacattctccagatccgttttgattgcttgagcctgggaaataagctgggcatactcctccttgtaggcagcaatactgcgctccagttgctcaaccaagtccttggtttccttggcactggccagattcacatcggcctgctcttccagggaacgcagctcttcgcgaagaggctccacacgcttcaacatatcagcgtactcgatctggatttgggcaaagtagcagtttaggaactattcacgatcaattcgatataaatcttacctgagcaatggcccatttgaccataggaccacacgccatactggcgcgattaaccttctcgaagttatagtccggattgctcagatatttggacttcatcttctctcgaacatcatcgctgttttttgatacaatcattatattagtaatcaatcaaacctctagttcagtatgttatttgaatgaattaagcaagcaaagcagttggattactatgaaacagcgataaatttgaccaaaaccattgaattgaacataagttagagccaattaccaaagttagagttaagttcaggtatgttattagaaagtttttatatttacaaaccataaggcagctcgcttgaacaattcacactaaaactacaaaaaggagtaacgaaatcaactcaaataaaaaccaattctacactcgaaactatagaataacatcaaaaacattaacaaaaacaggaattaaagtcgagaacaaatgggtgttggtaataatttgaatcatgcttacgttatgttctctgtaccgaagttagatacaattgaatttatgaaattttcgcgcataatcacggcacgaatcgatttccaatcggtcgcattttcgcccagcagcagacagatcgattcaagagccaatttgaccaccgatggcggattagccatggttcgcacctcaacgagctgttgcttgcggattgacttgaccgctgcacatcgtcgattagttgattgattgatcggttgttgggttaacatgaaggatcagaattaatatacggtttgagcacaacggtttgcacttatctattgttataagattaggctagattaccatctaaagttaatgactaaagaccgacatcatcccttacacctggatttagaacagggttgcgcctcattaaagatttaatgtactaatttaataaggtccctagtacagcatcatgctaattgggtacatttatctctgtaagaatacaaagcattcggcgaaccgaatgtaactaatcctaagctaaaatccactttagtacaatacacatcatattatatcgtagtttatccaagtatataggatatcataaagtagttaggggttatggtaagttggccagtgcactgcgtatgctttggtgtttgcttgtatgcttgtatatgtatatatagagtatatattgtagttatgggtggttcgaatggagattatattcaaatgataaggatcgacagacccatcgaatgcgttttagacaatagacaacgcattgcgcgttcgctggttaggattcgatggatgaagtgctgtatgatatcgtgatggcagagaaaaagaattgcgtacgtgatcttgtcagtctccaagttaacgatcgaggagatgaagctgtctttaacgaggatgcccctaatggccttccagtcggtggcactctcgttgagcagctcgcagaccgactccagggccagcttgaccacggccggtggattggccatcgaccgcacctcggccaggtgtttctttttaatcgagctaacggctgtcggaggtggaatgtggatattgcgatcgtgagttgagaaaggattgttcggtggggtttaaaattaaacacaaataaatcaaagtagattacattgatataaatgttttgatagcccagaccccccactaattttctactattttcatagttaggtaaaaagagatataacttattcttagataaactaacttaagtgcccgccctgcaattgattgtcgcccgatggacttacctgcttgcgcatcaatgacagccggttccacctgggccaaatcggccataacgtatttgcgtttctcttcgatcttgacggtttggtcagccaagcgtatttgaatttcctgcgactgaatcttcttcttctcggcctcctgctgatcctggaacatctgcttgagcttggcgttggcagcctcgttcttggcctgcaactcctgcttcttcacagccagcgacttttgcatctcctcgacctgctcaacagtttcggcgatcttgttgagacccacattcagatgtagctgctgttcttcaagatcgctgcgcttctcattgtacaacttgacaaagtggtgaataaagtccagatagtgacgtggagtcaccgccatggtgcgaccgccgcgcttggccagacgagcgttggcctggtggagtgtctggtggacatacacgcacgagttgatgaccgcatcgcgatgtgttggattggctggcaccagtggacaaacggatgggaagaagtccggcgcatgccagttgggtttctccaagtccacacgagtggtgaactccttgcccacctggaaaagagccgagtccgaccagtcgccaaaccaatttaagacacaacgattgaatagagctggcgaagtggcagcacgatccttgagtccatcggtggaaggattcatggtgaagaccacgtgcagattgcgcatcacctgctgggtgaaccacttgtacagctcgtcactggagtccaacataagaccctcgcgctgggcaccctccttgcactgagtcatcagagtggtgtactcgtcaccctcgaacaatccaggcacctctccgttggccaacagtgtattcatacgctccaggaaaccagagtccaaaacgttcgactcatccaaaatgaaagcaatcttttcgtctttgcagccagagcggcgcagcacgcaacgcaaatcctcgtcaaagtcctcgctggtgtacttgttgtgcaccttgatctggaatatggacaagccattcatccaggccacaaagcgcgagagcgtagtctttcctgctcccgacactccaatcagcagcaagtgaccttgtggctggcggaagatacgatcaatacgcagcacgtggtcaagaacttcgtcgaacagtacgagtggcacatcgagctcttcctcgtagaagaccttaagtcgggcatggacatattcacgcagctcctcgcgattcaccggcatgtaatccttgcttagccagttgctgtaaaggatcggacgctgcaatgcctcttcttggttgattccagggaagtgcttctggcccaccaaatcgatattctcatttgtccatcggcgctccgaatcgtccaccagtcgatcctggaacaggcgcagagcttcatgggcccagagtcgcaccaaaccttcaacgggaagggaatccaacgggcggatagcctcgcagataccacgcacccaacgagtcatctcacgtggcgaatagacataatgcggctgcatatcctgcgtaaagcgatcctgtgatgccagatagaactcaaccatggcgttggtcaaaggctctgcataaccacgaagagcgggcatcaatcttagcatggcacgcgagaatgtgccgtagatctgcttcagagatgtctctccaggataatccacgtagataataggcacatgtctcaagaaccgatgcgaaagcggcttacggccgggatcagtgggtggattacaagcacccacaaactgaatgcgttccagggaaacccaagcctgatcgctggccctatagaagcccttgtgttccaccagttgacgcaggaacgagattacacgctgcgtgccatagctgtccatgtctggcaaattgatttcatcgcagaacagcaccaaccactttccaatctgcactggggaaagcacaactccgtttggtgtcttgcggtactcgcagtagtgatcaaacgtcttaagcagcaactccggcgtggtagccgatgagaaattcaggcctaccacttccatatcgggcagagcacggagggccgagaacagggtcatagtcttaccagagccaggtgggccgcagagcactaaaaaaaaaattaaattactgcctaccactcacttataactacagttaacttacccaatggtttgtgctcagccagccatgtatacagcagcgactcgtgacgaacggtgtccaatgtgggcacaacaatgtccggagacgctaccttgtgcgtttccacctcgatgactggtaccttgttgctccacggaacccagtcaccactcatgttgacctcgtagtcgataattggagcaccggctgctcccggcagtggaacggtagtcacactgcgcacgaagtctcccaaatcaatgcgcaccttcaactttgcatcgccggcaaatgaccagagaacagagtataccaacgccttgggaatgtagtgctccaactgatcagcggaacaggggaaatctggatgctgagcattgaaagtaagaacatttctagcggcctggttgagcatggagaagagtgagcttagggcacgcaaacgtgtgaagtccatgatgtgctcctggtccatagcgtactccaaggtgcggaccacaatgccatcggctgagaagaatgggagcagaagcaaagcaatatcccgctgcacctggagggatggtgacacctcctcctccttgtcctttgccggcttaatgacgcccacgaaatcttcgtctccatcctccaaaggaatgctacgcaaacgggacagatagttctcgaatatcatctcggtcgagagtacatcctcagagaaccagaccatgccgcaacgggaaactgtagccaaagtggcgaacttcaagtcctgcacctcgaacatcacccgcacgttgggaggcagagaaagacgctctccattaggcagagtcaagagtttgttgtcatccagcacagagttcaagttctctacccactcgggatcaacatcaccgtcgaagatgatccattgtcgcttgttgatctcaccgcgcacattgtcgattatcttgcgcagaatgtgggtgaacaaaccatcggtccattcgcgggtattcgggtccaggacaccataaagggcctccttggaaatggccttgggatcgataacatgagccacgccctcaacgccctcgaagcgttccagtgccttaagaagagtcttccaagcggtggacttgccggatccggatggaccgaccatcataagaccatggtttaggttggagatctggtacagttgcagcacctgggaaaggaacaagattgtcagcacacatatggatcaccccccctcgaattagttactttgtccacccatgtggagccgagtccctgaaggttagtaagcatgtttaaagcgaatggttatgaagtggattataagaaaatccatacccaattgggtgcatcgatttcgaatgaaaggaaaccagaaaggtggaaagtaatcaatttagtgaatatagaatttaagttagttaattagattttaacagtgaaagtgatgttgctaagcaagttaatgattactttcaatcccttgggttcctcatcaaataaatcgatccaatcataaaacgctcttaccttctccatccaggcagcaccctgctcgtcaccctcgccgcagaccaggtagtcctcctggcacaccttccggatctcttccttcagacccttcatctctgcccgagtgtatcccacattggggaaaacatcactcagaagcgagaagagcagtgggatgtcctcggccaccagcttgggcaccatggtttcgcacaccgactggattaggatctcctgctcgggcaggttctccgccactgaagcctcgtcgatgttttcgtcgccgcgttgtttcatctgttccttgatcttcatgatgcgatctcgctttacgtttccagcggagatcaacacggatttcaaagcacgcagaccaaagtcgtagtggctctggttggacagttgctcgtcacatagcttgaagaagggcacgattttgcaggccagtttctcggcggagcggaatccttgcgagaacaacatcacctcagcaataagctgacgatctggcgtggtcatggccagcgacctaaagagtttcttcaagttatccggtagattggaacggccggcatagccaggattcatggtaataaagatagccatgtctggtgagacgcgcacttgtttgcccaccaattccacagtgatactctccttgttgctgtccatctcgtacttcagcgcctcctgaatggtctggatttgctgtgagcaagcggagagcatacgctcctccagtcgattgaactcgtcgaagcagccccatgcgcccacctggcacagaccgacaaagattcggcccatggcctggaaatcgaaggtctcatcgcaattgaatacgagaacgaaacgtcccagttggttacccaatgccttgacggattctgtttttccagtaccggcaggtccaaacggtgagcctccaaggcgtgattccaaagcctgtgtcattgtcaaatagcagcggtccgttagaggagtctgcaccaatcgatcttgaacacccagatactcaaagccatagaagaatcgtgcgttagccatgtgaatggtcagttgctgcagcacctccgtttgacgtggatcaaagtagaatcgcatctcgcacagccattggaaggacttgggcgaggtaactccgttgttaaggagtcgtcgggtcaccgttcgcttgtgcacaaactcgtttataaggtgctcgagcttacgacgacggagaggcggctgctcctgcaagaccgaatcagccaagacgttgagagtgctctctacgttacccaaaacgcgttgcatcggcttagattggttgttctcagaagcctgctgaagggcggactccacatcctcggaccacaggatttgtgcggccagcactacaatctgggcttggtacttgtcacaccactccatgtaggcctgggggtcgatctttccatcgcggaactgcttgatatcctgcacagcctgggccaaaagtgaagccagcgtgaatcgcatttgcttctccaccagcgacagccactcgttgatcttgggatgctccacggtggaaactgggttcatgaagtgcacctcctctccttcgcgcgatgaaatacccagaataacgttgttttcctcgttcaacagaatggcagctacaccagcaaacattttcttgaaatgcttctgcagacgtgcaatatttttgctgttgccaattatctccaaaagatcttcatctcccacgaagtagaagcgagggaatgaggttctctcgcgctccagatactcgcccagagccttctggatctttccaagcaaatcggccaggcgctccaaagatcgctgcacagcagggatgttcagcacatccataaccttgggcgatttggtcaccttcttcatcaacccaaggaattcggagctgatgctttggaaacgcgaagtctccaccggaaggagcgtcttaatatcagcgctgcccgagaagattccctccaagtagacccaacgtctttgcacatcaatccatacatcaaacagggcgttaattctgttgagtttctcctcccaagtcaaagcctcctcctcaaagaccttgtaatagggagacagcttcatggcggccacagagttaatgtgctccttcaccttgttgaacagatcgtcccaaccgcggatgatgcggcacttgttttggtagttgatcaagtccagctcgtagttctgccaggactcacgcacctgcttgaggaactcctccaaggccatttcgccctgggccactaggataatatccttgacgataccctcgtttttctgtagattcacatcccacacctggccgagggacaaatcggataatacccaattaacgcgcagctgcttggtcaattgcttccaatggcgctcctttagagcatccgactttagctccacaatcagcatgttcaccttgatgtagctctggatcaacttcttcacgtactcatacgattcatacatacgaagacgagctggcagctccttgagttgagccatcatggcctccagttgctgacgcaacttacgcggctgcactgaaagccagggtttctcgcgtgtctcatcaatctgtgtccaaaccttggataactcgctccagacgccgcgcagatcttgtagctcctcgagagccacgttcatacgctcagcactgttgttcggaacggctgattcttgcagctccagtgcctccttggccttgaccacgttgtcccgctcctccttcaaacgcgagtacttgctctcaaagatctgcagctgttgtagggcatcgtctggtcgaatcttgccgcctgttggcttggtcttctcccaatcgttaaggaagtccaccgtgcgtgtctccacagccttatcctcggccacaatcttggcctgcaaactggcaacctgtgtctgtatggccgtgtccttgcgcttgataatctcgttaaaggcagaccactcgccttcaatgttgtccacatgcagccaagtgttggggaactggaaacgctggcgctctagaatgcgctgagcctccctgaacacctccacctgcttgtcccaagcaatcatgtccttcttcagtgattggacgtaggtaatgaagctcacggcatccgatgtactggcggcctcgatgctctgcatctccagatcggtacgcgacttggacaccttgctgtggaagcttgtcatctcggttcccagcagcgtgccaaacttacccagtgcctccttgtgccaggaatcgtatttcaaagtgaccttagcctgcaccttggcgtaatcaataataatgggaccataggctctgcgagtatcagacgtatcaaaggtggtgcgcgattgcttgatgtcattcaagcacttgatccacaagttcacatcctcacccaagcgtccatacaacatatcagcctggagatcccacaagctctgatagcgcagccactcatccacgtagttgcgcacctcgctcaccttttgctcgatagctccataggcattctccaagatctttccctcgggcagcttggtcaacagattgcggtacgtctgagaaacatgcttttccaatcccacctggtagcgggtgctttgcagacgcacttgggaggtgacgatcgcctgccaggcgaaaaactgctgcatgatctggaaacgggcttcctcaatggatgggtacagatacatctgctggttggtgatacgaatctcatgcacagcgttctgaatctgcgggtctcctcccagcttgtgagtgggctgagcgggcgcatcagtgtccatagaggtgtcaacctccttcttattgccggtgagagcctccgtccaggcctgaatacccgcctgcagacggagggccagcttcttctccacctcttcatcgagtcgagtaacccagacactcaagttggagtactgacgcagcgagagatcgtcaacggcatgctgaatcttcgagagaatctcaacgaaggtggctgcactgtagggacaggtttccagcgagcgcacatccacatcaagttgctcttcaacaaccagcaaatcgtcgacctgtgacaattacataggaaatctttcagttatctgtacatatttccagtaagtttatataggctcaccttctcctggaactgggtgacacactccgacaggcggatcacgtacggatcgagcttatatgactcccagatgaggccgatgccctcggagaccaggttaagtacatctttccgcagtccagccacaaggggcacaatgctagcacgatcttcgatctatattaaattcaaccatgaattaatttaagtttacaaaacgacaaaagccagatacttttttgcatgcgggagttgaacaaactaaactaaaaacttaaatagtggttgcagatacggattacagaataatcaaactttgaggggacaaacgacactaccttgaatacagaattttgtgctagactcctattattaagctgcatgaaagaaaggttgttggttgttcggttggtttagttcaagagcggatttcgtgtctaagactaaggtgatcatcacttatgggcgtgtaaagtgttttaagtgtggtagatagcaaaattcaagctgcacgccaggaacaaagcaatgcaaatggacagagcaagtgctccaccatggtaacatcttttgaggtgtgaagtggcaagtgtgattttgtaaagtgtaagagctggacaaaggtgtaccaagaaatgtaaggctgctattggataaattatcagggattacattctagcacagatacattttaataaatgtgctgtttaaaaaagctagccaagtaatcccttataactcgtctctgcacagccttcagtaaccgaatcttaccttttccaatgtacgctcataggtgcggacactctcaatcaatgatatagcataaggataaatctggttcgcctgatgcgccttgttcacaatggtcagtggaactctataaaagatttagtttagaaataatttaccataaaccagcataactcatacctaaagcccagattcttgatgttgcgcacttccttggccaaggtgatgatctccggtaaaaagttgacacgcaaacgcagaacattgccacgtccaatgcgggaacgcgttgactcgatggtaaagatacggccagtgctgccaaagttgcgctcctgcaccttgcgggcccactcatggaacacatccgaaatggaaagcttggctctgaagctatcaccgtccgccttcagcttctggccctcgatatgggtctcccagcccttgcccaacacatcctcgacgcgcttcaagtacatcgtcagttggttgtcaatctgacgggcccaaatgatggagccggcaaccggcggcagatctcgcaccgaagacaaacggcagctcttgctctgcggatactgaaccttaaacttctcatgcaaggcctcgatatcatccttgacgcgctgaatcagctgcgtctggtactcccggatagcgccacggatgtgcggacgcacgaagagcgcattgaaacgcgagaaaatgcggaacatctcgttggcgttcttggctgttcccagctgatcacgtagatgagcagttatgcgagtctccacgcgatctgtaggtataatagtttcattagtatacaaataataagccaactattaattccaataattaccaatcttctcctcatagcgcttgacggcggcctcccaggcctcggatccctccttggtgatatccagacagtccacttccttgacgttctcgtaggctaggttgacctcctcgatagcgttagcatcggcagcgtccagactgtagggctgcttggtttccacgacgttgccgtcatcgccaacagccggcttggtgggccgcagcacacgcagaatgacggtgcgcagctgttcgtgctggcgtcggaacttgcgcatgtgctccatgcgagtttgcagcttcttatgggccggagaaacacgccacaccatcttaagatgctcgtcgcgcttcttcttcacaatgtctcggagcaatccctgcaacttgtcgtactcatcatcccagcagctgaaaatctcgaagcactggttcatgacgcgctcgaattcatcgaaaggaatgtgcattaggcgtcgggtgcccagcaccttaagcagttgctgcgacagatcccgcgatatggcctcgataagcttgaggcaccgctggattgggtacttggtgttgcgcaccttgcgtagatgagcgaagatctgctgcacagcaggtcggatcttctccagctcggtagcggaaagtaaatcattaatagggaaatccttcatcagaggattgtagtcggctactgtagctagagcctgttttagtccggtatctgtatcaaaggacacggtggcatggaaacgttttccatgcttcaggatatccaaagttaaagccacctctggcgactcgcgcttttcctgaatgcgatacaaggcccgctccagattgagccagaaggaaatttcctgaaaaattatttcaatgttggatatttcttcttgtatgtcaatagcttattttttctcacctgcagtgcagttcccgagcctggatcgcggttcagcttggtcaccttcttgatctcagcgatccagcggttaacaccattctgcagcagattcaggaaagaagaatcctccaccttgtcgccaaaatcggccaccttggccttgcggttctcctccgcgcacttccggatcacattgttgacggtctggtgagccgtcagcgtgatctccggtatgtcgatgttttgctgcagatgcagcagtcccatctccagctcggccagcttcttctccacggagggagccattttgtcaccatcgcgatcagcacgacccgactccttgacgtacgacttgaagtaaggcgccagggacttgctgatgaaagcgtgcagcgtctcgtagggagatccgtccgagaagttgatcagccgcagctgcgaatggatcgacttgtccgcctccacgaccaggccgcgcttgatgcaggccaaagatgccatccgactgttggtgaagtgaacatcgttgctgatttggtaggttacctgctccttctcgtcctcgccctccgccggctgctcagaatcgtcctctgaaaatgaataagttggttaacaatcgaatttcataatgggcccacccagttaatacattaaacgtataataaatatggtaataaaaaatggttttttttattagccaattgaaataaatccgttgacttattcgtccattattgaactttcaaaggaaaactaattcccgttgattacgtttatcatgtctggctccacatttacccctcacccactttcagtggcattctactgcccacctggcattggactcaatggcacggcattggcatgatttcattatcaaggtgttgacctacggaaattaagcgtccaaggaaaaaccttcgaaattcgtgcgctcaaggctggaccttggcgatgtcattgctcccgcgctgttggccccgttgccaatgtcaatgtgccgatggcattgccttcggccaatgtcaatgtcgctcccaaagctattgaagcggcggaaggtgtgcgcagcctccaaggtcgtttccgtaaacaaactggttgcttggcaggtaccagctgtttcccggcgaattgcttgtaaacaagcaaagccggcaagcggcaaaacagctgttagcacttatcgccctgccgcgactttcgactcatagttatcgaagtgaatcatatgtgctgacgtcatgcgcagaaacccgtttttataccctctaatgcagtacactgattttacaatgcagttggtatttactaacatgaattattgctatccttctgattttacgattaattctgaatgcactttttagcaatatcgtaatataaaaaataatcctatttttgtaattgaatttaaattttaaaaactgtatgaatttgtgatgcttgaaaatttttcatacaagttgctagtgacatggtaaggtattccagcttcgacttccaagccaaaaaatatttcttattggaattcaaacatctgccaaattgatttttaaaaaactggttgcgtattcagctagcaaacccataaatgactcaatgtaaccatatggaactaatattttgaacttataacaaaaagattgcctgaaaagcttgccaactttcttatcttcgccaaaaagacgccattttgtgcaggtaccattttttcaccctagatttgccaacgggacaggaattcttattttacctttaatgcaattgcgttggacgtaaagcgcctgcacctggggatccgagaggaacttccggatggtgtcctggttgacgggatcgtccagagcatcgttcagcgatgcgggaaccacatcgtcctccggcagcaaaatggtcaccgccttccgaagataattggcaaatgcatcatagttcgcaatggacaggttcacgattggatccaccgatgtatcggggttctccaaggagtcacccatgtcccacaaaggttttcggtattaaatactcctcaaaaggtgtacaatttaatttttcacaatgcctcgccctgtgaaaaattacgtgagttttttttttcgcaaaatgtaaacggccctgccactcagttgaaaatcgaaagcaaaaaagccagtgctaccatagttgcggcagatatcagaatacagaactgggcgaaatgttaccagtcagtcaggaatgcttcccgccaaaatttcttagagcaattcccatccacgtgagcgatgtggcaactcgatgcagagaaacagctgttcgattgtagagtgcagtgggttcttcctattttgttattcaataattgtgaaatgtgcaattcaatcaattaaaccggtataatgcaagcactgagaagaacacgaccttggggagctgtctactggaatagctggcggcgcctgctaacccaaagctgcacccggaatgatgtgggtgcataatatatccgagaaacgcaataagacctttgttaaattccagaatccagagctaaccagtgatgtcaagcaccggattgaggctcattggcgggagcagctcagtggaggacagttcaatcccaaggactcgcaggacaagtactacgtgctctccatgttcccgtatccctccggcaatcttcacatgggccatgtgcgcgtctataccatagccgattcggtggctcgtttccagcgaatgtgcggcaagaatgtgtttcagccaatgggttgggattcctttgggctgcccgccgagaacgccgccaatcagcgtggggtggagcccgcgtcctggacggagcagaacattgcccagatgaaggaacaactcaagcgacttggttgctcctttgactggaaccatgaattgtccacctgcagtccaaaatactacaagtggacgcagcatctgttcctaatgctccatcgccatggattggcctaccagaacgaggctcttgttaactgggatcccgttgataagaccgtgctcgcagatgagcaggtggacgccaacggctgttcctggcggtcgggcgccaaggtggaaaagaagcttttgaggcagtggtttatccgaacgagtgcttatgccaaacaattgctagacggtttggaggatcccacgcttcgcgac

SEQ ID NO: 40109 - DNA, 14333 bp, DROSOPHILA
ggtagcactggcttttttgctttcgattttcaactgagtggcagggccgtttacattttgcgaaaaaaaaaactcacgtaatttttcacagggcgaggcattgtgaaaaattaaattgtacaccttttgaggagtatttaataccgaaaacctttgtgggacatgggtgactccttggagaaccccgatacatcggtggatccaatcgtgaacctgtccattgcgaactatgatgcatttgccaattatcttcggaaggcggtgaccattttgctgccggaggacgatgtggttcccgcatcgctgaacgatgctctggacgatcccgtcaaccaggacaccatccggaagttcctctcggatccccaggtgcaggcgctttacgtccaacgcaattgcattaaagaggacgattctgagcagccggcggagggcgaggacgagaaggagcaggtaacctaccaaatcagcaacgatgttcacttcaccaacagtcggatggcatctttggcctgcatcaagcgcggcctggtcgtggaggcggacaagtcgatccattcgcagctgcggctgatcaacttctcggacggatctccctacgagacgctgcacgctttcatcagcaagtccctggcgccttacttcaagtcgtacgtcaaggagtcgggtcgtgctgatcgcgatggtgacaaaatggctccctccgtggagaagaagctggccgagctggagatgggactgctgcatctgcagcaaaacatcgacataccggagatcacgctgacggctcaccagaccgtcaacaatgtgatccggaagtgcgcggaggagaaccgcaaggccaaggtggccgattttggcgacaaggtggaggattcttctttcctgaatctgctgcagaatggtgttaaccgctggatcgctgagatcaagaaggtgaccaagctgaaccgcgatccaggctcgggaactgcactgcaggaaatttccttctggctcaatctggagcgggccttgtatcgcattcaggaaaagcgcgagtcgccagaggtggctttaactttggatatcctgaagcatggaaaacgtttccatgccaccgtgtcctttgatacagataccggactaaaacaggctctagctacagtagccgactacaatcctctgatgaaggatttccctattaatgatttactttccgctaccgagctggagaagatccgacctgctgtgcagcagatcttcgctcatctacgcaaggtgcgcaacaccaagtacccaatccagcggtgcctcaagcttatcgaggccatatcgcgggatctgtcgcagcaactgcttaaggtgctgggcacccgacgcctaatgcacattcctttcgatgaattcgagcgcgtcatgaaccagtgcttcgagattttcagctgctgggatgatgagtacgacaagttgcagggattgctccgagacattgtgaagaagaagcgcgacgagcatcttaagatggtgtggcgtgtttctccggcccataagaagctgcaaactcgcatggagcacatgcgcaagttccgacgccagcacgaacagctgcgcaccgtcattctgcgtgtgctgcggcccaccaagccggctgttggcgatgacggcaacgtcgtggaaaccaagcagccctacagtctggacgctgccgatgctaacgctatcgaggaggtcaacctagcctacgagaacgtcaaggaagtggactgtctggatatcaccaaggagggatccgaggcctgggaggccgccgtcaagcgctatgaggagaagattgatcgcgtggagactcgcataactgctcatctacgtgatcagctgggaacagccaagaacgccaacgagatgttccgcattttctcgcgtttcaatgcgctcttcgtgcgtccgcacatccgtggcgctatccgggagtaccagacgcagctgattcagcgcgtcaaggatgatatcgaggccttgcatgagaagtttaaggttcagtatccgcagagcaagagctgccgtttgtcttcggtgcgagatctgccgccggttgccggctccatcatttgggcccgtcagattgacaaccaactgacgatgtacttgaagcgcgtcgaggatgtgttgggcaagggctgggagacccatatcgagggccagaagctgaaggcggacggtgatagcttcagagccaagctttccatttcggatgtgttccatgagtgggcccgcaaggtgcaggagcgcaactttggcagcactggccgtatctttaccatcgagtcaacgcgttcccgcattggacgtggcaatgttctgcgtttgcgtgtcaactttttaccggagatcatcaccttggccaaggaagtgcgcaacatcaagaatctgggctttagagttccactgaccattgtgaacaaggcgcatcaggcgaaccagatttatccttatgctatatcattgattgagagtgtccgcacctatgagcgtacattggaaaagatcgaagatcgtgctagcattgtgccccttgtggctggactgcggaaagatgtacttaacctggtctccgagggcatcggcctcatctgggagtcatataagctcgatccgtacgtgatccgcctgtcggagtgtgtcacccagttccaggagaaggtcgacgatttgctggttgttgaagagcaacttgatgtggatgtgcgctcgctggaaacctgtccctacagtgcagccaccttcgttgagattctctcgaagattcagcatgccgttgacgatctctcgctgcgtcagtactccaacttgagtgtctgggttactcgactcgatgaagaggtggagaagaagctggccctccgtctgcaggcgggtattcaggcctggacggaggctctcaccggcaataagaaggaggttgacacctctatggacactgatgcgcccgctcagcccactcacaagctgggaggagacccgcagattcagaacgctgtgcatgagattcgtatcaccaaccagcagatgtatctgtacccatccattgaggaagcccgtttccagatcatgcagcagtttttcgcctggcaggcgatcgtcacctcccaagtgcgtctgcaaagcacccgctaccaggtgggattggaaaagcatgtttctcagacgtaccgcaatctgttgaccaagctgcccgagggaaagatcttggagaatgcctatggagctatcgagcaaaaggtgagcgaggtgcgcaactacgtggatgagtggctgcgctatcagagcttgtgggatctccaggctgatatgttgtatggacgcttgggtgaggatgtgaacttgtggatcaagtgcttgaatgacatcaagcaatcgcgcaccacctttgatacgtctgatactcgcagagcctatggtcccattattattgattacgccaaggtgcaggctaaggtcactttgaaatacgattcctggcacaaggaggcactgggtaagtttggcacgctgctgggaaccgagatgacaagcttccacagcaaggtgtccaagtcgcgtaccgatctggagatgcagagcatcgaggccgccagtacatcggatgccgtgagcttcattacctacgtccaatcactgaagaaggacatgattgcttgggacaagcaggtggaggtgttcagggaggctcagcgcattctagagcgccagcgtttccagttccccaacacttggctgcatgtggacaacattgaaggcgagtggtctgcctttaacgagattatcaagcgcaaggacacggccatacagacacaggttgccagtttgcaggccaagattgtggccgaggataaggctgtggagacacgcacggtggacttccttaacgattgggagaagaccaagccaacaggcggcaagattcgaccagacgatgccctacaacagctgcagatctttgagagcaagtactcgcgtttgaaggaggagcgggacaacgtggtcaaggccaaggaggcactggagctgcaagaatcagccgttccgaacaacagtgctgagcgtatgaacgtggctctcgaggagctacaagatctgcgcggcgtctggagcgagttatccaaggtttggacacagattgatgagacacgcgagaaaccctggctttcagtgcagccgcgtaagttgcgtcagcaactggaggccatgatggctcaactcaaggagctgccagctcgtcttcgtatgtatgaatcgtatgagtacgtgaagaagttgatccagagctacatcaaggtgaacatgctgattgtggagctaaagtcggatgctctaaaggagcgccattggaagcaattgaccaagcagctgcgcgttaattgggtattatccgatttgtccctcggccaggtgtgggatgtgaatctacagaaaaacgagggtatcgtcaaggatattatcctagtggcccagggcgaaatggccttggaggagttcctcaagcaggtgcgtgagtcctggcagaactacgagctggacttgatcaactaccaaaacaagtgccgcatcatccgcggttgggacgatctgttcaacaaggtgaaggagcacattaactctgtggccgccatgaagctgtctccctattacaaggtctttgaggaggaggctttgacttgggaggagaaactcaacagaattaacgccctgtttgatgtatggattgatgtgcaaagacgttgggtctacttggagggaatcttctcgggcagcgctgatattaagacgctccttccggtggagacttcgcgtttccaaagcatcagctccgaattccttgggttgatgaagaaggtgaccaaatcgcccaaggttatggatgtgctgaacatccctgctgtgcagcgatctttggagcgcctggccgatttgcttggaaagatccagaaggctctgggcgagtatctggagcgcgagagaacctcattccctcgcttctacttcgtgggagatgaagatcttttggagataattggcaacagcaaaaatattgcacgtctgcagaagcatttcaagaaaatgtttgctggtgtagctgccattctgttgaacgaggaaaacaacgttattctgggtatttcatcgcgcgaaggagaggaggtgcacttcatgaacccagtttccaccgtggagcatcccaagatcaacgagtggctgtcgctggtggagaagcaaatgcgattcacgctggcttcacttttggcccaggctgtgcaggatatcaagcagttccgcgatggaaagatcgacccccaggcctacatggagtggtgtgacaagtaccaagcccagattgtagtgctggccgcacaaatcctgtggtccgaggatgtggagtccgcccttcagcaggcttctgagaacaaccaatctaagccgatgcaacgcgttttgggtaacgtagagagcactctcaacgtcttggctgattcggtcttgcaggagcagccgcctctccgtcgtcgtaagctcgagcaccttataaacgagtttgtgcacaagcgaacggtgacccgacgactccttaacaacggagttacctcgcccaagtccttccaatggctgtgcgagatgcgattctactttgatccacgtcaaacggaggtgctgcagcaactgaccattcacatggctaacgcacgattcttctatggctttgagtatctgggtgttcaagatcgattggtgcagactcctctaacggaccgctgctatttgacaatgacacaggctttggaatcacgccttggaggctcaccgtttggacctgccggtactggaaaaacagaatccgtcaaggcattgggtaaccaactgggacgtttcgttctcgtattcaattgcgatgagaccttcgatttccaggccatgggccgaatctttgtcggtctgtgccaggtgggcgcatggggctgcttcgacgagttcaatcgactggaggagcgtatgctctccgcttgctcacagcaaatccagaccattcaggaggcgctgaagtacgagatggacagcaacaaggagagtatcactgtggaattggtgggcaaacaagtgcgcgtctcaccagacatggctatctttattaccatgaatcctggctatgccggccgttccaatctaccggataacttgaagaaactctttaggtcgctggccatgaccacgccagatcgtcagcttattgctgaggtgatgttgttctcgcaaggattccgctccgccgagaaactggcctgcaaaatcgtgcccttcttcaagctatgtgacgagcaactgtccaaccagagccactacgactttggtctgcgtgctttgaaatccgtgttgatctccgctggaaacgtaaagcgagatcgcatcatgaagatcaaggaacagatgaaacaacgcggcgacgaaaacatcgacgaggcttcagtggcggagaacctgcccgagcaggagatcctaatccagtcggtgtgcgaaaccatggtgcccaagctggtggccgaggacatcccactgctcttctcgcttctgagtgatgttttccccaatgtgggatacactcgggcagagatgaagggtctgaaggaagagatccggaaggtgtgccaggaggactacctggtctgcggcgagggtgacgagcagggtgctgcctggatggagaaggtgctgcaactgtaccagatctccaacctaaaccatggtcttatgatggtcggtccatccggatccggcaagtccaccgcttggaagactcttcttaaggcactggaacgcttcgagggcgttgagggcgtggctcatgttatcgatcccaaggccatttccaaggaggccctttatggtgtcctggacccgaatacccgcgaatggaccgatggtttgttcacccacattctgcgcaagataatcgacaatgtgcgcggtgagatcaacaagcgacaatggatcatcttcgacggtgatgttgatcccgagtgggtagagaacttgaactctgtgctggatgacaacaaactcttgactctgcctaatggagagcgtctttctctgcctcccaacgtgcgggtgatgttcgaggtgcaggacttgaagttcgccactttggctacagtttcccgttgcggcatggtctggttctctgaggatgtactctcgaccgagatgatattcgagaactatctgtcccgtttgcgtagcattcctttggaggatggagacgaagatttcgtgggcgtcattaagccggcaaaggacaaggaggaggaggtgtcaccatccctccaggtgcagcgggatattgctttgcttctgctcccattcttctcagccgatggcattgtggtccgcaccttggagtacgctatggaccaggagcacatcatggacttcacacgtttgcgtgccctaagctcactcttctccatgctcaaccaggccgctagaaatgttcttactttcaatgctcagcatccagatttcccctgttccgctgatcagttggagcactacattcccaaggcgttggtatactctgttctctggtcatttgccggcgatgcaaagttgaaggtgcgcattgatttgggagacttcgtgcgcagtgtgactaccgttccactgccgggagcagccggtgctccaattatcgactacgaggtcaacatgagtggtgactgggttccgtggagcaacaaggtaccagtcatcgaggtggaaacgcacaaggtagcgtctccggacattgttgtgcccacattggacaccgttcgtcacgagtcgctgctgtatacatggctggctgagcacaaaccattggtgctctgcggcccacctggctctggtaagactatgaccctgttctcggccctccgtgctctgcccgatatggaagtggtaggcctgaatttctcatcggctaccacgccggagttgctgcttaagacgtttgatcactactgcgagtaccgcaagacaccaaacggagttgtgctttccccagtgcagattggaaagtggttggtgctgttctgcgatgaaatcaatttgccagacatggacagctatggcacgcagcgtgtaatctcgttcctgcgtcaactggtggaacacaagggcttctatagggccagcgatcaggcttgggtttccctggaacgcattcagtttgtgggtgcttgtaatccacccactgatcccggccgtaagccgctttcgcatcggttcttgagacatgtgcctattatctacgtggattatcctggagagacatctctgaagcagatctacggcacattctcgcgtgccatgctaagattgatgcccgctcttcgtggttatgcagagcctttgaccaacgccatggttgagttctatctggcatcacaggatcgctttacgcaggatatgcagccgcattatgtctattcgccacgtgagatgactcgttgggtgcgtggtatctgcgaggctatccgcccgttggattcccttcccgttgaaggtttggtgcgactctgggcccatgaagctctgcgcctgttccaggatcgactggtggacgattcggagcgccgatggacaaatgagaatatcgatttgcgtccgatcctttacagcaactggctaagcaaggattacatgccggtgaatcgcgaggagctgcgtgaatatgtccatgcccgacttaaggtcttctacgaggaagagctcgatgtgccactcgtactgttcgacgaagttcttgaccacgtgctgcgtattgatcgtatcttccgccagccacaaggtcacttgctgctgattggagtgtcgggagcaggaaagactacgctctcgcgctttgtggcctggatgaatggcttgtccatattccagatcaaggtgcacaacaagtacaccagcgaggactttgacgaggatttgcgttgcgtgctgcgccgctctggctgcaaagacgaaaagattgctttcattttggatgagtcgaacgttttggactctggtttcctggagcgtatgaatacactgttggccaacggagaggtgcctggattgttcgagggtgacgagtacaccactctgatgactcagtgcaaggagggtgcccagcgcgagggtcttatgttggactccagtgacgagctgtacaagtggttcacccagcaggtgatgcgcaatctgcacgtggtcttcaccatgaatccttccaccgatggactcaaggatcgtgctgccacttcgccagctctattcaatcgttgtgtcttaaattggtttggcgactggtcggactcggctcttttccaggtgggcaaggagttcaccactcgtgtggacttggagaaacccaactggcatgcgccggacttcttcccatccgtttgtccactggtgccagccaatccaacacatcgcgatgcggtcatcaactcgtgcgtgtatgtccaccagacactccaccaggccaacgctcgtctggccaagcgcggcggtcgcaccatggcggtgactccacgtcactatctggactttattcaccactttgtcaagttgtacaatgagaagcgcagcgatcttgaagaacagcagctacatctgaatgtgggtctcaacaagatcgccgaaactgttgagcaggtcgaggagatgcaaaagtcgctggctgtgaagaagcaggagttgcaggccaagaacgaggctgccaacgccaagctcaagcagatgttccaggatcagcaggaggccgagaagaagaagattcagtcgcaggaaattcaaatacgcttggctgaccaaaccgtcaagatcgaagagaaacgcaaatacgttatggccgatttggcccaggtggaaccggctgtcattgatgcgcaagcagcggtcaagtcaatccgcaagcaacagctcgttgaggtgcgaaccatggctaatccgccatcggtggtcaaattggctcttgaatcgatctgtctgctgctgggcgaaaatgcgaccgattggaaatcgattcgtgccgtgattatgcgcgaaaatttcataaattcaattgtatctaacttcggtacagagaacataaccgatgatgttcgagagaagatgaagtccaaatatctgagcaatccggactataacttcgagaaggttaatcgcgccagtatggcgtgtggtcctatggtcaaatgggccattgctcagatcgagtacgctgatatgttgaagcgtgtggagcctcttcgcgaagagctgcgttccctggaagagcaggccgatgtgaatctggccagtgccaaggaaaccaaggacttggttgagcaactggagcgcagtattgctgcctacaaggaggagtatgcccagcttatttcccaggctcaagcaatcaaaacggatctggagaatgtccaagcgaaggtggatcgctccattgcactgctgaagagtttgaacatcgaacgcgagcgctgggagtccactagcgagactttcaagtcgcagatgtccaccattattggcgacgtgttgctttccgctgcctttatcgcctatggtggttacttcgatcagcattaccgtttgaacttgttcacaacctggtcacagcatctgcaggcggccagcattcagtaccgcgcggatatcgcccgcactgaatatctttccaatcccgatgagcgactccgctggcaagcaaatgccctgcccacggatgacttgtgcaccgagaacgccattatgttgaagcgcttcaaccgctatccgctgatcattgatccttcgggtcaggccaccactttcctgctcaatgaatatgcaggtaagaagatcacgaagacctcgttcttggatgattcgttccgcaagaatttggagtccgcactacgtttcggtaatccattgctggtccaggatgtggagaactatgatcctattcttaacccggtgttgaaccgcgagttgcgtcgtactggtggacgtgtgttgattaccctgggcgaccaggacatcgatttgtcgccgtcctttgtcatcttcctgtctactcgcgatcccactgtcgaattcccgcccgacatttgctctagggtaacattcgttaactttacggtcactcgtagctctctgcagtcgcagtgcctcaaccaggtgctaaaggctgaacgtccggatattgacgagaagcgctcagatttgttgaagctgcagggcgaattccgtctgcgcttgcgccagttggaaaagagtctgttgcaggcgctcaacgacgcaaagggcaagatccttgacgatgattcggttatcacaacactggagacgcttaagaaggaggcctatgatattaatcagaaggtggacgaaacagacaaggttatagccgaaatcgagactgtctcccagcagtatctcccactttctgtggcgtgcagcaacatctacttcaccatggacagtctgaaccaggtgcacttcctctaccagtactcgctaaagatgttcctcgatatcttctccacggtgctgtataataaccccaagctggaaggaagaaccgatcactcggagcgtctgggcatagtcaccagggacctcttccaggtgtgctatgagcgagtagcccgaggaatgatccatatcgatcgcttgacatttgccctgcttatgtgcaagatacaccttaagggcacctcggagtctaatttggatgccgagttcaacttcttcctgcgaagccgcgagggtctgctagcaaatcccacgcccgtagaaggactttctgccgagcagattgagagtgtcaaccggctggcccttcgtcttcccatcttccgaaagcttctcgagaaggtacgatccattcccgaactgggtgcctggttgcagcagagctcgcctgaacaggttgtaccccagctgtgggacgaatccaaggctctcagtcctattgccagctccgttcaccagctgctgcttatccaggccttccgaccggatcgcgttatcgccgccgctcacaatgtggtcaacactgtgctcggagaagactttatgcccaacgccgagcaggaattggacttcacttctgtggtggacaagcagttgaactgcaacactcctgcgctgctgtgctcggtgcccggtttcgatgcatccgggcgagtggatgacttggcagcggagcaaaataaacaaatttccagcattgctatcggttcagccgaaggattcaatcaagctgagcgagctattaacatggcctgcaagactggtcgctgggtgctcttgaagaacgtccacttagctccccaatggcttgtgcagctggagaagaagatgcactccctgcagcctcattccggcttccggctgttcctcacgatggagattaatccaaaggtgccggttaacctactgcgtgctggccgcatctttgtgttcgagccaccaccaggcatcagagctaatctgctgcgcaccttctctacggtaccggcggcacgcatgatgaagactccaagtgaaagagctcggctttacttcctgctggcctggttccacgccatcgtccaggagcgactccgatatgtgcctcttggctgggccaagaagtacgagtttaacgaatcggatctgcgcgtggcttgcgacacattggacacctggatcgacaccacggccatgggccgcaccaatctgccaccagagaaggttccatgggatgccctggtcaccctgctctcgcagtccatttacggaggaaagatcgataacgatttcgatcagcgccttttgacttccttcttgaagaagctcttcaccgcacgcagctttgaggcggactttgccctggtggctaacgttgatggcgcctccggaggactccgtcacattaccatgcccgatggcacccgtcgcgatcatttcttgaaatggattgagaacttgactgaccgccagactccgtcgtggcttggattaccgaacaatgcggagaaggtgttgcttaccacccgtggtactgatttggtcagtaagctgctcaagatgcagcagctggaggacgacgatgagttggcttacagcgtggaggatcaatcggagcaatctgcagtgggtcgcggcgaggatggacgtccatcatggatgaagacacttcacaactcagctactgcctggttggaactgctcccgaagaatctgcaagtgctcaagcgtactgtggagaacatcaaggatccgttgtaccgatacttcgagcgcgaggtgacaagtggttcgcgtctgttgcaaacagtgatactggacctgcaggatgtggttctaatttgccagggcgagaagaaacaaaccaaccaccatcgttccatgttgtcggagctagttcgcggaataattccgaagggttggaagcggtatacagttcctgcaggatgcacagtgatccaatggatcacggacttcagcaaccgtgtccagcaactgcagaaggtgtcgcaacttgtttcgcaggctggcgccaaggagctgcagggcttccccgtctggctcggtggtttgctcaatccggaggcctacatcacggccaccaggcagtgtgttgcccaggcgaatagttggtcgctagaggagctcgccctggatgtgacaattacggatgctgggctaaagaacgatcaaaaggattgttgcttcggggtcactggactcaaattacagggcgcccagtgcaagaacaatgaattgctcctggcttccactatcatgatggatctacctgtcaccattctcaagtggataaagatttcctcggagccacgcatcagcaagttgacattgccggtttacttgaactccacgcgtacagaactactcttcactgttgacttggccgttgcggctgggcaggaatcgcatagcttctacgaaagaggcgtggcagttttgacctccacggccttgaactaagtgttaagcacaagatatccattatatcccatattttagtccaaattattccttcaaagcctttacctaaggtatctaaaagtttaatctaaagctatattcgtactcttttcattcaaaaaacattagaattttacaaaatgtaatttcaagatttaaaatgaaatactttaaacttgtagagtttattttaaaaatatttcaatttctgtggatagcatgattttgtgaaagtaatttttaaatctgttccccatttccgataaagcttactaaatatatatactcatagcaacccc

SEQ ID NO: 40110 - protein, 4623 aa, DROSOPHILA
MGDSLENPDTSVDPIVNLSIANYDAFANYLRKAVTILLPEDDVVPASLNDALDDPVNQDTIRKFLSDPQVQALYVQRNCIKEDDSEQPAEGEDEKEQVTYQISNDVHFTNSRMASLACIKRGLVVEADKSIHSQLRLINFSDGSPYETLHAFISKSLAPYFKSYVKESGRADRDGDKMAPSVEKKLAELEMGLLHLQQNIDIPEITLTAHQTVNNVIRKCAEENRKAKVADFGDKVEDSSFLNLLQNGVNRWIAEIKKVTKLNRDPGSGTALQEISFWLNLERALYRIQEKRESPEVALTLDILKHGKRFHATVSFDTDTGLKQALATVADYNPLMKDFPINDLLSATELEKIRPAVQQIFAHLRKVRNTKYPIQRCLKLIEAISRDLSQQLLKVLGTRRLMHIPFDEFERVMNQCFEIFSCWDDEYDKLQGLLRDIVKKKRDEHLKMVWRVSPAHKKLQTRMEHMRKFRRQHEQLRTVILRVLRPTKPAVGDDGNVVETKQPYSLDAADANAIEEVNLAYENVKEVDCLDITKEGSEAWEAAVKRYEEKIDRVETRITAHLRDQLGTAKNANEMFRIFSRFNALFVRPHIRGAIREYQTQLIQRVKDDIEALHEKFKVQYPQSKSCRLSSVRDLPPVAGSIIWARQIDNQLTMYLKRVEDVLGKGWETHIEGQKLKADGDSFRAKLSISDVFHEWARKVQERNFGSTGRIFTIESTRSRIGRGNVLRLRVNFLPEIITLAKEVRNIKNLGFRVPLTIVNKAHQANQIYPYAISLIESVRTYERTLEKIEDRASIVPLVAGLRKDVLNLVSEGIGLIWESYKLDPYVIRLSECVTQFQEKVDDLLVVEEQLDVDVRSLETCPYSAATFVEILSKIQHAVDDLSLRQYSNLSVWVTRLDEEVEKKLALRLQAGIQAWTEALTGNKKEVDTSMDTDAPAQPTHKLGGDPQIQNAVHEIRITNQQMYLYPSIEEARFQIMQQFFAWQAIVTSQVRLQSTRYQVGLEKHVSQTYRNLLTKLPEGKILENAYGAIEQKVSEVRNYVDEWLRYQSLWDLQADMLYGRLGEDVNLWIKCLNDIKQSRTTFDTSDTRRAYGPIIIDYAKVQAKVTLKYDSWHKEALGKFGTLLGTEMTSFHSKVSKSRTDLEMQSIEAASTSDAVSFITYVQSLKKDMIAWDKQVEVFREAQRILERQRFQFPNTWLHVDNIEGEWSAFNEIIKRKDTAIQTQVASLQAKIVAEDKAVETRTVDFLNDWEKTKPTGGKIRPDDALQQLQIFESKYSRLKEERDNVVKAKEALELQESAVPNNSAERMNVALEELQDLRGVWSELSKVWTQIDETREKPWLSVQPRKLRQQLEAMMAQLKELPARLRMYESYEYVKKLIQSYIKVNMLIVELKSDALKERHWKQLTKQLRVNWVLSDLSLGQVWDVNLQKNEGIVKDIILVAQGEMALEEFLKQVRESWQNYELDLINYQNKCRIIRGWDDLFNKVKEHINSVAAMKLSPYYKVFEEEALTWEEKLNRINALFDVWIDVQRRWVYLEGIFSGSADIKTLLPVETSRFQSISSEFLGLMKKVTKSPKVMDVLNIPAVQRSLERLADLLGKIQKALGEYLERERTSFPRFYFVGDEDLLEIIGNSKNIARLQKHFKKMFAGVAAILLNEENNVILGISSREGEEVHFMNPVSTVEHPKINEWLSLVEKQMRFTLASLLAQAVQDIKQFRDGKIDPQAYMEWCDKYQAQIVVLAAQILWSEDVESALQQASENNQSKPMQRVLGNVESTLNVLADSVLQEQPPLRRRKLEHLINEFVHKRTVTRRLLNNGVTSPKSFQWLCEMRFYFDPRQTEVLQQLTIHMANARFFYGFEYLGVQDRLVQTPLTDRCYLTMTQALESRLGGSPFGPAGTGKTESVKALGNQLGRFVLVFNCDETFDFQAMGRIFVGLCQVGAWGCFDEFNRLEERMLSACSQQIQTIQEALKYEMDSNKESITVELVGKQVRVSPDMAIFITMNPGYAGRSNLPDNLKKLFRSLAMTTPDRQLIAEVMLFSQGFRSAEKLACKIVPFFKLCDEQLSNQSHYDFGLRALKSVLISAGNVKRDRIMKIKEQMKQRGDENIDEASVAENLPEQEILIQSVCETMVPKLVAEDIPLLFSLLSDVFPNVGYTRAEMKGLKEEIRKVCQEDYLVCGEGDEQGAAWMEKVLQLYQISNLNHGLMMVGPSGSGKSTAWKTLLKALERFEGVEGVAHVIDPKAISKEALYGVLDPNTREWTDGLFTHILRKIIDNVRGEINKRQWIIFDGDVDPEWVENLNSVLDDNKLLTLPNGERLSLPPNVRVMFEVQDLKFATLATVSRCGMVWFSEDVLSTEMIFENYLSRLRSIPLEDGDEDFVGVIKPAKDKEEEVSPSLQVQRDIALLLLPFFSADGIVVRTLEYAMDQEHIMDFTRLRALSSLFSMLNQAARNVLTFNAQHPDFPCSADQLEHYIPKALVYSVLWSFAGDAKLKVRIDLGDFVRSVTTVPLPGAAGAPIIDYEVNMSGDWVPWSNKVPVIEVETHKVASPDIVVPTLDTVRHESLLYTWLAEHKPLVLCGPPGSGKTMTLFSALRALPDMEVVGLNFSSATTPELLLKTFDHYCEYRKTPNGVVLSPVQIGKWLVLFCDEINLPDMDSYGTQRVISFLRQLVEHKGFYRASDQAWVSLERIQFVGACNPPTDPGRKPLSHRFLRHVPIIYVDYPGETSLKQIYGTFSRAMLRLMPALRGYAEPLTNAMVEFYLASQDRFTQDMQPHYVYSPREMTRWVRGICEAIRPLDSLPVEGLVRLWAHEALRLFQDRLVDDSERRWTNENIDLRPILYSNWLSKDYMPVNREELREYVHARLKVFYEEELDVPLVLFDEVLDHVLRIDRIFRQPQGHLLLIGVSGAGKTTLSRFVAWMNGLSIFQIKVHNKYTSEDFDEDLRCVLRRSGCKDEKIAFILDESNVLDSGFLERMNTLLANGEVPGLFEGDEYTTLMTQCKEGAQREGLMLDSSDELYKWFTQQVMRNLHVVFTMNPSTDGLKDRAATSPALFNRCVLNWFGDWSDSALFQVGKEFTTRVDLEKPNWHAPDFFPSVCPLVPANPTHRDAVINSCVYVHQTLHQANARLAKRGGRTMAVTPRHYLDFIHHFVKLYNEKRSDLEEQQLHLNVGLNKIAETVEQVEEMQKSLAVKKQELQAKNEAANAKLKQMFQDQQEAEKKKIQSQEIQIRLADQTVKIEEKRKYVMADLAQVEPAVIDAQAAVKSIRKQQLVEVRTMANPPSVVKLALESICLLLGENATDWKSIRAVIMRENFINSIVSNFGTENITDDVREKMKSKYLSNPDYNFEKVNRASMACGPMVKWAIAQIEYADMLKRVEPLREELRSLEEQADVNLASAKETKDLVEQLERSIAAYKEEYAQLISQAQAIKTDLENVQAKVDRSIALLKSLNIERERWESTSETFKSQMSTIIGDVLLSAAFIAYGGYFDQHYRLNLFTTWSQHLQAASIQYRADIARTEYLSNPDERLRWQANALPTDDLCTENAIMLKRFNRYPLIIDPSGQATTFLLNEYAGKKITKTSFLDDSFRKNLESALRFGNPLLVQDVENYDPILNPVLNRELRRTGGRVLITLGDQDIDLSPSFVIFLSTRDPTVEFPPDICSRVTFVNFTVTRSSLQSQCLNQVLKAERPDIDEKRSDLLKLQGEFRLRLRQLEKSLLQALNDAKGKILDDDSVITTLETLKKEAYDINQKVDETDKVIAEIETVSQQYLPLSVACSNIYFTMDSLNQVHFLYQYSLKMFLDIFSTVLYNNPKLEGRTDHSERLGIVTRDLFQVCYERVARGMIHIDRLTFALLMCKIHLKGTSESNLDAEFNFFLRSREGLLANPTPVEGLSAEQIESVNRLALRLPIFRKLLEKVRSIPELGAWLQQSSPEQVVPQLWDESKALSPIASSVHQLLLIQAFRPDRVIAAAHNVVNTVLGEDFMPNAEQELDFTSVVDKQLNCNTPALLCSVPGFDASGRVDDLAAEQNKQISSIAIGSAEGFNQAERAINMACKTGRWVLLKNVHLAPQWLVQLEKKMHSLQPHSGFRLFLTMEINPKVPVNLLRAGRIFVFEPPPGIRANLLRTFSTVPAARMMKTPSERARLYFLLAWFHAIVQERLRYVPLGWAKKYEFNESDLRVACDTLDTWIDTTAMGRTNLPPEKVPWDALVTLLSQSIYGGKIDNDFDQRLLTSFLKKLFTARSFEADFALVANVDGASGGLRHITMPDGTRRDHFLKWIENLTDRQTPSWLGLPNNAEKVLLTTRGTDLVSKLLKMQQLEDDDELAYSVEDQSEQSAVGRGEDGRPSWMKTLHNSATAWLELLPKNLQVLKRTVENIKDPLYRYFEREVTSGSRLLQTVILDLQDVVLICQGEKKQTNHHRSMLSELVRGIIPKGWKRYTVPAGCTVIQWITDFSNRVQQLQKVSQLVSQAGAKELQGFPVWLGGLLNPEAYITATRQCVAQANSWSLEELALDVTITDAGLKNDQKDCCFGVTGLKLQGAQCKNNELLLASTIMMDLPVTILKWIKISSEPRISKLTLPVYLNSTRTELLFTVDLAVAAGQESHSFYERGVAVLTSTALN

SEQ ID NO: 40111 - DNA, 5473 bp, DROSOPHILA
agaactatatctttctacttaaagcgagaaatatgaagagtaggttaactaagatcaattttaaagtcgtatagtattgcagaaataggagaattgaaggccatgaaattaaacttatataagtattatatctttctcagtactccatgcttcatgtgactccgccgatgagcactccggatgtggtggccaactgcaagaaactggtaacccccactggctttgtggacgtcgaccagttgacgctgcagcacaacaagtacagcaacgtgttcgccatcggcgattcggcgtccagtcccaactcgaagacggccgcggcggcaggtaaatgggttgggaatcctgatcagaatattcaattgatttttcacctccagccgcccaatcaccggttgtgttcaaaaacgtaatggcggcgatcgagggcaaagccccaacggatatctacgatggatactcgtcctgccccatcgtcaccggctacagctcctgcatcctggctgagtttgattacaacctcacccccgtggagacctttccattggaccagtccaaggagaggtactccatgttctttatgaagaaggagctgatgccggtgctctactggaagctgatgatgaacggctactggaacggaccggcactaatgcggaaaattttctcagtgctaaagtttaataaaaagcaatagggacctcaaatgatctttaattaattttaaaagaatatttggcatcatcataaccattccataccttaatatcatactaatttataaacattgtacttttaatttggtatgtgagatcataaataaaagtattaaattagtttaaaatctagtatatctaaatattttaacctattcaaatggcacgcactgtacatagcctcggtttcagtatgtatcaagtatatattggagcaggggatggtatttgcagcattaaccgctttctaaagttcggtcactctaaaaccaagcgtggcgtcgcttggcgctgtaaatttgaaggtaacgaactaaaagagagatcgattccagcaacaaaacaagaagaaacccaactcccgtatatcaaattagttgcaaaaacgagctgacaacatgaaggcagtgtaagtgatatgacagttcccgaaagaacaactccatcaatgagaatacccatttgcagacccaggacgccgatgcgtgtcgtcccgaaaactccgcgggtgcatcaaacggtggagaaacagcgacgagacacctccgacaaggccagggatccagtgaatgtgttctgtcgagtgcggccactacaatccgacgcagatctcacctccctaagggtcaagaactccacgacgatcgcactgaatccgcaggatcagctgctgcagcatcacaagccacacaacggcgcccagcgcgaggttcagtacatattcaagcacgttttccagccggatgccacgcagcaggatgtgtacgcagctgtggcccagccgttggtggagaacctactgaaaggccgaaacagtctgcttttcacctacggcgtgactggaagtggaaaaacgtacaccatgaccggcaacctgcgacaccgcggcatcatgccgcgctgcctggacgtgctctttcgcaccatttcagattaccaggccaagaagttcgtcttcaagccggacaagcttaatggcttcgagatcctgtccgaagaggatgcgcttttggagcgccaacacgagatgaaccagcgttttgctggctcaggacgatttgccttcaggcacaaggactcggatccggaaattgcatcccaggcctccgtggagccaattccgctgctgggtttggatgaggacaacatgtactcggtgtttgtcacctatattgaaatttacaataacagcgtctacgacctccttgaggactcgggtatacagaagtaagtatttattaagcattacatttaaagaaatctaactgtattcttgacccgacaggactttgcagagcaaaatcattcgtgaagatgccaatcgacacatgttcgtccacggcgtcacagaggtggaggtcaagaccgtggaggacgccctcgaggtctttcaaatgggccagaagcgcaaacgaatgggacacactgttctcaatgcagaatccagtaggagtcactcggtgttcaatatacgcttggtgcaggcgcccactgatagccagggtgagaatgtggttcaggaccggcaaaacatcacagtgagtcaactgtccctggtggatctggcgggcagtgagcgatcctcaaggaccaagaacaccggtgtgcgactccgtgaggcgggcaacatcaataattcgctgatgacgctgcgcacttgcctggaatatctgcgcgagaaccaactcgcggctagcaatggattggcacccaagaaggtcccctatcgagactccaagatcacacacatgtttaaaaactacttcgatggcgaaggccaggtgtccatgattgtgtgcatcaacccaagaattgaggactatgatgagaatatggtaaactatttttctgacaacaatgtactctggtccctaaaatttatttatcccgtttagcaagtgatgaagttcgccgagatgacccaggaggtgcaaattgctcgggcgactcctatgaagcaagatttgggtctgactcccggccgtcgcaaggccaacaagctgttcaagattgccgttaataatctaaacgagctgggcattcctgaggccaaggatttggaggtggacgtgggtttggtgtacagtttgggacccgattttcccgcctacgaaatggacagtcccgaggcacagatcaaaatccgcgagctaatgcattatctggagcagcgcatagaaaagcgaaagaagctgcgtgccaacttggacattaaatgtaagacgtcactttcttaatcttaacattgaaatactaattccacaactttcaggtgacagcttccggcagatgctgatgaaccttgaccgcgacaatcttcagctgcgcacggagctcgcctccttaaaggctgtttacaagcaggagcgcgatcgcagtgcggcactcgagaagaaggttcgcatccacgagagctccattgacgtgcttaacaatacgctaagcaagcaagaacggcagattgaagagctgactttcaagctgaacgagaaggagaatatgctcacccaaaaggagcacgagaaggaaaagcaaaagaagaagttcagctccaagctggccgttgagtcggacaaaaataagcgagagtttgaactaaagctgcgtgaacagcgagtgaaattgcaggaacgcatgcgcatcaaggacgagaagttgcgattggtctccaacattctgcagtccgaagatctgcccagtttgccgcggtcacagagctcggaaaacatacttaatgagaaagatcgcggtgcatatacggcgcgcacggaggagtcctcggtgccagctacacgaacagatatatatgcaacgccacgtcatgtaagtgtatgattaatcctagaatattgcaatatctattgataattttatatcccaacagggtgcagcagcggccaacaatcggcatagacgctctcgatccgcaggcgacaagtggctggagcatcgggcagctaatcccgttccgcttggcactattatgcagccgtatctgaagaatcgcaaatccgtaacgaaactaaccgacttgaaggagttgactgctcacggaactacgaagtactgtctcgtctcgcaggatgcggatacggatggcgatgtggagacgaagctgtataagggcaatgtaattcccacttgtggcggtggtgcccaagttgtgttcaacgatgtggagtgcctcaagcagaagtcaccggttcactcgcccacgcgaaagcgacccagcaatggcaacatttcggctctgggcggcggtgcagtgcccagcacggtcacctcagcccaggacgtagcctcccgctgcaatctcggcattgagggacacagcagcaagaagtcgaaaatctaaaaatgactcagcgtggaattctcaaagtcaattacccatttagttcatagttacttagtttccataacttaaatttaagtttattactcacccacttcggtttttggagttgaatcgcattgaagtgatttgtttgattaaagaaaagttaatctgtataaataatcccgtaaatgaattcgcaacccctcgcaaatggaaatgtttcctgctccaaatagtcggtacccggagggtatctgccaagagcagttgttagaaactatccaagcatcgtccaatcatagaactactctagtgttattataaagtattaaatattttattgtttttcggagtgaacccaactccagtccagtcacaaaatgaacaaataaagtgaattacgcgcatatactgaaagtgatcaatttggtttttatcaattttagattttctggctgcaaagctcccagagttccgtgaagcaataacatgtggcacatagatggttttaactatttttattattattcctgcgtttattcagatttatgcttaaaccgataaattttattgaaatacatacggtaccattacacatacatatttgtagattaatttcaattactaataaatcagtctataattaaaatatatgttcgcttaatgatttcacgtgtgtgagtgttgttgtgttgcagtgttcatgttgcagttgctgtttcgtgggtgtgagttgctgctcgatgagttcggcagatgactcttaaacgctatgtgcggcaaatgtggcaggttcctggcaaatgaggaatttcgaatttggaattggaagccaatatcgctaatgctactgcacgacaaatgaatcaaatcaaatgtaaaagggaaacaatcagaacgtgataatagaatttaggtacatacccgttcaagtacaattaaacaaaacaagttggacgagacgaaacaaaaccacaaatgtaaacataataggcggcaaactcaactcaagtggtgggccaatattaacatatccatcttatccaaatttcatttaaacaaattacaatttaatcaatataaagctctgttctcataaacgctctctcaggttcacacgacgcgaaacaattatttgcatctgcagttgtaaatctgcgctttataatacgtaatcataatcataatattatcattaaggtaatcgattcttgccatatacacaatagcaataaaaactaagaagcgaaattattctacggtggaaaacgaattttggctatgaagcaacgtaatttaaaagggtattattaacaatatacactcacagccacagccacaccccgaccacccgactaccctactcttctttcccttaattgtttaatgttttttgtgtgtgtgttacggtgtgtgt

SEQ ID NO: 40112 - DNA, 3180 bp, DROSOPHILA
cttggcgctgtaaatttgaaggtaacgaactaaaagagagatcgattccagcaacaaaacaagaagaaacccaactcccgtatatcaaattagttgcaaaaacgagctgacaacatgaaggcagtacccaggacgccgatgcgtgtcgtcccgaaaactccgcgggtgcatcaaacggtggagaaacagcgacgagacacctccgacaaggccagggatccagtgaatgtgttctgtcgagtgcggccactacaatccgacgcagatctcacctccctaagggtcaagaactccacgacgatcgcactgaatccgcaggatcagctgctgcagcatcacaagccacacaacggcgcccagcgcgaggttcagtacatattcaagcacgttttccagccggatgccacgcagcaggatgtgtacgcagctgtggcccagccgttggtggagaacctactgaaaggccgaaacagtctgcttttcacctacggcgtgactggaagtggaaaaacgtacaccatgaccggcaacctgcgacaccgcggcatcatgccgcgctgcctggacgtgctctttcgcaccatttcagattaccaggccaagaagttcgtcttcaagccggacaagcttaatggcttcgagatcctgtccgaagaggatgcgcttttggagcgccaacacgagatgaaccagcgttttgctggctcaggacgatttgccttcaggcacaaggactcggatccggaaattgcatcccaggcctccgtggagccaattccgctgctgggtttggatgaggacaacatgtactcggtgtttgtcacctatattgaaatttacaataacagcgtctacgacctccttgaggactcgggtatacagaagactttgcagagcaaaatcattcgtgaagatgccaatcgacacatgttcgtccacggcgtcacagaggtggaggtcaagaccgtggaggacgccctcgaggtctttcaaatgggccagaagcgcaaacgaatgggacacactgttctcaatgcagaatccagtaggagtcactcggtgttcaatatacgcttggtgcaggcgcccactgatagccagggtgagaatgtggttcaggaccggcaaaacatcacagtgagtcaactgtccctggtggatctggcgggcagtgagcgatcctcaaggaccaagaacaccggtgtgcgactccgtgaggcgggcaacatcaataattcgctgatgacgctgcgcacttgcctggaatatctgcgcgagaaccaactcgcggctagcaatggattggcacccaagaaggtcccctatcgagactccaagatcacacacatgtttaaaaactacttcgatggcgaaggccaggtgtccatgattgtgtgcatcaacccaagaattgaggactatgatgagaatatgcaagtgatgaagttcgccgagatgacccaggaggtgcaaattgctcgggcgactcctatgaagcaagatttgggtctgactcccggccgtcgcaaggccaacaagctgttcaagattgccgttaataatctaaacgagctgggcattcctgaggccaaggatttggaggtggacgtgggtttggtgtacagtttgggacccgattttcccgcctacgaaatggacagtcccgaggcacagatcaaaatccgcgagctaatgcattatctggagcagcgcatagaaaagcgaaagaagctgcgtgccaacttggacattaaatgtgacagcttccggcagatgctgatgaaccttgaccgcgacaatcttcagctgcgcacggagctcgcctccttaaaggctgtttacaagcaggagcgcgatcgcagtgcggcactcgagaagaaggttcgcatccacgagagctccattgacgtgcttaacaatacgctaagcaagcaagaacggcagattgaagagctgactttcaagctgaacgagaaggagaatatgctcacccaaaaggagcacgagaaggaaaagcaaaagaagaagttcagctccaagctggccgttgagtcggacaaaaataagcgagagtttgaactaaagctgcgtgaacagcgagtgaaattgcaggaacgcatgcgcatcaaggacgagaagttgcgattggtctccaacattctgcagtccgaagatctgcccagtttgccgcggtcacagagctcggaaaacatacttaatgagaaagatcgcggtgcatatacggcgcgcacggaggagtcctcggtgccagctacacgaacagatatatatgcaacgccacgtcatggtgcagcagcggccaacaatcggcatagacgctctcgatccgcaggcgacaagtggctggagcatcgggcagctaatcccgttccgcttggcactattatgcagccgtatctgaagaatcgcaaatccgtaacgaaactaaccgacttgaaggagttgactgctcacggaactacgaagtactgtctcgtctcgcaggatgcggatacggatggcgatgtggagacgaagctgtataagggcaatgtaattcccacttgtggcggtggtgcccaagttgtgttcaacgatgtggagtgcctcaagcagaagtcaccggttcactcgcccacgcgaaagcgacccagcaatggcaacatttcggctctgggcggcggtgcagtgcccagcacggtcacctcagcccaggacgtagcctcccgctgcaatctcggcattgagggacacagcagcaagaagtcgaaaatctaaaaatgactcagcgtggaattctcaaagtcaattacccatttagttcatagttacttagtttccataacttaaatttaagtttattactcacccacttcggtttttggagttgaatcgcattgaagtgatttgtttgattaaagaaaagttaatctgtataaataatcccgtaaatgaattcgcaacccctcgcaaatggaaatgtttcctgctccaaatagtcggtacccggagggtatctgccaagagcagttgttagaaactatccaagcatcgtccaatcatagaactactctagtgttattataaagtattaaatattttattgtttttcggagtgaacccaactccagtccagtcacaaaatgaacaaataaagtgaattacgcgcatatactgaaa

SEQ ID NO: 40113 - protein, 887 aa, DROSOPHILA
MKAVPRTPMRVVPKTPRVHQTVEKQRRDTSDKARDPVNVFCRVRPLQSDADLTSLRVKNSTTIALNPQDQLLQHHKPHNGAQREVQYIFKHVFQPDATQQDVYAAVAQPLVENLLKGRNSLLFTYGVTGSGKTYTMTGNLRHRGIMPRCLDVLFRTISDYQAKKFVFKPDKLNGFEILSEEDALLERQHEMNQRFAGSGRFAFRHKDSDPEIASQASVEPIPLLGLDEDNMYSVFVTYIEIYNNSVYDLLEDSGIQKTLQSKIIREDANRHMFVHGVTEVEVKTVEDALEVFQMGQKRKRMGHTVLNAESSRSHSVFNIRLVQAPTDSQGENVVQDRQNITVSQLSLVDLAGSERSSRTKNTGVRLREAGNINNSLMTLRTCLEYLRENQLAASNGLAPKKVPYRDSKITHMFKNYFDGEGQVSMIVCINPRIEDYDENMQVMKFAEMTQEVQIARATPMKQDLGLTPGRRKANKLFKIAVNNLNELGIPEAKDLEVDVGLVYSLGPDFPAYEMDSPEAQIKIRELMHYLEQRIEKRKKLRANLDIKCDSFRQMLMNLDRDNLQLRTELASLKAVYKQERDRSAALEKKVRIHESSIDVLNNTLSKQERQIEELTFKLNEKENMLTQKEHEKEKQKKKFSSKLAVESDKNKREFELKLREQRVKLQERMRIKDEKLRLVSNILQSEDLPSLPRSQSSENILNEKDRGAYTARTEESSVPATRTDIYATPRHGAAAANNRHRRSRSAGDKWLEHRAANPVPLGTIMQPYLKNRKSVTKLTDLKELTAHGTTKYCLVSQDADTDGDVETKLYKGNVIPTCGGGAQVVFNDVECLKQKSPVHSPTRKRPSNGNISALGGGAVPSTVTSAQDVASRCNLGIEGHSSKKSKI

SEQ ID NO: 40114 - DNA, 10217 bp, DROSOPHILA
gcctcccaaatggatggcgccattctagtggtggctgccaccgatggtcaaatgccccagactcgcgagcaccttcttctggcaaaacaagtgggcatccagcgcatcatagtgtttataaacaaggccgatttggtggaccaggaggtgctggaactggtcgagatcgagatgcgtgagatgctaagtgatttcggctttgatggcgtgaatagcccggtaatttgtggctcagcgctgctggcccttcgcgaagataaatcggagttcggggttccgtcaattgaaaagctacttgagcaatgcgactcttacataccaacgccgcagcgcgatatctcgtccccatttatcctgccaatagacaatgcttttacggtacccggaaggggaaccgtggtcgtgggaaccatcaaaaggggcaccattccccggaacgcggatgcagacctactgggcttcaatcagaacctgaagacaagcatcagcgacatccagatattccggaagagcgtgcctcaggcacaggctggcgagaacgtcggcgcactgctgcgaggtattaagatatccgccgtggagcggggaatgctactgtgcgcaaccggctccgaggatatatccaaccactttgaaggctccatgtatctgctatcgcgggccgagggtggtcgtgtcaagcccatgctctccaagtatatacagcagctcttcagccagacgtggaatgttccagctagaattgacataggtaagttaaaaacttcaatgctgtccacaaagcattgagcaaatcccattgcagttccaagtgaggctatgcttatgccgggtgagcatggccaggtgcgcgtcacgctgctgcggaaaatggtcatgactccgggccaagccttcacaattcgcgagaacggagcgacggtggctaccggtatggtgacgcagcgcctgccgtcccttgacctgcccaagaacaagttatcaaaagtcttcgtggattgttaacgactcgagattgtatttgtaaaaattcataaattgctgttcattacacacgagtactttctttctaatatataatatttgtatgtgtttaggtaatctgcttagaatgtttcaaacaaatgccaacgtagtttaggcttgcatagtctaacgacatatctaagaaacccaactaacgagttacaagctacgcagaaaatgagaatacataaatagatggaatgcaacagcaatgcatcatcggtgagctctatgagtcttactctatcatctgtaggctttacacgttctttaaggcaacaaatcagcctggttaagtacaatcattgtatataaatatttagttatgatttaaggtacaaggtttaggcaagaaatgatttcttatggtcagagtctaactccaagcatttattgcgtttcacatattaaggttggttcttaaccttccattacttttgctacaaatagttcgtacaacaaaaaaaaacacttggcatctcgggacgggtacgccattggatactcggaatggatactattggagtggataaacaacgggtatttaagctaaacaggaactacacaaacatttcggcaaaacggctctactcaatgtttcattatctaatcgattttctaaatataagaacaaattaaatttctagaatcgttatactcgtataatacacaaaaactaagcagtgtaatgtcatccaaaatggcaaagttctcgaccggcaagacgcaggcacgcgacgtttaaatctttgtaaggaactcgtccagattaagatgcgacggtagttcaatatcctccagcttgatgtcactatacctgaagacaaccttaaatggctgaatgaacttctggtctatggtgaattcgtcactattgctcttttgctgtaagacaaaatcggtaaatcgaaagtgtatatttcgagattttacacgtaccatttgtcgggcgttcagtttctcggttagtttctccagaaaaacgttcgttatttcgctctcataatcgtccagtttgtaggacttcatcaccttgaggacctgcgccgtgctcagagaagtacacagatcacaaatggtctgaacatcctgctcgctcttccgagactgcagcaattgggagacctgattcagaggcgccaaagctgtcagcacatcgttagactagaaaaaccaaaagctagttagtttggaaacttggcaataagcaaacgtgacctaccatctttttactgcgcacccaatcctcaatgcagccgatattgtagcggattatcatgccagtctcccacatgcaaatatcgcccctaagcatcagacaattaagggccacagcgcaaatgaagtaaagcagttgatggaatatctgctccgcatagcagttgtccaagccgaagtgctgaaactgtttgtagaaatgctccagctgcccgatcagttgcttccaggccggaccgccaccgtgctccggtgacgaggatgctccaatcgacgtggcccgactacgcattccgtgcgcctgccgcccacgctgaatctcatcattgttgagaatcgctggcactatttttgggtccaacagaccctggatctgcatgatcagcgcctggtacaggttcacaattaaatcaagaattacgcgacggtattcaaagagattgaagttcttcagctgctgctgattctgcttctcagtattgaacttgacgtactcatccacgtcgccgtattgcttcataagatttagcagcctaaaggtcgcggaaatggattaatttatgaattccaagagcttatgacctttgtaactcacgtaatggaattgacgagccaaataacacgattctcgatcggatgcggcgtacgatgcattttcttaatctgaataacgaacttgcttagcaactcgcgcacatcatcgtcggcatttgtcagatcggtgtatctgtgataaaaaagccataaaattaatcaacttaaccatcatccacaaccatgaccataactcaccgaatacacataaagatgagatatgctggaaaaccaggaaggagcccgaccactgtgcgtggagtcaaggcgctaagcaggcgttgcaagatcttgtccagatcgctgctgtggaacttcatcagcccttgcggattctgagacttttgcttcgtcacattcgcgcctacatcggcggacgttccgttggacttgttgcgaatcatctcctcctctatcttgtgctccagctggcctccatcctgccgataagctttaagcttggcatttgccagtttgagctcctcctgaacgagcaggaactgggctacagccttctgcagttctcgtcgcagatagcgatcgttctgtctcagcgtatccacattggaatcttcgaactcgtcgatgctctcgaacattaccttttgcagctcatccttctcattgttcaatctctcgatctcctgtgtcatctccacgagcttactgttgtgctcctcggtgatggccttgagctcagactccaattgactggaaattagagaagaaaatgatgcatttggcatacagtcgagcaatttcactcaccgattaattagcttctgggaatggaaggcttccatcagttcgttgacatcgttgccacgcatctgtagactttccggctcgagcgatctcatggactggctctgctgcagcaggactgcctttaattggatgcactcctcgcgccgcctacgtacctcttcctgcaaggcggcatgctgtgctgcaatgacaaagattggaaggaggagggaaaaaaaagacgtgtgtcagtaagaccgctccgtggatcgcacggcgtgcgtgggaggttaccattgagctcgttgatctcaacaccgtgtttaatgctcgttcgcagctgatcgtactcgctgcgcagcttttcattctctacctcaagctcggagacgctatgtgagtggagagcagtgtgcggcaataatacatagatgtagacaaatggagtttttttcaagatttagtagcgtaagtggaagtaacaccgaattttagctcggcgatattgtgtctatttaggagggattccctaaatacttaccggaaggaatcctcggtgggcttatgccgactggacaacttaatgtactgctcctgcaagaccttgtgcttttgcttctcctcctcgagaatggatctcaacttcaccaccagactggtagagtcattgtacgagtctaaacatacaaatttacggattacaactctacacacactagacaacaggtaatgttcttacaatttttgcttaacaaatccgggggccgattgatatccagagtgttcttggcggaggcgtatcccacatcgtcctcgttttggctggaggcgttgctagccttgcgggcgtgcaaactgaaactgccagccgttaatcgactgagctcttccttcagcatgaagttttcgttctcgatgacctccttgtccttaatagctcgttggtaggcctcgttgagctccctgttatcaatctcggctagcattcggtcctcctggttacgctggttgacttctgcgttctttgccatatcgattatctcgtctatctgacggcgcagctcctcgttctcttggcgccacgtctgcttctggctgatccactcctcttgagcatgtccgttctcctccagcaactgcattttttcgtctcgctccgcctccaactgcttgttaagtgcttcgatcagcttgtccttgtcctggcaggcggccttgacatttttgaattcagcctccagggtcttcttcagctcaagcttcattctgcacgataaagatgattaactcctgcgaacaagaacgactagatgctaaatttatacttcaatacactgatttcgctggtcttgtgcttcagattactgttgtcgcgattcagctcatcgatccgctgctgcatggaaataatcttgttttccagccccatgtatttgttttccatgtgcgagatggtcttggcctcggccttcatgcgtttaaacttacgacgggccaagaatctccgaatcgccgcttgacaaatgatgatgttgcgacgccgcttttggtaagctcgccgtgccaaagcaccacgcacgaaacgctggatctgaactgcccggtagtgatcccgcatcgcgtggaacttgttgcgcgccagcatgccgcgggcgtaggtctgtatgccggaaatggagtggcgtaggcgcaagtaacgacgacggcataaccaaccgcgggcgtacttcgacaggattaatcccgcacgagcttcgcgcattttctgagtacgctcgcgagcaagatatccgcgcgcatgtttctgaatgccattaattactttctgaatgcgcaggaactggcgccggtagacgaatcgccgcacaaccgactgcacaatggtgatatacttcttgcgcagattagcccgaacctgttcaaggaaggccacttggccggcgcggaagaaaatctgcgtgttgccaaatcggtacttatcttcgtcttggatccacttcatcacaatgttccggcacgacagcttcatgtcgtttttgtcgagtttggagcggtaaaccagcagctggtaccgcatatagaagtcgggatagagccatctcgaggggaatcccgctgcggagatgcgcaccgtttccagcacaccacaggcccttaactgctgtatgatcttggccgtctcccacttaaaggcgactttgtcatcgttgggctgcacgaaaataaacatattttaatgagcttttatctgtacttaagatccaatagcacatcttaccttgatgcagcgcacatagtgcggagttgtggcatgtaacgtagatatcagcgacgccagactctcctggaactgcgatcccaccgtttttctatgctgcttggatggcaccaccttataacaagtattaggcgaaattagtaggtcgtgtgtggaaataggcaaacacagtcaaaatgaaaatgaatacataagatcgatttagagtttcaaactagttttacattttgagtaaacttattctcattaacccaattcatttaatatgttcgttcgtccgcgtgtcatattttattgataatatattgaatcacctatttgacaaattcctatcatcatttattattattatttatttgcggaggtagtgaattgttagtctataagcaactttgattctttctaatcagcattactgggccatttagccttgtcatttgaatccggactaaattagtaactttaattaaaacaaatgtaccaagtcgaattaaattgttaaaatgtttgtggttattcgtttagggttagtcaattgctgttaatttaaataagttggtaactaactcttcgacgtgtgtcattcccttgctgttgggcaatccgagggagttggcggtgagcgaacgacaagcgtatggaaaatacaaatagcaataagacaacgattacaattggacgaaattggagcaatacgattgttgggtccatgaagaatctggtcaaacacaaacctgtttgcggccagcactgatcacgacgcggccgcccaaggtggaggatttagcggaatccacgcacagagtatctatttcctccagggtcatcacctgcttggccagagacatgttggactcgcttagcacttgcgtcaactccttggagactgtgtcacgattcttttccaagaatccgttcacgtcatactcgaccgtgtccgagaaatgtttgataaagaagcctcaaagatagaattaacagattgtcatcgaaataatagtgcatagaatcggaaaataacttactggttgtgccaaagcgtggcttctcgaaatgcggaaatttattgcactttccgatgagcttgccagcccagctctcgtccgagccctttggcatctgcagatagacccggtttaataatgatatgtactatgtcaaatgaatcttactcgacactcctcgtcgagcaggtccagcactcccaagcgagattcaattagatcgatacacggttgattgtcgtaaaagtcaatcatcgtccaggtgattccttccttaagatactcctcctgctccagcttgaagacatgctggttgaactgctgctgaagcttttcgttcgcatagtttatgcaaaattgttcaaaggagttcacctcgaacgtttcgaagccgtagatatcgaggacgccaatgaagctgcactgcttgctaccgttgttgaggctcttgttcagcacaccgactatatactgaaacagtttcgcatagatgtgcttggccagagcgtctcgagccgcctgagccgcctcaatgctattcggtatcagcacatattcattgaccgactctatcttacgcatcaaaagccaccggcgcagatcatcggcgctcacccgcagtagatcggcggtgatctgcaggtggatgtcgttatgctacgagatggatgaagttaaagtacatatataactcagaaattgtcatcaggttttacgaaagtgagcttacaaatatatcgcaagagtcactgtcctcctcttcgctgccctcgttgaacttcttggaaacctgaatgtttcctaaatggagtattcctgccaggatctttacgatatcagcgatctgttgaatggagaagcccagaactgtcatggcctgcacggtttcgttaaactgctccgcatccgaaactcgttcaatttcaggagcgccacccatgttcagaaactggaatttgtcctggtgatctttgagagaatggaaatattacttcattttctaagctgaaataggagggagcttccagacatacccagcaccagttcagggtacttcgatcgcgccgcgcacagctgatagaatatgtgatagttgcgctctccctgggcctggtacaccacacgtgacttctccagtaggtaggtgtgcatagtggctccctgcaggaacatcacacccatctggttccggaacagcagcttggtaaactttccaaagcgggaactgttgtcattccgggtcgtcttggcatttccgaaggcttccatgatcggcgaagatgccagcaccttgcgttcgacctgggtctccgactcggaacctccaacagcggcaaagtacctcatggcgtatttggcggacaccgtcttgcccgcacccgactccccactgacgatgatgctcaggttgcagttctcgcgctccagtttcgtgtacgcctcctccgccagggcaaagatgtgcggctccagatcacccatagcatgaccccgatacgctcggattatgctgggcccgtaaagaggcatctccgcgtacgggttgatggccaccagaatgatgccgcagtaggtgtagataatctggcgctcgcagaagcggacacgcagattgtgcaacacccccggctcatgcaggtaggacagggtggtcaagtcgttctgtcccaccagaatggccggattgcgcagtggaggcagatcgctgccatcggcctttagcttgacctctttcagttttccggagtccgtacatatcttcaagaagccggcgcccttgcggtagctctcctccaaggtggcgctctcccacaccagatccgcatggggcacccagatcttggcgccctgcgaaagaagtgagccgaattaacaagttttatgaatgggagttatgcccgatcccctctagagacgtcacccgacctggtgtcttatcaatcgagcttatcacacaacccattcccctgtcgataagacacccgcgaatattgtatgtagatgaatcatttttaaacatttcgggtgctgcgatgcagtcatcaatggctaatcacctgccatgggaacaaatcagggccaagaactgtcgaatggcctgcacacacacacacacacacacacacacttcggacgggggaaatcacgttatgggtgcgattttatattggcaccatttgcagacgacaccgacaccgccgcaatctgccacgatgcacttgtagggcatcaatatatactgtgcaatacctgcgcgtatagcatctcctcgctagacatggttccactggctcctcctcctactccaggttccgcttcgcgctccttctttctctcctctccttcttcctactccgcgtgggagtgagttgggtgcataaatcccgttaggtttaatttccttggtggtacgttttttttctggctctgacagcctatttaaattaccattttcgtggtctttttttgggtttatgtaaatgtactgtcctaaattacttaaaattagccaggaataatttataaaaacattgataatttttagatcgcaacgccaaagtgtgagaaaaacaaacaaacttccgtccctgtcaccgcctgactgactgacttatgttttgttgttggcaaaagggcagggttgccaaagggcgtgcagtttgggccaaattagaaatgtgtggttctaaccatggattaaatttgaacaaagtaaaatatcttgcaaaaagatttgtataatgccacagtaactgaattttttcttgcaaaacaccccagaaagcaccaattatttggcgcgcaatgctctgcagttagattttcagcactgctcaactcacccattggtattcttcaacactgcaacagttattttcccgccaatttttagctggtctgtcccaccgcatcgttttttgtttcacaacagctacagttttcgcccaggacgcacgggttaaataaatatcttctctaaggaaatgtcaagccccgctcgttcgcccagtgttggaggtgcgacgcccaaacaaggcgcccgcacacccactagaggtgagtatcgacgtgccacaaaaagtgtgttctgtttgcaaagcaagcgtctgtctgcttacaggcattgcgtcgcaagatgtggagacacccatgcgcatgggtcccgggagggctgtccggccctcggacaacatcagtttgccgcccacctcgccgggaaacatcagcttgccagccaccagtccggctcgaggattgggtgcgaacatgagcgagatcgatctgagttcgccgctgaactacggcacccccagctcgatggggtccattcgaacccctcgttccggaat

SEQ ID NO: 40115 - DNA, 6216 bp, DROSOPHILA
ggaagaaggagaggagagaaagaaggagcgcgaagcggaacctggagtaggaggaggagccagtggaaccatgtctagcgaggagatgctatacgcgcagggcgccaagatctgggtgccccatgcggatctggtgtgggagagcgccaccttggaggagagctaccgcaagggcgccggcttcttgaagatatgtacggactccggaaaactgaaagaggtcaagctaaaggccgatggcagcgatctgcctccactgcgcaatccggccattctggtgggacagaacgacttgaccaccctgtcctacctgcatgagccgggggtgttgcacaatctgcgtgtccgcttctgcgagcgccagattatctacacctactgcggcatcattctggtggccatcaacccgtacgcggagatgcctctttacgggcccagcataatccgagcgtatcggggtcatgctatgggtgatctggagccgcacatctttgccctggcggaggaggcgtacacgaaactggagcgcgagaactgcaacctgagcatcatcgtcagtggggagtcgggtgcgggcaagacggtgtccgccaaatacgccatgaggtactttgccgctgttggaggttccgagtcggagacccaggtcgaacgcaaggtgctggcatcttcgccgatcatggaagccttcggaaatgccaagacgacccggaatgacaacagttcccgctttggaaagtttaccaagctgctgttccggaaccagatgggtgtgatgttcctgcagggagccactatgcacacctacctactggagaagtcacgtgtggtgtaccaggcccagggagagcgcaactatcacatattctatcagctgtgcgcggcgcgatcgaagtaccctgaactggtgctggatcaccaggacaaattccagtttctgaacatgggtggcgctcctgaaattgaacgagtttcggatgcggagcagtttaacgaaaccgtgcaggccatgacagttctgggcttctccattcaacagatcgctgatatcgtaaagatcctggcaggaatactccatttaggaaacattcaggtttccaagaagttcaacgagggcagcgaagaggaggacagtgactcttgcgatatatttcataacgacatccacctgcagatcaccgccgatctactgcgggtgagcgccgatgatctgcgccggtggcttttgatgcgtaagatagagtcggtcaatgaatatgtgctgataccgaatagcattgaggcggctcaggcggctcgagacgctctggccaagcacatctatgcgaaactgtttcagtatatagtcggtgtgctgaacaagagcctcaacaacggtagcaagcagtgcagcttcattggcgtcctcgatatctacggcttcgaaacgttcgaggtgaactcctttgaacaattttgcataaactatgcgaacgaaaagcttcagcagcagttcaaccagcatgtcttcaagctggagcaggaggagtatcttaaggaaggaatcacctggacgatgattgacttttacgacaatcaaccgtgtatcgatctaattgaatctcgcttgggagtgctggacctgctcgacgaggagtgtcgaatgccaaagggctcggacgagagctgggctggcaagctcatcggaaagtgcaataaatttccgcatttcgagaagccacgctttggcacaaccagcttctttatcaaacatttctcggacacggtcgagtatgacgtgaacggattcttggaaaagaatcgtgacacagtctccaaggagttgacgcaagtgctaagcgagtccaacatgtctctggccaagcaggtgatgaccctggaggaaatagatactctgtgcgtggattccgctaaatcctccaccttgggcggccgcgtcgtgatcagtgctggccgcaaacaggtggtgccatccaagcagcatagaaaaacggtgggatcgcagttccaggagagtctggcgtcgctgatatctacgttacatgccacaactccgcactatgtgcgctgcatcaagcccaacgatgacaaagtcgcctttaagtgggagacggccaagatcatacagcagttaagggcctgtggtgtgctggaaacggtgcgcatctccgcagcgggattcccctcgagatggctctatcccgacttctatatgcggtaccagctgctggtttaccgctccaaactcgacaaaaacgacatgaagctgtcgtgccggaacattgtgatgaagtggatccaagacgaagataagtaccgatttggcaacacgcagattttcttccgcgccggccaagtggccttccttgaacaggttcgggctaatctgcgcaagaagtatatcaccattgtgcagtcggttgtgcggcgattcgtctaccggcgccagttcctgcgcattcagaaagtaattaatggcattcagaaacatgcgcgcggatatcttgctcgcgagcgtactcagaaaatgcgcgaagctcgtgcgggattaatcctgtcgaagtacgcccgcggttggttatgccgtcgtcgttacttgcgcctacgccactccatttccggcatacagacctacgcccgcggcatgctggcgcgcaacaagttccacgcgatgcgggatcactaccgggcagttcagatccagcgtttcgtgcgtggtgctttggcacggcgagcttaccaaaagcggcgtcgcaacatcatcatttgtcaagcggcgattcggagattcttggcccgtcgtaagtttaaacgcatgaaggccgaggccaagaccatctcgcacatggaaaacaaatacatggggctggaaaacaagattatttccatgcagcagcggatcgatgagctgaatcgcgacaacagtaatctgaagcacaagaccagcgaaatcagtgtattgaaaatgaagcttgagctgaagaagaccctggaggctgaattcaaaaatgtcaaggccgcctgccaggacaaggacaagctgatcgaagcacttaacaagcagttggaggcggagcgagacgaaaaaatgcagttgctggaggagaacggacatgctcaagaggagtggatcagccagaagcagacgtggcgccaagagaacgaggagctgcgccgtcagatagacgagataatcgatatggcaaagaacgcagaagtcaaccagcgtaaccaggaggaccgaatgctagccgagattgataacagggagctcaacgaggcctaccaacgagctattaaggacaaggaggtcatcgagaacgaaaacttcatgctgaaggaagagctcagtcgattaacggctggcagtttcagtttgcacgcccgcaaggctagcaacgcctccagccaaaacgaggacgatgtgggatacgcctccgccaagaacactctggatatcaatcggcccccggatttgttaagcaaaaattactcgtacaatgactctaccagtctggtggtgaagttgagatccattctcgaggaggagaagcaaaagcacaaggtcttgcaggagcagtacattaagttgtccagtcggcataagcccaccgaggattccttccgcgtctccgagcttgaggtagagaatgaaaagctgcgcagcgagtacgatcagctgcgaacgagcattaaacacggtgttgagatcaacgagctcaatgcacagcatgccgccttgcaggaagaggtacgtaggcggcgcgaggagtgcatccaattaaaggcagtcctgctgcagcagagccagtccatgagatcgctcgagccggaaagtctacagatgcgtggcaacgatgtcaacgaactgatggaagccttccattcccagaagctaattaatcgtcaattggagtctgagctcaaggccatcaccgaggagcacaacagtaagctcgtggagatgacacaggagatcgagagattgaacaatgagaaggatgagctgcaaaaggtaatgttcgagagcatcgacgagttcgaagattccaatgtggatacgctgagacagaacgatcgctatctgcgacgagaactgcagaaggctgtagcccagttcctgctcgttcaggaggagctcaaactggcaaatgccaagcttaaagcttatcggcaggatggaggccagctggagcacaagatagaggaggagatgattcgcaacaagtccaacggaacgtccgccgatgtaggcgcgaatgtgacgaagcaaaagtctcagaatccgcaagggctgatgaagttccacagcagcgatctggacaagatcttgcaacgcctgcttagcgccttgactccacgcacagtggtcgggctccttcctggttttccagcatatctcatctttatgtgtattcgatacaccgatctgacaaatgccgacgatgatgtgcgcgagttgctaagcaagttcgttattcagattaagaaaatgcatcgtacgccgcatccgatcgagaatcgtgttatttggctcgtcaattccattacgctgctaaatcttatgaagcaatacggcgacgtggatgagtacgtcaagttcaatactgagaagcagaatcagcagcagctgaagaacttcaatctctttgaataccgtcgcgtaattcttgatttaattgtgaacctgtaccaggcgctgatcatgcagatccagggtctgttggacccaaaaatagtgccagcgattctcaacaatgatgagattcagcgtgggcggcaggcgcacggaatgcgtagtcgggccacgtcgattggagcatcctcgtcaccggagcacggtggcggtccggcctggaagcaactgatcgggcagctggagcatttctacaaacagtttcagcacttcggcttggacaactgctatgcggagcagatattccatcaactgctttacttcatttgcgctgtggcccttaattgtctgatgcttaggggcgatatttgcatgtgggagactggcatgataatccgctacaatatcggctgcattgaggattgggtgcgcagtaaaaagatgtctaacgatgtgctgacagctttggcgcctctgaatcaggtctcccaattgctgcagtctcggaagagcgagcaggatgttcagaccatttgtgatctgtgtacttctctgagcacggcgcaggtcctcaaggtgatgaagtcctacaaactggacgattatgagagcgaaataacgaacgtttttctggagaaactaaccgagaaactgaacgcccgacaaatgcaaaagagcaatagtgacgaattcaccatagaccagaagttcattcagccatttaaggttgtcttcaggtatagtgacatcaagctggaggatattgaactaccgtcgcatcttaatctggacgagttccttacaaagatttaaacgtcgcgtgcctgcgtcttgccggtcgagaactttgccattttggatgacattacactgcttagtttttgtgtattatacgagtataacgattctagaaatttaatttgttcttatatttagaaaatcgattagataatgaaacattgagtagagccgttttgccgaaatgtttgtgtagttcctgtttagcttaaatacccgttgtttatccactccaatagtatccattccgagtatccaatggcgtacccgtcccgagatgccaagtgtttttttttgttgtacgaactatttgtagcaaaagtaatggaaggttaagaaccaaccttaatatgtgaaacgcaataaatgcttggagttagactctgaccataagaaatcatttcttgcctaaaccttgtaccttaaatcataactaaatatttatatacaatgattgtacttaaccaggctgatttgttgccttaaagaacgtgtaaagcctacagatgatagagtaagactcatagagctcaccgatgatgcattgctgttgcattccatctatttatgtattctcattttctgcgtagcttgtaactcgttagttgggtttcttagatatgtcgttagactatgcaagcctaaactacgttggcatttgtttgaaacattctaagcagattacctaaacacatacaaatattatatattagaaagaaagtactcgtgtgtaatgaacagcaatttatgaatttttacaaatacaatctcgagtcgttaac

SEQ ID NO: 40116 - protein, 1792 aa, DROSOPHILA
MSSEEMLYAQGAKIWVPHADLVWESATLEESYRKGAGFLKICTDSGKLKEVKLKADGSDLPPLRNPAILVGQNDLTTLSYLHEPGVLHNLRVRFCERQIIYTYCGIILVAINPYAEMPLYGPSIIRAYRGHAMGDLEPHIFALAEEAYTKLERENCNLSIIVSGESGAGKTVSAKYAMRYFAAVGGSESETQVERKVLASSPIMEAFGNAKTTRNDNSSRFGKFTKLLFRNQMGVMFLQGATMHTYLLEKSRVVYQAQGERNYHIFYQLCAARSKYPELVLDHQDKFQFLNMGGAPEIERVSDAEQFNETVQAMTVLGFSIQQIADIVKILAGILHLGNIQVSKKFNEGSEEEDSDSCDIFHNDIHLQITADLLRVSADDLRRWLLMRKIESVNEYVLIPNSIEAAQAARDALAKHIYAKLFQYIVGVLNKSLNNGSKQCSFIGVLDIYGFETFEVNSFEQFCINYANEKLQQQFNQHVFKLEQEEYLKEGITWTMIDFYDNQPCIDLIESRLGVLDLLDEECRMPKGSDESWAGKLIGKCNKFPHFEKPRFGTTSFFIKHFSDTVEYDVNGFLEKNRDTVSKELTQVLSESNMSLAKQVMTLEEIDTLCVDSAKSSTLGGRVVISAGRKQVVPSKQHRKTVGSQFQESLASLISTLHATTPHYVRCIKPNDDKVAFKWETAKIIQQLRACGVLETVRISAAGFPSRWLYPDFYMRYQLLVYRSKLDKNDMKLSCRNIVMKWIQDEDKYRFGNTQIFFRAGQVAFLEQVRANLRKKYITIVQSVVRRFVYRRQFLRIQKVINGIQKHARGYLARERTQKMREARAGLILSKYARGWLCRRRYLRLRHSISGIQTYARGMLARNKFHAMRDHYRAVQIQRFVRGALARRAYQKRRRNIIICQAAIRRFLARRKFKRMKAEAKTISHMENKYMGLENKIISMQQRIDELNRDNSNLKHKTSEISVLKMKLELKKTLEAEFKNVKAACQDKDKLIEALNKQLEAERDEKMQLLEENGHAQEEWISQKQTWRQENEELRRQIDEIIDMAKNAEVNQRNQEDRMLAEIDNRELNEAYQRAIKDKEVIENENFMLKEELSRLTAGSFSLHARKASNASSQNEDDVGYASAKNTLDINRPPDLLSKNYSYNDSTSLVVKLRSILEEEKQKHKVLQEQYIKLSSRHKPTEDSFRVSELEVENEKLRSEYDQLRTSIKHGVEINELNAQHAALQEEVRRRREECIQLKAVLLQQSQSMRSLEPESLQMRGNDVNELMEAFHSQKLINRQLESELKAITEEHNSKLVEMTQEIERLNNEKDELQKVMFESIDEFEDSNVDTLRQNDRYLRRELQKAVAQFLLVQEELKLANAKLKAYRQDGGQLEHKIEEEMIRNKSNGTSADVGANVTKQKSQNPQGLMKFHSSDLDKILQRLLSALTPRTVVGLLPGFPAYLIFMCIRYTDLTNADDDVRELLSKFVIQIKKMHRTPHPIENRVIWLVNSITLLNLMKQYGDVDEYVKFNTEKQNQQQLKNFNLFEYRRVILDLIVNLYQALIMQIQGLLDPKIVPAILNNDEIQRGRQAHGMRSRATSIGASSSPEHGGGPAWKQLIGQLEHFYKQFQHFGLDNCYAEQIFHQLLYFICAVALNCLMLRGDICMWETGMIIRYNIGCIEDWVRSKKMSNDVLTALAPLNQVSQLLQSRKSEQDVQTICDLCTSLSTAQVLKVMKSYKLDDYESEITNVFLEKLTEKLNARQMQKSNSDEFTIDQKFIQPFKVVFRYSDIKLEDIELPSHLNLDEFLTKI

SEQ ID NO: 40117 - DNA, 5310 bp, DROSOPHILA
ttctgcagatccacggcaagctggatcccttggtcaatgtgagcctgaaaccagacaagcgggtcaaggtcctgttcacctacaacgatgtgagcgagagccggttcgtggacatctatctgaccgtcaacgatttgaaggtgaagctggagaagctggtgggtctggcgcccaacaagatgcgcctctactatctggatcaggactacaaggaattcgggccggaggagatgaggtaccccaacaagcagttgtacagctacaacatccagtcgggcgacgagatcatcatcgatgccaagaagtgaggcgcgacgtatgggctacatgcttccgtatctggagaggattaccattaacccgaaccgcccttcgtcccccgcctggtgctacaacttgtgatcttgtacacgaatcatttacatttactttactctactgttagtgccgttctgttctccgcagcgaacccctgtgtacatacgttctgaaaatggccaagcgagcattactgcgcacccacatcgtatattttaattattactgcctaacctaagccacacacaaaatacaaatacaaaccaccacaaaaaaaaacaaaacaaaaacaaaacaaaaaatcaaaaaaacaagcaagaatgcattaaacaattttaaaatttacccactctccgcgttttatggtgatgggcagcactttgcgctggggatcgctggaagataagatatgactcatagagcgaactcgaagcaccccaacacaggcacacgtccacggattggggatagtggggagctttcgcgatcccgttgtcgatagctgacttcagcactgcaattatctcgctcgaggggagctttgaaaagttgccggaaaagagacctgagaactggctctcccgcttcccacatacaattagctgaacaataagtatctatgatggttacacgtccacttaacacatttttgttatggacactggtgttcaaaataatagtgatgaaatgtctagtaaataattcgtcaacgatttaaataactctaaaatatttaatattttcacaaaattaaaaaaaaaattatatttatgttaaacattttataatattttgaatctgatatataggtatcttagatgtaagttataattcttatactaacatttatgtgatattcaaataaaatgctatgctcgtactattattttgattacaactacatgatattcaccatttagcgggtatttatcacgttctggccagtgaaatcacgattatttgctttgctttcatctaaagctgtttatgaacagttaatttattgatttatcaagaaggtcaagatgagaagcttgaattcttttcttgttgagcgtttccttgttatgtgtcttgtgaaagatcttttcttatagatcaataatcatgacaaaagcagtttatatagatttccttattaagcgatcattgtctcgtaattcatatatttgaaagctaaaagtatctgaacaaaatcttatcttccctatttttaataaatacttttgagagagatgtatctgatccttaaatctgttgtttaggtgccgtacttaattttatcctaccactgaaacccttatagaatcgaataccaatatccaagtaaaacgctcccattagcggctggtagttttccagcactccccgaatgaattgccaaaactcacccatatttgggttgttggggtatggcaagtgccaaatgttaatgacgtaggatcgataggcagcacgttgggcaaagacaaagtcgagagatcgtgactaaagcgaacctgacccgcccacaacggcgatggggagccgaaacgaaaccgtcgctaaaatgcgcgaaattttatggggctctgctgatgacgagctgcaatatacttgggtatatggggtatttattaaaacaaatcaaatagaggtctacgcagacttgggctgtcgtaaaaatgcaaggtgtgtggaacgaaaaaactgtttatgtagataattaataaaatttacacatggggttttgaaagtctagttgttaaggaaggttttttaaccggccgtcgctcgcccgtcgatcgagttgcggttcaatcgtcgttggagccagacgtgtccgaagtgtcaaaaatatttgccgagattttccgagaactcagcgttgtggaatgagatcagaatggatccggacaacgatatttatgccttctacgacataagggggtacaaggggtacacttgaaaaaataatagcaacttaagtgattaccacaatgcagcaaattcaaatactaaactttcaaacttctggacttgcaggaaatgtagaccgggcaggccgaactcggaacgaatcctgcaaccgcgaatgtcactcctaggaaagccgctgaactacaaccgcggcacccgccgcgatgttcgctaccggcgcctccagagtcgcctctacaacttcctggagcggccgcgcggcctgcacgccatcttctaccatgtgatggtgtaagtacactgcaaaaaacgttgttaaagtgttcataatagcatctagttcaagcttcacgtaagaaaagtgaatttctttagaagcagtgttgattttattacactaaaaattattgaatgccataagagaaaaaagtatttatttactttacattacaataatttgtgattgctcatttcctaaagattcctgatggtgttcacctgcctggcgctcagtgtgttttccaccatcaaggagtacgaagaggacgccgtctacattctgttccgcatggagatcctggtggttatctggttcacaatggagtttggagctcgactctggtcatcgggctgccgatcgcgataccagggatgcctgggtcgactgaagttcgtgaagcgaccattctgtattataggtaaataacaaaaaaaaaaaattagtttcactaactgaatgatatttgtgcattccagatattgtcaccattttagcctcaattgtagtattaggaatgggcacctcgggccaggtgttcgccacgagtgctttacgtggcctccggttctttcagatccttcggatggtgcgcatggatcggcggggcggcacctggaagctgctcggctcggttgtatacgcacatagacaggtgagtttgttttccacgtttacaccttgaaagtatttgctcaagttctctttgattagagtgcttaagaagatcactttcttatcgttatcgggatgacaagtgcactttaattgcgtaaataacacatgctttaaagttaattaaatgccttatctttaaaaacgtacacgatttcctatctacatatatattttgacttgcaggaactgatcacaaccatgtacatagggttcttaggtctaatctttgcatcattcctggtctatatgtgggagaaggacgtcaatgataagtttagcaatttcgcccaagccctctggtggggtgtggtgagtcccttggatcccatgacataatcacagtgctagcccatcctttcgattccagatcacactctgcacggtgggctatggagacatggtgcccatcacctggcagggcaagctaattgcctcctgctgcgcccttctgggaatatcctttttcgctttgccagctgtaagtcacttttagattacgaataaacatagctttaatagtgccacctatttttaattactttttgatacgagggctagtgataaagacatgttatctcactatttatgattgacaatgaagtgctgttatactattcttatcgatcaatcatagaagcgcagccacagttgatcataaattcgaatttcacttcataccttcttttttcccagggcatcctcggcagcggatttgctctgaaggtgcagcagcagcagcggcagaagcacatgattcgccgtcgccagccggcggccactctcatccaggccgtgtggagatgctatgcggccgacgagcattccgtatcggtggctacgtggaacatccaccgggtggcgctgcccagtccgccagcttcgtatgtattgccttaatatcgactgatcctttgtggggcggaacatttgaatgaaactcaagtatcttttgggggtatattacagaagagaagttcaacgagtactgtacagtatcgataaaacacttacacagtcacaaacacatgcacactgacacaaacactattcgcattggtgtttataaccaaagaaaaacttgtttacgagctggcgagctagaacttgtgagaagcgcgtagaaaggcgctaaattttggaaacttgtcatgtagagctcaattggaaattgaatgtgtacagaacaataacactgatcaaactaaaacactcataggtagaaatagagatacttagcatatgcaactatagccacccgactgtctttctatccgtctttcttctgtccactcgattaaatacttatgttctatataatttacttattcccatagataatataatttttgtaaacattttcagttctgaaaactgggagcgattattaaaaaacataactgaatataggtaaaagttgataaccgtaacaaaaagcaatcaaaatcaagccaagcaaagactcaagcaatctgccaatcattttgtacgggcggtgttcctcagcccccaaaagcacccacatccgtagacatggctcccacatctaaaatcaaaaattaaatatagttaattcgcagcttttctaccatcagcaccagactcaatctccctctctgtcgcactcgctctgtcgcctcgtctttccatctctgtctttcgctgcattcaaaggcgtttttgctaaattttttaaacttaccccattgaccgaaaacgattaatcaatatgatacgaattgattctcattttgtgtgttctgctgcctcgcgcccaaaaactccataaaaatgcatataattgtgtgtataatctataattaacacgtgagttcaatgaagccaaatgagtgaaaagctttttattcgattctctctcttgctccttttacccctttaatccatgcgaaatgaagacaccacaaccacccactcactccctccctaagttcgtaaggtttttcttctagcacctcgatgactcgtttcccccagtcccgcctttcaaaaatgaaggcatcgcctaaagaattttcaaattttagtatttatatctataaaaattttcgaaagattgcatagtgagcagtttcttttgtagtgatgagtcaaatttattg

SEQ ID NO: 40118 - DNA, 1280 bp, DROSOPHILA
atgaaatgtctagtaaagaaatgtagaccgggcaggccgaactcggaacgaatcctgcaaccgcgaatgtcactcctaggaaagccgctgaactacaaccgcggcacccgccgcgatgttcgctaccggcgcctccagagtcgcctctacaacttcctggagcggccgcgcggcctgcacgccatcttctaccatgtgatggtattcctgatggtgttcacctgcctggcgctcagtgtgttttccaccatcaaggagtacgaagaggacgccgtctacattctgttccgcatggagatcctggtggttatctggttcacaatggagtttggagctcgactctggtcatcgggctgccgatcgcgataccagggatgcctgggtcgactgaagttcgtgaagcgaccattctgtattatagatattgtcaccattttagcctcaattgtagtattaggaatgggcacctcgggccaggtgttcgccacgagtgctttacgtggcctccggttctttcagatccttcggatggtgcgcatggatcggcggggcggcacctggaagctgctcggctcggttgtatacgcacatagacagcaggaactgatcacaaccatgtacatagggttcttaggtctaatctttgcatcattcctggtctatatgtgggagaaggacgtcaatgataagtttagcaatttcgcccaagccctctggtggggtgatcacactctgcacggtgggctatggagacatggtgcccatcacctggcagggcaagctaattgcctcctgctgcgcccttctgggaatatcctttttcgctttgccagcttcataccttcttttttcccagggcatcctcggcagcggatttgctctgaaggtgcagcagcagcagcggcagaagcacatgattcgccgtcgccagccggcggccactctcatccaggccgtgtggagatgctatgcggccgacgagcattccgtatcggtggctacgtggaacatccaccgggtggcgctgcccagtccgccagcttcgtatgtattgccttaatatcgactgatcctttgtggggcggaacatttgaatgaaactcaagtatcttttgggggtatattacagaagagaagttcaacgagtactgtacagtatcgataaaacacttacacagtcacaaacacatgcacactgacacaaacactattcgcattggtgtttataaccaaagaaaaacttgtttacgagctggcgagctagaacttgtgagaagcgc

SEQ ID NO: 40119 - protein, 343 aa, DROSOPHILA
MSLLGKPLNYNRGTRRDVRYRRLQSRLYNFLERPRGLHAIFYHVMVFLMVFTCLALSVFSTIKEYEEDAVYILFRMEILVVIWFTMEFGARLWSSGCRSRYQGCLGRLKFVKRPFCIIDIVTILASIVVLGMGTSGQVFATSALRGLRFFQILRMVRMDRRGGTWKLLGSVVYAHRQQELITTMYIGFLGLIFASFLVYMWEKDVNDKFSNFAQALWWGDHTLHGGLWRHGAHHLAGQANCLLLRPSGNILFRFASFIPSFFPGHPRQRICSEGAAAAAAEAHDSPSPAGGHSHPGRVEMLCGRRAFRIGGYVEHPPGGAAQSASFVCIALISTDPLWGGTFE

SEQ ID NO: 40120 - DNA, 4870 bp, DROSOPHILA
ctcattctcctaaacaaattctagctcgattttatgggaattcttcagctcatgatcgatgtgttgttgcttctgttccactgctcccaaagaaaccaagtgtccctgggcagagttttggtgatgctgctgttggacttcaagctccacacggtgcggtggcttctggtcaacaggcttgatctcaatttccaagtgctgtggaggcttctgttccacctgcttgatttccagttccacctgatgattttgcgaagaatgttgttgctgctgctgcttaatctccacctccaagtgctgaggtggcttctgctccacgggcttgacgcccaaagaaaccaaatgtccctgaggagagttttgctcgtgctgcggcttcacctcaaactccaatcgctggggtggcttctgctccaccggcttgatctcaaagtccacggtgtgaggaggtctcgactcgacctgagaagaactttgttccatgtactgaggctgcttgggctccacatgattgatttccgcattgacctggttgctcggcagagagttgtggtgctgtggctggaattcaatctccatgttctggtgcttctggcccggtggtcgtacctttgcaaatatgtgagcgtactgatcaagctcactgcctggtttcggcatcaccctgactggcggagccgtcaaaactgtaccgattagtgccaaaattattgctgccttcatcttgattggttcacaacaaactgtgaatcaagctactttaccattcgacttaaatacccaaatcgaagtgcttgaggccccaatattttgcaactaattaggtgtcaataacatcttatcagagcacgtaaaacaggagccgcggggagaaccctgaacacagttaattgcaacagattagataccgacattcagataaatcaggcgagacgagacccatcatcccctttccactctgtctgcagatgatacagatttctaattaaacgcagcgggtggagttaataagactactttaatgcatatggagctaaactcatgtgagcttaatgtcgtagatgcgtaccagatgatcctcaccacaactcgcaagctggagttgttttcccgggcggaactgcagacgtcgaacggtgagatgatgagcttggctaaaagtttacaaaacattaaaactacagcacataaatagaagaaaatacaactaacctcttattcaaatcgcttagtaacttccatgctcctcgaacaaactgatatatttttatcagtccggtttccgtgcccaaagcaagaatgtatgtgtcatctgtaccactaagataagaattggaaaaagccacggctgtgattgactcatttttaagttctaaaactccattcgcctgccagccatttagcgaagactccttgcagtcttcttcctttttccaaaccactacttttccatcccttgagctcgtcacaaagaactgaccatcatgcgaccaatcacacgaccaaatgatgcgtgtatgaactccattggatttgtcagtgctggccaccagttgatagcttactgaggaatcctgcctctcgtagagacaccagcgacgatcccgggacactgatagcagatatcgcgaatcgggggagaaactaagttgggtcactgtcaactggtgtccactcagcttctgtatttgcttccagtttgaagggttcctgaaagaaatatcatttcgttcttaatatgcccatgtgcatgactaattaaagatttttagaaagtactttagcagcaaactgtggcatgcataatgcattgttatatcccgcctcaaactctgcaattatacgtaccataatataatctgagcatgctcggcattgctggctttgcaagtggaggccaagagggaaccatctgcagtggcagctagtgcaaagatttcgtagccatggccataaagcttctgcagctcgggccaaagtgtattctgcattaaagtctcttcctgcggtggtgtttccagagcaataggcacaaagtaattgtcagggtattcgtctttactggtcttgctggtcgactccacttcagaatctaccttgtagacagccttgttggataatcccaaagaaggcacggaagctcctttgggaagagctaaataaatttaagttaaaaggtacactaaatagtaatataatccctcagctgacttacaatccagcagaacgtctcccgcatcgtcattttctatcccactgatgtgacgaaagttttcaatgaagttggctggcgcttgaaaagtgcgcacaatcttttcctcagctccgctggcaaatttataacgtgaaagcaaagccaacgcctgcatatcatatccatgaatttgtggacgagccagctcgtgccacgtgggattagctccatcctgtagccacggagcgtgcagtcgagttgtttggtctgcagacgcggtcatcaaataggcgccgctatgttcccaagccagatccctcacttcgccataatgaccaccaacgatgacacctggggtccagagctgtggccgatctggatcttggctccaaatatgaaagccaccttggtagctgtgggccatgatcgagtgtccatcgccggagaactttccaccatagaagcccacggagtttccacccacttcacccacgcgaacttcttccaaccaaatgccttcttccgtaggtgcccaaattatgacggtcttgtcaatagaagcggatagaaggcggagctctaaatggataacgtttttgaaaggtctttggggagttcaattgctgtgctttaccttgatcgggtgttttgtgccagtggaccccataaatccatccctcatgtccatatagaaccgattccaagctcactgcataccaggcttctttccccagttgtagtatcttctcctccacctttatctcatcgtcgttgtggctcaattgatgcagatcaacccgattctcttgcatttgctctttgctgcgcggcgcaatccgccagagacgaataaagttatcctgagagccactggccagcagcaaatcctcgccatcgacaacgaaatccagacctcgaacccagtcttcgtggccagtgagcttgtgtttgcgttggaactgccgacctagtgaatctccttcacctgcggtttctacctgttccgaccacagggaaacagtctcgtcatcgccactgaaggcgagcagaacctggttgctcttgggcagcagctgcagtcgaagacagaagcagaatccgtcggataaagatatggtttgaaagcacacataattattatcctggaaagtccacaacttgatggtggtatctgctgctgcggtcgccaaaagccaggagccatcctgttggcgaattccatccacagtatttacgccacttgtgtgtcctttgagagtgaagctcttagtcgttcccgtttcatccagttcccagagaatagcaattgcatcatctccgccggaaagaagtttgtcgcaatccaaccacctcacagtgtttactcgctttgtgtgctccaccagcgtgaacaggaccttggctgagttgccttgaaactaaaaattggttaaatatactatgtttccagtaaaggcaaaatttcctacctttggatccataatggctatggcgttacatgccccataggcaatccaaccatttggaccccaatccgcgcattccgtgcagcggttgcaggccactgaagtatgcagattctccacttgcatgctaatgttgcacttctattttttaatgacaactaaattcgaattgaatgtcggcgaaattgttttgttttggcacatgtgcttcaaataatgcagtgcttctaaaactgtctcatctgttcataaacatatgatttctaagggagtgcaagtgagacaactatatgttgtgaagaagctggaatagtgaggccagccgacaatattgaaaagtctggcagggctagttacgaaagttacacctgtttggtttttgatttttcggtattgcagaccattgcaaaattttgaccgaataaatattgcaacttctgtaatactgggtatatgatggattttaaaatttgaaaaggcacaaacacagctgctacattcgtcagccttttcacttcaaatctagcgcttttccactgctactgtttggtcacactggtgcgcaaaataactaaaacaaactcggaaaaggcgtccgcaaatgttttcttctgctgctccccgcgtttaattaaaagtaattttcctaattgatggccaggggtgagccccagttgctgatatttgacctttcaccgccagcgtttcggatttccaatcagaaagccaacagcttgcaactgactcacaacgaagtcacttgagattgtccgagttttttttcaacttcggtattctatttttcgtatctcccctgcagcttgtgagcgtcttggaatgctgaatgtgtttcgccagcagtataatcgaagcgcacaggaagttatttatagcgccgccggatttggatcattccgatccagccacacccacgatttcgaccagatccaaaatgccgagggggaaatcccgcctgcaaaccgaagtttgtggcgattgcggagctggtgatccatcctgggcgagcatcaaccggggcatccttctctgcgccgactgctgttcggtgcaccgcagtctgggcaggcacatctccattgtgaagtctctacgccagggtaactgggagccctcggttctgaactttgtgaactctctaaacgcccatggagccaatagtgtttgggagcatcatctgctggatggcagc

SEQ ID NO: 40121 - DNA, 2568 bp, DROSOPHILA
aagcacatgtgccaaaacaaaacaatttcgccgacattcaattcgaatttagttgtcattaaaaaatagaagtgcaacattagcatgcaagtggagaatctgcatacttcagtggcctgcaaccgctgcacggaatgcgcggattggggtccaaatggttggattgcctatggggcatgtaacgccatagccattatggatccaaagtttcaaggcaactcagccaaggtcctgttcacgctggtggagcacacaaagcgagtaaacactgtgaggtggttggattgcgacaaacttctttccggcggagatgatgcaattgctattctctgggaactggatgaaacgggaacgactaagagcttcactctcaaaggacacacaagtggcgtaaatactgtggatggaattcgccaacaggatggctcctggcttttggcgaccgcagcagcagataccaccatcaagttgtggactttccaggataataattatgtgtgctttcaaaccatatctttatccgacggattctgcttctgtcttcgactgcagctgctgcccaagagcaaccaggttctgctcgccttcagtggcgatgacgagactgtttccctgtggtcggaacaggtagaaaccgcaggtgaaggagattcactaggtcggcagttccaacgcaaacacaagctcactggccacgaagactgggttcgaggtctggatttcgttgtcgatggcgaggatttgctgctggccagtggctctcaggataactttattcgtctctggcggattgcgccgcgcagcaaagagcaaatgcaagagaatcgggttgatctgcatcaattgagccacaacgacgatgagataaaggtggaggagaagatactacaactggggaaagaagcctggtatgcagtgagcttggaatcggttctatatggacatgagggatggatttatggggtccactggcacaaaacacccgatcaagagctccgccttctatccgcttctattgacaagaccgtcataatttgggcacctacggaagaaggcatttggttggaagaagttcgcgtgggtgaagtgggtggaaactccgtgggcttctatggtggaaagttctccggcgatggacactcgatcatggcccacagctaccaaggtggctttcatatttggagccaagatccagatcggccacagctctggaccccaggtgtcatcgttggtggtcattatggcgaagtgagggatctggcttgggaacatagcggcgcctatttgatgaccgcgtctgcagaccaaacaactcgactgcacgctccgtggctacaggatggagctaatcccacgtggcacgagctggctcgtccacaaattcatggatatgatatgcaggcgttggctttgctttcacgttataaatttgccagcggagctgaggaaaagattgtgcgcacttttcaagcgccagccaacttcattgaaaactttcgtcacatcagtgggatagaaaatgacgatgcgggagacgttctgctggattgtaagtcagctgagggattatattactatttagtgtaccttttaacttaaatttatttagctcttcccaaaggagcttccgtgccttctttgggattatccaacaaggctgtctacaaggtagattctgaagtggagtcgaccagcaagaccagtaaagacgaataccctgacaattactttgtgcctattgctctggaaacaccaccgcaggaagagactttaatgcagaatacactttggcccgagctgcagaagctttatggccatggctacgaaatctttgcactagctgccactgcagatggttccctcttggcctccacttgcaaagccagcaatgccgagcatgctcagattatattatggaacccttcaaactggaagcaaatacagaagctgagtggacaccagttgacagtgacccaacttagtttctcccccgattcgcgatatctgctatcagtgtcccgggatcgtcgctggtgtctctacgagaggcaggattcctcagtaagctatcaactggtggccagcactgacaaatccaatggagttcatacacgcatcatttggtcgtgtgattggtcgcatgatggtcagttctttgtgacgagctcaagggatggaaaagtagtggtttggaaaaaggaagaagactgcaaggagtcttcgctaaatggctggcaggcgaatggagttttagaacttaaaaatgagtcaatcacagccgtggctttttccaattcttatcttagtggtacagatgacacatacattcttgctttgggcacggaaaccggactgataaaaatatatcagtttgttcgaggagcatggaagttactaagcgatttgaataagagccaagctcatcatctcaccgttcgacgtctgcagttccgcccgggaaaacaactccagcttgcgagttgtggtgaggatcatctggtacgcatctacgacattaagctcacatgagtttagctccatatgcattaaagtagtcttattaactcc

SEQ ID NO: 40122 - protein, 504 aa, DROSOPHILA
MQVENLHTSVACNRCTECADWGPNGWIAYGACNAIAIMDPKFQGNSAKVLFTLVEHTKRVNTVRWLDCDKLLSGGDDAIAILWELDETGTTKSFTLKGHTSGVNTVDGIRQQDGSWLLATAAADTTIKLWTFQDNNYVCFQTISLSDGFCFCLRLQLLPKSNQVLLAFSGDDETVSLWSEQVETAGEGDSLGRQFQRKHKLTGHEDWVRGLDFVVDGEDLLLASGSQDNFIRLWRIAPRSKEQMQENRVDLHQLSHNDDEIKVEEKILQLGKEAWYAVSLESVLYGHEGWIYGVHWHKTPDQELRLLSASIDKTVIIWAPTEEGIWLEEVRVGEVGGNSVGFYGGKFSGDGHSIMAHSYQGGFHIWSQDPDRPQLWTPGVIVGGHYGEVRDLAWEHSGAYLMTASADQTTRLHAPWLQDGANPTWHELARPQIHGYDMQALALLSRYKFASGAEEKIVRTFQAPANFIENFRHISGIENDDAGDVLLDCKSAEGLYYYLVYLLT

SEQ ID NO: 40123 - DNA, 31068 bp, DROSOPHILA
aattatatggtttcattgcaatccaactcattaggaacaagactttctaaaactgacctgctaaagcatgaatcgccttgtgctccttccagaatcctttgaagcacggctgcgagcagaaaaatgagcccttgatgcccaactttaggcaggtgggacactgcagggtcgcatccttgccgcagttggttgtctcgcacttttgagtcattctatttcaacaattaatgcgagaaaaatttccgtgcctgccaaaaatagtttaacacagcgtgaccgcaccgataacgatagaaaatacctggaagctttaaaataaatacctttttataccattatatgacaatatataagcaatatggctttttgggaaatttgccttacgcttcaagcaaaatcataattctattggtttgatattaaatactgttttctgattaaacattaaaaaagttgatattaaataaataccaaatcaatgtttaagaatggcgctacatcgatatccgatgttttccaagcaccgatagcctgggaccagttctgttcttatcgatacgtttgtgccagggttgttcgtcgccggctgtaacgggcattagtttaaaattggaaataacttgataaccattttatgtgtatttaaccatttaaaatgttactattatggtaagtgattcgtaaatagtattcatatgataattaacataagaaaagagttaataagggctttccttacaaatggtttaaaatcgttcgaaatttgaaagtaaacaaattaaatatgtaagttcttcgcggagatctttgatctggctaagggacactggccccgtgaattcgtggcctttgttttcgtccgtcggggcggcagttcaaacgcagccgcctgttgggcacttttccgcagttgttctcggcgcatgctcttggtgggaacagtttggacttggactcggtttatctgtctgctctgtttatgttctcaaatcgcgagcaacttcggtcgtgaacggacgtgctttcgctgtaaactcggaatcggtgtcgcgaaacaaaagaatattggcaacaaacttgtttgagtcaaatggccaaacgcaaatatccgcaaagggcagcaggataaatttattggccagtgaagtgagtgagtgtcttgtttcgaattggtttggccaaaaaaaaaagaggacccctttaatatttctacctgcaagggatgctgagatttcggcagagtttcgcatcatttgcgagcgcaacttaactaactcaacaagtgaattcaagggttttcgctcctccaattactgattttgtcctcgtgatcttcgtactcgattgaaattcgattacgatcgttttgtgtgtgtgcattgaaatcagcgttatcagtgtctgccctgatctttggttttgcgttgaacatgtttattattattcatttctctggtttcccgcgcccaacgacaataagttaagtaaacacgctgtttttgttgaggatgctgctgctgctgtctgttgtcgttgctgctgtatatgttgctgctgcatgtgttacagctgtttccatagttgctgttgctgctgtcacatgtgttgctactgtctcttgtgctgctgctgtttccaaagcggctgctgatgtcaatgttgctgctgctatcgcgtatgttgctgcaacttttttagttaccgctgttgctgcaatctcatatgttgctgctgtttctatggctgaaggtgttgcttctttgttgctgctgttgctgctgataggagcgcagcattcgaatggctataaataaaaaacggcacgcggtgtgtgcagcagtgagaatcccccggcccgtctccgccggattttcagcaccaccagcatcgcttgattattattggtgggtgttctgcgttttacgcgaccacacacaggcacactgccacacacacactattatcttcgccgtgcggtttccacttttccgcttttcattccgtcgttaagacgcagcacatatctcgtcaattggcaatctaaaggccgccggcataattaaaatagaatcatttctgatttcgctttgtgtcgcacagacatgtgtgtcttattttgtttgtttgttttttcttttttttttgcaatacggaacaattgcgaaagtcaaggtggccgcgaaaagccgcgaaatagtagggaattcctatgcgatggcaacgaactcgatctctgtgtacccaactcatcttgtctggccttttattgatttattttttccccggcagtcagtctactctttttttatgttcccctttgttttgaccaacgatcctcgatcttcgacggcaattaaaggcaggccaaaatggtccaggaaggcagacatcagccttaatttgctttggttgcattgcctgctcgtcttcggaactttttcatatgctgcgcagtgcgtactttgtttgtttgtgtgccagccgaatggaagctgatggaaatttatgcgtagagaaaggtggaagaatatgaaatggaaaatatgaaatttttgaattgagtttgtggaggagtggggggggggggctggggcggtacacctaacacttccggttgccagaatatcaacttccggtggcgtagaattgttagcggggaaatgctttggcacaaaagacgcatattgatattgttgcccaggctgcttacgctccaataagcacacccacacacacacataggcagacatacagacgggaaggtccttcgtccttgggagccagaaaacgcatttcatttttgctccagtgagttggcccttgtctggcaaacgttttgtggcaacttggccattaagcatttcgtgtttaagcagcaggatctttccctcgcccttccctctcaggacgaaggaccaacaggacagtacagcaaggaataaaaattgcccgcgtatgcatttcttaacaacatttctccaccaccctcccccttcgctccccagcgacaacatttcatttcatattttgtggcagcagcgctttgaatagaattcatttggattccctttcccaggacacctcgtccacttccttttgcctttgtcagcccctgggtttccgcatcccacatcccagaacccagatcttccacatccctcatcttcctggaacacgcacttcagactgatagcgcctgcttaacaaatttctgctgtatttttcggttcttgttctccactttattatattccgtcttcttctttttttgccatggcaatggggatttttccgcatttttagctgtcgcagcagggtaaaaattaaaagcgaattaagttcgaggagctgtggaggcatctaaaaggtatctaaaaggtggacagccgaagataactgcacttgacgccggatagaccacaggcattattaaaccccaaatttacctgccaaccaggcggggtggcaaatctgcaaaagagatttgagttattttatggatattactaagtattctgtatctgctacagcagccatgaattggggggctttttggaaagggtctttattacacataacaaaaaaatttataaaaatataggtctctatattcttcaaatggctcaatcatagttatttactattaacttgcgaaaaatacccaaaagttcctgtccttttatacatcttgcacgttattagtttgctcgctgaattttctcagtgtaagatcccatgaaatacaaatatttttccctatgtaggcacaacagctgacaccatcctgctaacaagcagccgtcgcatccacatcctcctccaaagtcctcgagaacaggagcaccctgccattgaaagtgtcaccccaagctacttcttctgtatttttacttcatcttttgccacgccactttttctgcacccccttccctccgaatcacttggtttcttcccaatttcggttgctataaagcaaagttaatgatatgtcgcaagtgcttgtttgtctgcctgactggggatgagtgtgggtgagtggctccacttccagttggctgaatactgtcgtcgttgctgtggccccattccatgtgtaattaattaaagactaagcagattttatatttcacttacttgcttgagactaatttatgagtatttccactttttgtcatatttcaaagtctgcacgatagactaattgggtagttcagtagtggtagtgaaacgggaaatcttgaggcattcttaagggtcaaggatatcttatagatttgcctcgttgcaaagctattcattgagctctcaatggcttcgattgccttggccgtggtttcgccactttttagttggccaaagcccaacttgggccacaaacttttcactggccgtcagttttctcggatcgttttcacttgcacgcatttacaagcaagaagttaagtcgccagtttgctcaacggggggcattttctcgctggaatttgttggcccagtcgcccttttttatttgccaaattaaaaggatttcactcgcttttcatatttgcattgggggagctgctttacgcttttattcttttcatattttatcgccggcctgccaggccttgtagcccattgccaacaattttcccacgcaatcaccataaaaagaaatctttgccgccatatttctgtaggatgcctgctcctctgttggtttctctctggcaattgttattcatgacccgaaataacagcagggtggctgcagggatgatgatgaaatgagatgggttacgctgtactgggatgccaaggtgaggcgcatccctggtctccaatgggccgtgttgggtactgattcctctggccacacaacgctcgtcattcgtcgttgttagtattaattatttcttaactttagtgccggttcctgctagcacggtttataaataaagcgcaggcccttcacggcatcgctgggcctcagttcatcctgctgctccggcgaccactggttatttgcatcgaccttcgtcctgtttctgttgcagattatgaccccaaaagtgggagggtggctgtctatctgtctgcggggtattttatggctgaactttatttacattcacatgccgagctgctaaataatcaggactcgacccgaccacccgctcatttcgtttgtactgtgctgcaggatacagcagccaggagccagtggccaggatatacggatgtaccgcctgaaggaagaagggtgtgggcattgggaagtgggtgggtgggtttttggccatggtctgaaccggcgtacaagggccacaggtgccaggcagccaagtttaattatttgccgttggctttggattcgttctggttctggtcctgccctttggggtcctcatcctctcggtgccctggcctctggcctgctatccccctccgtcatgccatcatcccatctggttgtctgtttgtttgcttgtttgttgttagttcagtcgcctcgctgcattttgcgcttgtgaagcattttaaatcgcataaaagtcggccgcagcagaagcagaaggatcctctgagcccccgggctggtcaccccattcattataccatttcggctggcctagcctttgcgtctgtaattgaaattaagttgttgccaaattgaggctcgtagtcctgctgctccgcccacttgttagccaagtcgtggtctgcatttcgatgtccttgagtgctgccgaaaatggtccagaaatgcgaaaagtcgcaaagtgcttggcactgagctaaacaacaactctgtttgcccgcagtcatgctgaatccttctttaaaattcatttgagagccatttcaattcatatcttttgccgtatagcttgcaactgcaaatgtcaactgtcaaacggagaaaatcaaaattaggcaaacaaagagcttccacagcgagtcctgtcaggatttgctcttgtaaaacactaaaaacgccagagacttcgagggtgggcgcaagttggctgctggtgctgattccccgtctagtgctactccaaatcagagactgagaatcggaaccgccccggctggaaaacaaggattccccagccacttgacgcttgtcattgtcagctcttgtagttggaaagttgcgagcacttgacaagcctgattgatggcctcgttgcgaggaggagcaagtatgccaggatgccagaatgccaggatgttgggctgccaggatatctggatatctgctgcctggcactcttatcgcatctaattaaactaaaagtaaatggtgcgtgccatttgaaaatgacatctttaagcgtttaagtgcgaatatcgaggggactcaacgtgcactttgacgaatagaaagaacacttatttgtttttgtcagctattacgtagtaaaattgccatttgtttacgctaacgaattgacctagaactctgataagaatgcacctaccgaaatccatgtgggtgcgataagagcggaggaggaagttcatgagaatgggcatggaaatgggaatgatgaggtccgcacaaattccataatgagcaaagtggctggaaaatggcaaagtggaaggcgctttcactttagccaattaacatacttttcaacgattttcaatttgctgccagagacgtggcaacaaagacaacaaaagaaaaaaaaaatcgcaagagggacgtacatttcaagttaacttgccacccacctcgggcccaccaccactgcttatttagtttggaatttatcaattgaatttttaatttcgcttaaatgagacggcggcaacaagaacggcgccgtcatcatcattctcgtccctgccgttggtcccatgcggcgtatacgtaattatgcgaacgtggattatggaaatggctgctcgggggtttccctttcctcattcccccattcgaacgccatttccctgcagaaatagctcctgctgctccttcttggttgggtgaaattaaacgaaatgaaattaagaaaatatgttgcactccttttgcctcgcttcgcttcgcaactgttttgcttggctgcaaaaactttctgtccaaggtttcgtccgtggaattgtctgtgtggtgtttgcctttatttgctagttgccaccaccgccatcaccaccaccatcataaccaccaccaccaccaccacacaaaaggcaacttaatttgccataaaaagccaggcgagtccttgatttgttttgtttgagcgggggccggaaatgaaatgatttaatgaaattgccacaattgctggggaaaatcagtagcagcaacagcagcaggaaaacagcctgatgacaatggttttggtcaaacttcaagttaattgaaaaggttttgtgaattgctcggggttttcggggctaagcgatttttaattacctgttattgtggattgcagcaaaggtgcctgcctttcagagtttcgcctgcaaattaattgagtgctaagttaaggagcggcaggggcaagtcctgctcctacctgtcctggttttacgggcttactgcctgaccattatcgtctaagtcgacttccttcactcgcccccgttttccgcccatctgttggattttgcacctcctttgttcgtagttcagatacccgagttttatgatcgcccaaggcacagatgttggtttcatatacacttaaatatgtatatgccataagatacatatgtaaataagacaccgggtgtgcacagattgagattatctgccggatacacattttgtctaatataaacccatattgatgaggccaaaactctgtgtgtttgcccctgtgtctcgcatcgattgcattggatgcctcatttcggaattagcaactgcatccgtgaggttgacatttcccagccagagttcgcattcaaattgcaaatgaatgccggcacagcaggcaagataaccccgattgggaatgcataagtaaattgctttcccccagccgaatggtaatgttactactgccgatttcgatctgcattttcgcagtttaatccccagcacaattcagctttgtatttacccatcaatgtgtgtgaaagtacgccgtttatttccgccaaacaaaaaaaaaaaatacaattatttcagggccatgaaaaaacgaaatccagcgagcttatctccagaaagtgtgggtcaattcgaatgggacaaagggttatcttcggttcaccgggggcttgggaacacagacctatagactatatagcagctaaaaacaagggagtataacatacgattcacttgggagtttgataaaaatgtgtattagtcatacttattttgaaaggttaaaaaaaaaataaatattaaatatgacaagaccttacattcataacaatttgattgcaccttgcttttaagtaaaaaaaaatagtaaactaatacttgaaacaaagggttatcagtgggtttaaacagccatgaacgtaaacaacataataatataataatagtgcacacacagagtcagtgtcactcagttccactgagtctggtactaaactgaatgaatccgcctccaactcattccacaatctaatcaatgcgtttccccttcttgtttaactattttcattgcaggcccggcacgtgctaatcgaaaatgcagaaattatactaagagcagataggtaggcacatctcagtccaaacgtggtcagtggtcacgaaacgaggaaagagcaacaaaacctaaaatcacaaaccgaagacttcaaagtacacaagaatttgaagccactgcaatgcgtaggaggcgtggcacgcccctgggcgtcagctggacgaactgcgtcctgctcctggccaccggtctgctggtggtgctcatttcggtgcacgccaagaaccccaggccgcatcgaggactacccgccccggctcctgcaccagttcctgcatccgtagatcaggtggcaactgaaaatgcccacaggcgggaacctaccgtcgatgggagtgtacttcaacggctatcgggttcagatagggctgttgacgaggatgaggatgtcgatgaggatgaggatgaggggctaaagcaccagcacctcgagcatcggcaacaatttgacgcatatctgggcacaatccgacggctgcgtcgtccataccgcagcaaatacaccatcgagcagctgatgcgactgcatgtgacaccaaaggtatccggagacattgacatggatccctgcaaggcgggtgagtacgggttagggtgcacatatcccagattcctcctgattccacattccatattccgcttgccacgggtcacggaaatggcttagcatttgccttgcctcggcgttgattcaactccgccgtgagccaatctctaagccccgaatctatatatttacacagcaaggaatatatatatacgttttataaagaaaaatcttaagttatacacttaaaatataggcttgaagttaggaatatatgtcattttaataataactcaaagaggaataaagctaaagttagttcttctttcaagctaactgccggcaagtatttctctcagtgcatatctatatgagatttcaccgataccccagtcaagtcgtggcaagacaaaagctttgaaaattgtgttatccagcgagtttgagtaaaagcgaaaagtcttgttaactcgagacgcagacagctacacacacgtggaagtgtctcagctccatccagagccacccctccttatcccagtccatcgcatcccaacccactcaacattatttatggccaccaccgagaccaccccaccccactcaccagcacttggcatccagccccccggaaaagcccctgtcagccgcttgttgcagcgctcgaaattaagcgctattgtggcatgctacgtctacttgtgctcatcctgccttccgatcagctcgattcaattgaatttaccttagtttgcacaaaaaaaaaaaaaaacacacacacagaagggaaataataaaaaaccaagggaagatgtaaggaaattgactgcgagagcaatgcgaaaacgaatgcgtcgccaacgtatcaatggctcctattcacccacctctgcttgtccggacaaggatccccgcattcgcatccgtatccgcatcctggtcggagcttaagtcggcgcttgtgtctgccaagggcagaagcaccggcttcgattgcaatttgtctgcctcgatgtggtagatggcaagtttatctgcgggtccatctataagtatttgctcacatcaattgtcaaaaagttgagcaccccctgcgggtggcaaccgcccgtccgccatccatcgaatgccaaaaacccagtcaaggacagacattcctcgggcggaatcctctccaaagtatgcgtatattgaacggcaaacgacttccgcactaactatcatcattgccaatgcgatgtcaagtgtttgaatatccccgtctttattccgcattttggattatattaaggggctttagtttgagcattaaaaaaaaattaacttatatgattatttataagcagctttggcgatattaattcatgccgattaaaacagcggtgtaaacattcaattagtaaagttaattgtacttaaccctttggctgattacatcaattccaaaagtatttaacatttcattgctgggaattcgcattgttttcaaaataaaacaaatatgttaaacgtttgttctttaaattgcaatgttaaagcgcttttctatatcagctctcgcggaatgtatattgttttaaaatgcaaatgatttgttgttatgcctgtaccattatgccatttatgggcttttacgaactcatcaactcccttttatgagcattgcgtttcccccatttgggtaaattactctcgttggtcccgtgaaggtcgatgtctggcgcttcgattgccagataggtcacaccgccacatagatcaaccattttcgtgtggttccccaaacttttccagcccgatttcacttccaatcaatcatcagcgcctcggggaatttttcactaccgttctctttttttttttttttttttttttttattaattttttattatttattgaatcttccctttgtgttaagagactaacaataagtgttcaaatcttaatctaacttaattaactttcacttagtgatagttttttttttttcattaatgccctaataagtttattgctgggctgggaggtcgttgcggtgcagccggctttgactgcatactcggattagttttcttgcgaggggatttgtatgggtggtcagcttttcgttatacttcgtttttttctcagctattacttcgattactaatttgatttttaggtctctgtgtatgttttcgtttcgaaggtaccacggcgctccagtgataattctcaaaattcttgactgggctcgctgaataatgtctatgttacttctggatgcgttgccccacagctcggagccataagtccagataggttttaagacggagttgtatagaagagctttgaactccaaactaagtggagagcgagcatttatgagccagtgggaggttccttgctttaagtttaagatgtttcgatttggcttctatatgtttgcgccaagtgagccgcctgtccagatgaactcccagatatgttacctcgtcggcttgtggaatgcatatgttattcaagaccagtggtgggcatgtttgtttgtttaaggtaaaggtaacctgcttgcatttttgaacatttattgaaattctccagtcggcaagccatcgttctacagatgttaagtgtcgggataggagtgcccgtggcttttattgggcatttcgagcgactgagtatcgcggtatcatcagcgaacgtggaggttgttagattgtagtctatggggaaatccgccgtatacagggtgtataagattggacccagtacactgccttgcggcactccagcttcgattgcgcaatcgcgtgaagtgcttgtatcgcatcttattgcaaacactctgttatataggtatgacttcagtagcttatgtgtgttttggggcaacagcttgattattttaaacaaaagtccatcgagccacacctctgtcaaatgcctgcgcgacgtctaagaaaaatggctgtgcagtattctcgatgttaaaagcagtaccgaatttctacgtagattcggttgcctgttcgatggttccatgtttttctctaaagccaaattgatgtgttggaagtgtgttgttattctaagatgagggctaatccgaggagtagcattttttcaaacagctttgaaagacatgttagtaagcttatcgggtctatatgatgatggctgcgttttatcttttcctggctttggaatcattactatgggtcgactttttccatttttgagggaagtatccaagcttggcgattgcgttgaacaacaggcagatgtgaagaaagcacactttgggagttcaatgagcattcttggagttattaggtcgtagccaggcgattttcttgggttcagttgctctttgataacctttgctagttacatggtcggaattcaaagggttcttgaggatctagattggctgctattaaaggagggagaataaatgtgttggtagagggatttggtcggaatacattttgtaaatggtcagcgaaagcactggctctttcttcatcacttcgaaaccaggtgccagagggacttcggagtggcataattggcgctattggagtctttaggtttctggagctctccaaagagggtacttagtgctggtgggagagagttgctcgatatattgaacgttggctgtttttttcctcttgtttgagagcattggtaagcctgcgtgtggctatcttaagcatgtgcttagtaattggtgatctattagactgccaatcccttcgtaggcgtcgtttatctaataccagccgctcgatttcgcgattagttttgatgtagtttggttttgcatacgtcactggcggggttgaagcctttgcagccgaaactaaaatgttttcaagagtttccgttgacttgtctatatcctcctttgtagataatgcccgtcgttagttctatgtgtgaacagacatacttttgataccttggccagtttgttctaaaatttgtgagtctatacggtgggtcgacgatgtgggggcgagttagcatatttagaaaaacaggtgagtgatctgatgataaatctgctagtgcttcggcggtgaccatgttgcgggggacatgtttagtaattgcaaaatcgatcaggtctgggatttttcttgggtctgctggccagtatgtaggcttacccggggataccgttctcagtccataattattgaattgtttgcaatgccgtttgcaaatggtcgggccaaaaaaaaaaaaaaaaaaaaaattgggtcaaagtcgaattgtagtgcacagactgaaaactgaagacatggcttcctaatatatgcaaatgcacgcagctatctagatatagattcgattgagaggggccagtggaagggggggggggcggtggatagaaaaataaacaatttttacttggtttccgcacgcacaaagcaacctaattgaatttcggagtgggatcacgaaagagggaagctcgttgttaatcaacttccaattgaagttgaagcaatttgaaactcgaaaatttaatttgccaaaaatgtgcactgtgcgtcgcagaaacgaaaatcccccggagtgcaagcacgctcacacacacacacacacacacacgcattaacacgacttagttaaacaacaaaattgccagcgagtactcgaaagttaattaagccctttgaagcggcagcgcccataagtaggcaacacgaaagcgtttagcattataaattcttagtagcgtgtcataatgcattcatgttggccaacactttaaggaatttacagcgaatgggcgacaatgcgttgcgttgcattgttcgctgcgctttgtgcagattcgctaattaatttgcataagccaagtgcacaaaagttccatcaatgccgcaggaacaatggaaactgggcttaggggcatcaaacaaggcgtgactggtgggcgaggaaccagaaatcaaaccgcaaatggcactgcaaatgggcgggcaaagcccaagcattccctaggagtgcagccagagccaagttgacgacagtaatgatgacaacagcatcacaataacaaccgcaaagccaggacgaccaaaatgtcagtcgtcgtcggcggcggcggcggcggaggaggaggcgccatcgcggcgatggcttcaagtggcctggctgatggcgaatggagcggaggggagtggagtggagcggtgtgtagcgcacaaaactcaaacaacctgcccaagtgactgcaaataatttcccaccatgccatgccacaacgcaccgcacacacacatacagctctttcttgcggggattccccctatcacgattcacactcacattgatgctgctctagcgaaatggcaaaatgtcagaatggctcggctgaaaggcaacaaactaacgccgctgttcgcgctctcaaataaaaaggcacttccaaggcattgcatgcatatagctgcaggatgcgggggccaccgaatggagatggaaacggttcgtgttccaagggaaactaccctcccctccctctcctaaaacgacggaataaatctaggggtgaggcaagtgcagttcagctgggaattgctcgatatgaacatgcacagtgcactgggaatataaatatagcctaatatagatgatcgatgcaaattatatctttaagatattcacatttaaggataagattcatttatatattgcaaagtggcatttataccataaattgaatggcgcttttcggttgggtggcagggtgggtgagtggtgctggaggcgcagattgttgggatgctcaccgcaaaacagccagcaggatcagcttacaaagccgcatgaggaggcagaatggcagggataacgttttcggaaggggaacattgtatgcccttaattaaaaaccacatctatttaatacttaactttgtttcatctacgcaaataaacacataaattaattcaattttctggcaggcatgccaaacaaattgccatccatcagtgaggcaaattaatttatttgccaacaaaaacatttgcccagtcgttgacctcatttcgcctgtcagtctttccggactcaaagttgcacaatagatttatgtaaagttcatagaactgcttatatgcgtgatggcagattcagcatgcattttggaagcgaaagctatcgctggatttcaaaagcgaatctcgtgctttggcagtaaaagcaggacgaacaagagccgggacaaaaaacggaaatgcagctgcggaaatgttagaaaatcggaagtgagctgattcggagatccttgaaagggatgaaccggctgagatgactctgtctgcatttgctgcacctgctttgcccatactttgcaacagttggacgaacatttacaaactccacccgaatttacactccgtatctgccccctgcttttgatttcaattgcatttattgaaatgacattcgtggcacaagcagaaacatgtgtaaataaaataaacttgcatttaagctgtttacataattaattaatgccaacaagaatggcatgaatgtgggcgattggctgctgctttacaactgttgcggaatttctgccgtcggctgacagcaggatgcatttccaaactttttgctgcatacttcacggcgttccatgtgcatgtgattgtgtgtgtaaggagttaacaaacaccaacctacatgcatacatgcatacatgccagcatttgtagatgcacacgtacataaaacaaacaagtgccttgtgtctgagcaacctgttagccagaatttgttatccttgccggctgtatgctgcaatcattgtttatgcaaattggcataaataagcaggcaaagcaaacaagctcaaaagctgctcagataatgccacaaaatggagcttatgtttcggcacacaaacacatgcttcgcacactcccatactgtactgtatttttgtatatacataaatccttagtcgtgcgagcgcctgcagctgtgggcaatccgtaatttatgcaaatcgcattttaaatttgtaaatgttattttaattgttaagccagcgttcggatggcccagatacgaaaaaggggcgatacaaatcgaattaatccaaccccggcaaatggcaatctggaaaccgatgaccaaagccgatctgaactacaatttatgatatccatttgcatctgaactttccgtatccttgaatcttctgcatacccgctgtttttgtcccattcccagcatgatgaaaatggagtgaaagcgacagaccaaagacaaattgaatgcgttcacccaatttttttctgtttctgcctctttttcttttttggccaaagcaaatgccaagaatccaatacggaattcatatgctggcgaaataaaattgaaccaaatccagtcaagcaaacattgagcttcatttgcagcagttgaacccttttattgtcggaattgctttattacgattttgagagccagtgctttgacaccagccaaaacagaaatcgaaatatgtataaataaaatgtttttacacaaagaaccatatgccatcgaagtattttacaaaattcaaaaatatggccacaaggccggaatgctatggaccgcattaacacaacaattccatcaaattgtacatgctttcatttgtaacacaaataatccggcagcaaatagaaaaacaaattaacaagtgctgttggtgaaattcatgagaactttctattcaatttaagaacattactcctcctgcaataaaatatatcgcagtgctaggcaactagtacttatatattcatatattcttttatatacaaattttacagcacttttaaaatcttcttcaattttttaagaccaattatgttacatttagattcagaacattgaaagcaattaccaacatttgcttaaataggcacaagagatattaaattcgtttgccattccgttaggcaaatgaacaagatactacgctgatatctggaatgtctgcattttatttgacatcatttgtgggcaatgtgcaaaaagtgtacgaaaataaacgcgacgtcaacgaaacacttttgaagcaattgcaccgttgatggcacaattatcagatgcaactgcaagtgtcgtttgaaatggtttccctggtgggtggagtgggtggtgcagagtgttgctgggaggtgttaggtgctgctagatgtcattgctatgagtggtacatagatgcagagcgagtttattgaacctgccgcagacttggctgtaataaagtggcaccaaaagttgagttgagtaggtgaactgaatgaaagtgcgcacacaacttaagcacactccaatggactagcatattcacacatcaggcgaatgaatatgactgctcttttcagccccattttaaattgaaaaactgtgcgccgagtaaatacacatgcgaacagcacatatgtgtatatatacatacatatttcatcctatatctcctgtattcccgtgctccaagccaaaaactttttctaaaaatgctttgtgcgaacgagctcgcttctcgttttatttcttttttttttttttgcccactttttgtgcggctgcaatggaaaatagttttcgtgtctgccgtaggtgcaaagtggccatagatgcggagttcggccacaaataccgctccgtacagctgcataaatatttcgacgcagttgtccatcataaatctggcgcactaactcaaacattggcccgctattgtttgccccccaggctctatcagttctatgagtatctgcgatttggccggcaaagaggatctggggatgtgggcatgtttgtccagggaggaggaagcatagggagagtcgtccaggcatggcagcacacgcacacacacacacccaagacttcgacagtcagtggtttcataagcccggtctgggctattgaccgactcctacagtggtcatcggggcactacaaccgattttgaggtgtgacacgcaaagtgagaaacggcaattgcttccatttcattaggattcatttcggcagtagtcgcccaccgaagataaccgttgaaacacacagataaatttgtcacacatgatttgattcgtttattcaatcatttgacactccagcgaagcgcgcaacgatttcaacttattcaagttgtcggtacaccgagagaaactaaattgctgttaggaatatgaagtaagagttcgagagctatgttaaacatttcattcatatgttatttcaatttcttgcactgtgcattcgcaaagtgctttcccatcgtacgaatgtttttcgaataaataaacaagagccaaactcattcaccgagcggcacactcataaaaagcaaacaaaaaatacagcctaaatcgtgcccaaatccaaaacgtcctgccgggtcactcgtcaccatcgccatcgctattgccatcaccatcgtggccatctccaaactccaactccatttttggggcaactatccgcattcgcagcgctgctgcttttggctaatggtctaggttctcatgcaatctctgctgccgtcggattagtttgtccagccatatatattcccccatccacatccgcatccgctccgaccaatctacatccttcctgccgctccgtctgcatccgaatgcgattctgtccattttgtgttcgagtgttttatttgtcgtccggctctatttgccttgatttcatctttaatttaggcatcgtctgaatgtccattcgtctatccgtttgccggttttatggcttgtttgctcgctggccgcttatcaaaacataattccggccatgatggattctccgtccgcccatttaacatggccgcggggcgtggccggtaaattgaatttcattgttatggctacggtaattaatacgcacacatacacacatatagggaatggagtcgtcccatacacgcacacacagaagaatgggggtcactctgatatgcatacatgcatttccggtcgctatatgtatgtgcgctcttcaatggcagattatgcataattacagccatatttacaatgccagcagcgatttgaaagccaacggggttaaccagtcagttgaccattgaaggctaattttacttgtacggggtcgtgagcccccgagatttaagcagatttgcaaaggaaacgctcgagggaatccactatcaccgttagtgggaagcagaaaagcagactttaaagctaaaatattcagcaaaaattgtaataatatattaatggtaatctgtaaaatccgatacccataatttgttaaaattgaaaagcatattatatgacttttacaaatggaaatgcatcagactaatgtctttatcatcctttacaatcctttcaaagctaacttataaatttggtaatcttttaagctgctttttgaattcggcaccactgtcacattcaaagcaaattcaatgccaaccaaaactgctaatcaactagcattttttgtgctcgtccccaatccttttgagccccaagtatttttgctgtttaattgcttgcgctttatttgcgcacatactcgtattttattttatgacacagccattgacatccgccaaagagcacaaaagccataaataacaaaaagaaaggacccaaaaataaccaggcaagcaccaacagaaaaaaaaaaggtgaaaagaaagcgcactcaactgacctcaacaatggcaatcagtcgacgtgctctcttcaattatttgcttttgacccacaaaatggacgaacgactctggactctggactgaatgttaccaccacacaactgatgcgttgcgtcaagggttgaggattgctgcttctggttttcgcacgtataaagcgtggcccagagcgaataatcagttggaaccataccagccaggcagcaggacagccggagcgatggtgggttttatttttaattaaactggcagttggcagtcgcgagttccggccgtagagctcataaagtgggcgggcgggcaggcggacagacattacgcatacgctgcgtgaccaggatttagggagataggggatttgggggaaagagagaaaagggaaaagggaaagtgcagccagaatgtgttgaacatttttgtggccgccgttaaaagggtgcgcaactggactcggaacggaaacggattgcctctaaaatggcacgttttgtgcgtcagttcgttagtgtgaatgatgtgggtgggctaaggaccaagtaacaaggaccaaggacctaggacggggaacgagggacgaaggactctggactcaggatggcagactatgtgggaggtggcgacgctcaaaaatttaattactttcacttgtgcgaactgtttgtctgccagtcagatgagtggacgagacggccaacaggcatttaacgtaaatgtaatgaaattgcagacggactcagacgcacaccgactgctttccgtttccgtttcaggagtcctttccctgatccttccttgcccggttaacgtgctgttagcacttcttcttgtgcgggtggcaaatcttgcgagctttgtaacgcattatgcggcaagttttctcgcctgctgtgagctgcgcagagtgcatcgtctttttattaccacattcacgttcactgccaagtcctcctccgtatccttgctccttggagggctggaaacgataactggattaaatgccaactgggaaacgtgttttgctgtaaccactttcgaaaggttctagtctaacttctgtgtgccaccatttctcttttctttgccggcattcaaatcaatcatacgccatgtgggctgctatgttttaaatttaactttcatgtatgcacagccacgcaagcaaagggtacatacaacaaatgaacgaaagtatatatgtatatatatatttttaattcacaaaagggcacacgtgttcgcagtactgcacagattttccgattgtgtatgtaaatatttgcgcaattctagaaatttgtttgactgttaaatcaaatgtaaatacgatatgttttcaaagtcaacatgcagcaaatgcagcaaaaacaatggcgaatagagcaagtaggaaaattggcgaaaacgtgagcagattgaacacaaaaatctcgatggcgtgtaatttaattctgatttcacagcacatttcaagcgaactaactaacaggattggtatttcagccagagttttgatccccacatcagattaaatcataattccgatccttgacagaaacacagacgtctcgatgctgcgctgtctgtcatttagtgggtatttttgggggcgccatcaccatttcctgtttatttgctccttttgttcgaattgcagcaaggcgaccacagctcggtttacggtgcgtatgattgacattgattggatcgcagccaaacaaactgtgtggtttggctgtccagtcacttttttcttcatttttttacccttctgattgccatgctctgatgcactttcgggaactaaatcaaaaaacgtttgcagcttgataaatatgtaatttgcaattttggccaaaaccacacgcagcagtaaaccgaaaaacccatagaaggagtaacaaaaccttggaatccagacatgttcagctgcttcagcataggggttaccctcagtacagtgaacacttcaaagagaaatgcacttaaagaacatactttacaactgaggggctgtttaacatatgttagatagaaaatatttatgaaatccttcgttgcgtaactgatcccttctaaaaagtgataaagtgatagttatcaggtggaaagatcgaaatgaaggaaaatcgtttccccagtttgattacttactattcgtaaggctacaaatttaagattattacccattggatacgtgtacaaccgattggcatgcgatcgaagtggcaatggatttaacagtctgcccacacacccacgtggaatgacccacttaccaacaagttagactcacagttgcgactcaaagatgattggttttgccgcttcagttgtaataatcaaattgccagcatccgtatccgcatctgcacagcggagtttcccagcattcgagctcaccagtttccgtggacagaaggagcaggtgaattgcgaggcgtggtggtgggaaaagggcggagtatgaagtcagtggtgatgcaagttgggaatggcaatccaggggaggaatgtgggccacgttgagcggccttcaaaagtcaaaaggcgttaacgttaatgccgccctatcatgaactgcctcggatccacatccactcgagcgcaggcttcactgtgccagccgtgtaaatagcatgaatgcaattttattttatttatgtttgaattaagcagagctctgagcagccagccaaccagcagcatttcagcaggagcactcagacagtctttataggcaaatgaattgctctataccaagcttatttgggaaaatgtggagcaaatgcttagagctggcaaatgcttgttttgacatgaaaaataaagattaatgttgccgagagtatggtttaaaatgatctgcttaaaatattaaacaggcaagctgcctgaacatttaaacgtagagtctgtactggtcggtatgaggtattatttatttcccccagcttctatctttctttttttttttgttgttgaatgtgcaaacgcacttaattaattttgtttaacatgtctgaggcagacagggcaacaatttcatattttgcttgttaactgttatcgttgttgctgctgccatttttaccgaccactgctggccataaactcccttatgcacattgcgtatacgacgcgtggagcgtggacaaacaaaggcatcagctgggcagtaactctggactccagccatccagccatcctgctgatgatgatgatgctgatgcactgattaaatggatatgcagagtgtgtctatccaacggcctggcgaaatgactgtcagggcagcacggctttattttatttctgggcaggatggtcagttggggtagttgggccagaagatattgtcggtgcgaattataaattaccagctgggcgcatcggcccgaaagctaaccaaacgccaaccaagtgtacggatgagcggaccgggagccacatgaaatttcaattaaaataaaaatttatacgcttttcgccttgtcgcttataattaaaaacaatttgcaagttatgggcgacgggagcagcactgctataatgcctctaatttaaatcgctttatctctggccttgcaggcggtttcatgggcgacattgccctgccggagggtgattccggcccggtggttgcccacacgcccatcgacgacgaggagcaggagcgccaggaggtggagcagctgctggctgactcgcccagcccggttcacgaccccccttccgtttccggtgcggccaactcagggccgaccaagttcaatgccaccttccagctggatctggagaagctcaagcaggaggtctaccacgagggcctacaggtggaggaggagggcctcaccgacatcatccgcaagaagaccaagctgcccagctcaggtccggtcaacctgaaggcaggacaaagccagtcacagagtcaggtgagtaataaaagggggcatgaaatacgcaagggtctttcagttagagatgagttaagcttaggttttattattaaatatatgaattcactaatttgactataaatattggtattattaccaagtagaaatttatgtaggaggtcgttggtatttgcaaattttagaagtacttaaaatgtcttgaaactcttgaatccctcagagtgccaatgaacccgtgaagcccggttcggaatcgccctccgattacgcgcaagcatccagctacaagaatgaggtactgcctccgtcggagcagcgaatccatacggacaagccggcacggttgacgctggccgagattggacccaagttcagcaacaagacgcagtcgctgcaccgtaatgtggacacacgcaagattcagtcggacaacaaggacatcgaggacgattcgggcaacaattttgtggccgagaggaggccgtcacagattgtgcccacttccttgccggagcagcgatccactccggctcacgtgtacagcaatgccggaggcaatggcatgcagttggacgacgaggtggacttcttgcattcccgtggagtcgtgaggaggcgtcacaggcgaggaccaaaacagcggtaagccaaaaattacagaaccataataaagattccataaaggatttatgcaaaatacatttcgtattaaaaacacgttgcattttaattccaatttatttcaaaatatttaatctaattgcattaaaagctaatttattgcttaaaataaaacatgtaccaaaagcggaatttaagtatcaaaagtccatatgaaaaggctaaacattaaaattattttttatgccggaaaagccgtacaacttggggtcaaataatagtttaggtgtttatttaaaaatcattaaattcaatttgttagaattccttgaattttatgtgtgattaattagatacatttaattggtttttggcctaatcgaattgctatgaactatttttacctcgtttattgaaatctaaactcaatggttttccccgcagaaggagcaaccagcacttggagcacgaggtcaagctgcagagattgagggaggagctcagccgtccggtcatcgaggcccaccatcaccagtcgcaccaccagaagcaggcgcagcaccgccagcaccaccagagccaccatcgaaagaagcaccgtcgacagcagcagcaccatcgtcgacgtggccagagcaccacgcaatatgtgaaccattccccgccaggattcaatcaatcgcagcaggcccaacagcagtcagtgcctgaaatggatttgttgaaagcggagtaagttggtcaatccccaccagcttttcccacctttccgttaacagagtacatccccccccctacttcttgggcaaccaccgccgccacatccgtttccgctgccatttcctggcctcactgtaaattgctggccattttcattcagaggtttttcggcataaactttaaacaaacagcagccattttggcagctcacacagacacaaacaaaagctcattcacacgcacacatacacacacccattcacgcaggcccaatgctcattgtgcggttgtgtgggtgtatgcttgtgtgtgtttgtgcatgttaaaagttatgaattttaatagaaattcgcgtgccaaaagttgtgccatacaacaacagtgaaaaatgtatggaaaactgttggcaattaaaattacgcatacgcctcgtaaactttttgcccgtcgctttccaaaatcatccatatctaacaagaagacatcttccccctccatctgcagaacgtccaaggatgaggagccactgcgtcatcgggtggcccgtgctgtcaccgccaaaaaggaacgcatctgggactatggggtgattccgtacgagatcgatggcaacttcagtggcatccataaggcgcttttcaaactggccatgcgccattgggagaactccacgtgtatcaagttcgtagagcgcgacccggagatccatcccaattacatagtgttcacggttcgcagctgcgggtaagtttggtgtcctggttagtcccagaaatatcattctattgaatccccaaatttccaactagatgctgctcatttgtgggcaaacgtggaaatggaccgcaggccatctcaattggtagaaattgcgataaatttggcattgtggtccatgagttgggtcacgtggtgggcttctggcacgagcacacgcgtccggatcgggaaaagcacgtggtgatcgagcataacaacattatgaagggccaggactataacttcaatatgctatcccccgatgaagtggactcgctgggcatggcctacgactatgattcgattatgcactacgcacggaacaccttctccaagggcacctacctggacaccatcctgcccatcgagatgaagggtcgcaagcgtcctgaaataggccagcggttgcgcctcagccagggtgacattgcgcaggcgaatcttctgtacaagtgtccaaagtgcggaagaacctttcaggagagttccggcatctttgcctcaccatctcattacacggccggagctttgagcaatgagacggagcactgcgagtggcggattacagcgacatacggagaaagagtggaactgaaactggagaatatggtaaggacgtatatagttattatattctgttatgtatatctgtcaatttcttaaccctccattagtactaaattataatcccacatctactttcctaatttcctcttagaacatctttaagtcaaacaactgcgagacggactacctagagattcgggatggctacttcgagaagtcaccgcttatcggacgcttctgcggcaaggtggacaaggaggtgatccgcacggagtccagtcgcatgctgctcacctatgtgaatacacaccgcatcgagggcttcaggggcttcaaggcggagttcgatggtgagtgggtggaatgaatggggcacaaatggggaatgaaaatggtccctgcaaatttctgacattccgtttccatagttgtttgcggtggcgagttgtccgtggacgatgccgttggccgtttggagtcgcccaactatccactggactatttgcccaacaaggaatgtgtgtggaaaataactgtgcccgaaagctaccaggtggcgttgaaattccagtccttcgaagtggagaaccacgacagctgtgtctacgactacgtcgaggtccgggacggtcctggccaggatgcgccgctaattggcgttttctgtggctacaagccgccgccgaacatgaagtaagtgccactgaagaggcgccaatcctttctcctcgccccccccttttaacacgaaggaactctgcttttgttcgccgtccctttgcaggtcaagtggcaattcgatgtacgtgaaattcgtgtcggacacatcggtgcagaaggcgggcttctcggccgtgttcatgaaggaggtggacgagtgcgagacccagaaccacggctgcgagcacgaatgcatcaacaccctcggtggctacgagtgcagctgccgcatcggattcgagctccacagcgacaagaagcactgcgaaggtgggttaattgcggcccaagtgctgttcaatcgagttgtattccattccattttatgttaataattgccagggaaaaatacgaaatgggtataaacattctagtcatgggttaaataatttcagcataaattgtttaagaaaatgaggaaacaaaatcaaaaatgaagagtcaattagttgaatccctaacgttttcgcttttaactgaaaatttccctttttattaagatgcctgtggcggtgtcatcgagtatccgaatggcaccattacctcgccctcgttccccgagatgtaccctctgctgaaggagtgcatctgggagattgtggcgccaccgaagcacaggatatcgctaaacttcacccacttcgaccttgagggcacggcgcatcagcaatcggactgtggctacgattcggtcacagtctactcaaaactgggcgagaatcgtctgaagaggatcggcaccttctgcggctccagcattccgcctacggccacctccgagagtaatgcgttgagactggagttccattcggacaagtccattcagagatcaggcttcgcggccgtcttcttcacggacatcgacgagtgtgccgtgaataatggtggttgtcagcatgagtgccggaacacgattggatcctacatctgcatgtgccacaacgggtactccatgcacgagaatggccacgactgcaaggagggcgagtgcaagtacgagatctccgcccccttcggcacgattttcagtcccaattacccggattcctatcccccaaatgcggactgcgtttggcacttcataaccacgccggggcaccgcatcaagctgattttcaacgagttcgacgtggaatcgcatcaggtaagcatgagtttatttataggtttcgtccttgaaaagacatcttctttgagtacttttcgctgtagtttctgctagttagcttaaagtcctgtaatttgcattgaatttctaacaggaatgcacctacgacaacgtggcagtttacgatggcgaatctgagtccagttcggtcctgggtcgcttctgcggggataagattcccttccccatctcctccaccagcaaccagatgtacatggtgctcaagacggacaagaacaagcaaaagaacggcttcacagcctcccactccacgggtatgatggtgttgaaatcctaagccatccgcaatttcaacatttcgataatttacttgcagcctgtgggggctacttgcgtgccactagccaggtgcagcagttctattcgcacgcccgattcggaaaccaggactatgacgacggcatggactgcgagtggaccatcgcggcgccggacaacagctacgtccagctcatattcctcaccttcgacatcgagagcagcgagaactgcacctttgactacgtgcaggtgttctctgacatagacgatgtgtacggacagtatggacccatgtacggacagtactgtggcaatgtggtgggtacacctatttcgtttatccggagaacatttaagctaagcattatttactgcagctgccgcaggacatcaactctatgacacattctctgctggttcgctttaagaccgacggttcggtgccgatgaagggcttctctgcctcatatgtggccgtgcccaattccggggagtatgaccactccgacgaggatgtggagaactcgtacagctccgagatggttaccccgtttccgggctcactgaagagcatctacatcgaggacacgcaggaggagaccgacgagtacagcgacttcagcggcaatcaactggtcttcaatgggcagtatcgtggccgatatagtctgcccaaacggtactactccggaaaggcatagggctatggtggaaccactgaccgtgcgccaaaatacatgacaatatattaaaacggaatttatttaacagatttaggcatatcgtcgcgtacataaaacagactttcccgatcttccacgcgcactcttctggccaaatccaggatataatcaaagatccaatactagttttaggcactcgaaacacacattgttaggttccagtcggctaagatctgcggtggcaattacttagacccctatgtcatacatgtaatgtactttgactagacttctctagactctgtagctaaatgtgcaattcctcttccccccttgcatttgactgcttttttctctgacgcattttcatttttttcggatatctatattctatattgtgccatatttaatggtaatgatggagtgcatttccttaggcatcttagcataagtcaatgggtggcccatatcaaaatcagaacggaagttaggatagaaaagagatacacacatatcttcggaagcaccgaaagtggaggatccttacagatggattgaatttttcacacaggcatatgtacaactctcggatatttgactcaacttaatacgtaattatatctatacatattaaaacttgcatagtaactatgttttaaaaccaaaacaaaacgagtttgaagaatgttatttacggactttcgggtttatgggctcatggatttatggccctaggttccaccttgccacgccaggcagaagcgccatggctcttgaatagcatttgaaggtggaattaccgcgaaacgattcgttcatgcggcggatttacgatcattaatgacctgccctaaaaggcacgaacccgcttaagcaacacctgatcctgggcaaatgcccctgagcccggccagcgacccaggtagatggccacatacgcgtacacgtatagatggacaatgtcaaggtgtgagcaggaatacccaaatcaaaatccattgaatgcaaacaacaggcggcagacaatggtcatcccgaatcgccaatgaggaggggtagcactcaggtctggttatggctctcgtctctccttctattgagccgtcccttcgagcggtcagtcgagattctgcaacggcctgccctgccacgcccctcgtccaccgattcccctacgagttgggatctgttacctgctgctcactcactcgatccgtggaacccttgtcggcgcaccagtataattcggcaatcgcagtccacgagcactcagttagaactttgaactggttgaagcaacttcagggaacgagcccccagaaatacccacgcaatgaaaggaatgcgccttatgcccatgaaaatgaaagcgaaattagttgttctctctgtgggagctctctggatgatgatgttttttctggtggattacgccgagggcaggcgactgagtcagctgcccgagagtgagtgcgattttgatttcaaggagcagccagaggacttctttggcattctggattcttcactggtgagtggtggagtcacgtggcccgacctaaaattacaatcttcagcattacccaacaacaggtgccgccgaaggagccaaaggatgatatctatcaactcaagacaaccagacaacattcggggtaagttccactgggattta

SEQ ID NO: 40124 - DNA, 5366 bp, DROSOPHILA
cttcggtcgtgaacggacgtgctttcgctgtaaactcggaatcggtgtcgcgaaacaaaagaatattggcaacaaacttgtttgagtcaaatggccaaacgcaaatatccgcaaagggcagcaggataaatttattggccagtgaagtgagcccggcacgtgctaatcgaaaatgcagaaattatactaagagcagataggtaggcacatctcagtccaaacgtggtcagtggtcacgaaacgaggaaagagcaacaaaacctaaaatcacaaaccgaagacttcaaagtacacaagaatttgaagccactgcaatgcgtaggaggcgtggcacgcccctgggcgtcagctggacgaactgcgtcctgctcctggccaccggtctgctggtggtgctcatttcggtgcacgccaagaaccccaggccgcatcgaggactacccgccccggctcctgcaccagttcctgcatccgtagatcaggtggcaactgaaaatgcccacaggcgggaacctaccgtcgatgggagtgtacttcaacggctatcgggttcagatagggctgttgacgaggatgaggatgtcgatgaggatgaggatgaggggctaaagcaccagcacctcgagcatcggcaacaatttgacgcatatctgggcacaatccgacggctgcgtcgtccataccgcagcaaatacaccatcgagcagctgatgcgactgcatgtgacaccaaaggtatccggagacattgacatggatccctgcaaggcgggcggtttcatgggcgacattgccctgccggagggtgattccggcccggtggttgcccacacgcccatcgacgacgaggagcaggagcgccaggaggtggagcagctgctggctgactcgcccagcccggttcacgaccccccttccgtttccggtgcggccaactcagggccgaccaagttcaatgccaccttccagctggatctggagaagctcaagcaggaggtctaccacgagggcctacaggtggaggaggagggcctcaccgacatcatccgcaagaagaccaagctgcccagctcaggtccggtcaacctgaaggcaggacaaagccagtcacagagtcagagtgccaatgaacccgtgaagcccggttcggaatcgccctccgattacgcgcaagcatccagctacaagaatgaggtactgcctccgtcggagcagcgaatccatacggacaagccggcacggttgacgctggccgagattggacccaagttcagcaacaagacgcagtcgctgcaccgtaatgtggacacacgcaagattcagtcggacaacaaggacatcgaggacgattcgggcaacaattttgtggccgagaggaggccgtcacagattgtgcccacttccttgccggagcagcgatccactccggctcacgtgtacagcaatgccggaggcaatggcatgcagttggacgacgaggtggacttcttgcattcccgtggagtcgtgaggaggcgtcacaggcgaggaccaaaacagcgaaggagcaaccagcacttggagcacgaggtcaagctgcagagattgagggaggagctcagccgtccggtcatcgaggcccaccatcaccagtcgcaccaccagaagcaggcgcagcaccgccagcaccaccagagccaccatcgaaagaagcaccgtcgacagcagcagcaccatcgtcgacgtggccagagcaccacgcaatatgtgaaccattccccgccaggattcaatcaatcgcagcaggcccaacagcagtcagtgcctgaaatggatttgttgaaagcggaaacgtccaaggatgaggagccactgcgtcatcgggtggcccgtgctgtcaccgccaaaaaggaacgcatctgggactatggggtgattccgtacgagatcgatggcaacttcagtggcatccataaggcgcttttcaaactggccatgcgccattgggagaactccacgtgtatcaagttcgtagagcgcgacccggagatccatcccaattacatagtgttcacggttcgcagctgcggatgctgctcatttgtgggcaaacgtggaaatggaccgcaggccatctcaattggtagaaattgcgataaatttggcattgtggtccatgagttgggtcacgtggtgggcttctggcacgagcacacgcgtccggatcgggaaaagcacgtggtgatcgagcataacaacattatgaagggccaggactataacttcaatatgctatcccccgatgaagtggactcgctgggcatggcctacgactatgattcgattatgcactacgcacggaacaccttctccaagggcacctacctggacaccatcctgcccatcgagatgaagggtcgcaagcgtcctgaaataggccagcggttgcgcctcagccagggtgacattgcgcaggcgaatcttctgtacaagtgtccaaagtgcggaagaacctttcaggagagttccggcatctttgcctcaccatctcattacacggccggagctttgagcaatgagacggagcactgcgagtggcggattacagcgacatacggagaaagagtggaactgaaactggagaatatgaacatctttaagtcaaacaactgcgagacggactacctagagattcgggatggctacttcgagaagtcaccgcttatcggacgcttctgcggcaaggtggacaaggaggtgatccgcacggagtccagtcgcatgctgctcacctatgtgaatacacaccgcatcgagggcttcaggggcttcaaggcggagttcgatgttgtttgcggtggcgagttgtccgtggacgatgccgttggccgtttggagtcgcccaactatccactggactatttgcccaacaaggaatgtgtgtggaaaataactgtgcccgaaagctaccaggtggcgttgaaattccagtccttcgaagtggagaaccacgacagctgtgtctacgactacgtcgaggtccgggacggtcctggccaggatgcgccgctaattggcgttttctgtggctacaagccgccgccgaacatgaagtcaagtggcaattcgatgtacgtgaaattcgtgtcggacacatcggtgcagaaggcgggcttctcggccgtgttcatgaaggaggtggacgagtgcgagacccagaaccacggctgcgagcacgaatgcatcaacaccctcggtggctacgagtgcagctgccgcatcggattcgagctccacagcgacaagaagcactgcgaagatgcctgtggcggtgtcatcgagtatccgaatggcaccattacctcgccctcgttccccgagatgtaccctctgctgaaggagtgcatctgggagattgtggcgccaccgaagcacaggatatcgctaaacttcacccacttcgaccttgagggcacggcgcatcagcaatcggactgtggctacgattcggtcacagtctactcaaaactgggcgagaatcgtctgaagaggatcggcaccttctgcggctccagcattccgcctacggccacctccgagagtaatgcgttgagactggagttccattcggacaagtccattcagagatcaggcttcgcggccgtcttcttcacggacatcgacgagtgtgccgtgaataatggtggttgtcagcatgagtgccggaacacgattggatcctacatctgcatgtgccacaacgggtactccatgcacgagaatggccacgactgcaaggagggcgagtgcaagtacgagatctccgcccccttcggcacgattttcagtcccaattacccggattcctatcccccaaatgcggactgcgtttggcacttcataaccacgccggggcaccgcatcaagctgattttcaacgagttcgacgtggaatcgcatcaggaatgcacctacgacaacgtggcagtttacgatggcgaatctgagtccagttcggtcctgggtcgcttctgcggggataagattcccttccccatctcctccaccagcaaccagatgtacatggtgctcaagacggacaagaacaagcaaaagaacggcttcacagcctcccactccacggcctgtgggggctacttgcgtgccactagccaggtgcagcagttctattcgcacgcccgattcggaaaccaggactatgacgacggcatggactgcgagtggaccatcgcggcgccggacaacagctacgtccagctcatattcctcaccttcgacatcgagagcagcgagaactgcacctttgactacgtgcaggtgttctctgacatagacgatgtgtacggacagtatggacccatgtacggacagtactgtggcaatgtgctgccgcaggacatcaactctatgacacattctctgctggttcgctttaagaccgacggttcggtgccgatgaagggcttctctgcctcatatgtggccgtgcccaattccggggagtatgaccactccgacgaggatgtggagaactcgtacagctccgagatggttaccccgtttccgggctcactgaagagcatctacatcgaggacacgcaggaggagaccgacgagtacagcgacttcagcggcaatcaactggtcttcaatgggcagtatcgtggccgatatagtctgcccaaacggtactactccggaaaggcatagggctatggtggaaccactgaccgtgcgccaaaatacatgacaatatattaaaacggaatttatttaacagatttaggcatatcgtcgcgtacataaaacagactttcccgatcttccacgcgcactcttctggccaaatccaggatataatcaaagatccaatactagttttaggcactcgaaacacacattgttaggttccagtcggctaagatctgcggtggcaattacttagacccctatgtcatacatgtaatgtactttgactagacttctctagactctgtagctaaatgtgcaattcctcttccccccttgcatttgactgcttttttctctgacgcattttcatttttttcggatatctatattctatattgtgccatatttaatggtaatgatggagtgcatttccttaggcatcttagcataagtcaatgggtggcccatatcaaaatcagaacggaagttaggatagaaaagagatacacacatatcttcggaagcaccgaaagtggaggatccttacagatggattgaatttttcacacaggcatatgtacaactctcggatatttgactcaacttaatacgtaattatatctatacatattaaaacttgcatagtaactatgttttaaaaccaaaacaaaacga

SEQ ID NO: 40125 - protein, 1464 aa, DROSOPHILA
MRRRRGTPLGVSWTNCVLLLATGLLVVLISVHAKNPRPHRGLPAPAPAPVPASVDQVATENAHRREPTVDGSVLQRLSGSDRAVDEDEDVDEDEDEGLKHQHLEHRQQFDAYLGTIRRLRRPYRSKYTIEQLMRLHVTPKVSGDIDMDPCKAGGFMGDIALPEGDSGPVVAHTPIDDEEQERQEVEQLLADSPSPVHDPPSVSGAANSGPTKFNATFQLDLEKLKQEVYHEGLQVEEEGLTDIIRKKTKLPSSGPVNLKAGQSQSQSQSANEPVKPGSESPSDYAQASSYKNEVLPPSEQRIHTDKPARLTLAEIGPKFSNKTQSLHRNVDTRKIQSDNKDIEDDSGNNFVAERRPSQIVPTSLPEQRSTPAHVYSNAGGNGMQLDDEVDFLHSRGVVRRRHRRGPKQRRSNQHLEHEVKLQRLREELSRPVIEAHHHQSHHQKQAQHRQHHQSHHRKKHRRQQQHHRRRGQSTTQYVNHSPPGFNQSQQAQQQSVPEMDLLKAETSKDEEPLRHRVARAVTAKKERIWDYGVIPYEIDGNFSGIHKALFKLAMRHWENSTCIKFVERDPEIHPNYIVFTVRSCGCCSFVGKRGNGPQAISIGRNCDKFGIVVHELGHVVGFWHEHTRPDREKHVVIEHNNIMKGQDYNFNMLSPDEVDSLGMAYDYDSIMHYARNTFSKGTYLDTILPIEMKGRKRPEIGQRLRLSQGDIAQANLLYKCPKCGRTFQESSGIFASPSHYTAGALSNETEHCEWRITATYGERVELKLENMNIFKSNNCETDYLEIRDGYFEKSPLIGRFCGKVDKEVIRTESSRMLLTYVNTHRIEGFRGFKAEFDVVCGGELSVDDAVGRLESPNYPLDYLPNKECVWKITVPESYQVALKFQSFEVENHDSCVYDYVEVRDGPGQDAPLIGVFCGYKPPPNMKSSGNSMYVKFVSDTSVQKAGFSAVFMKEVDECETQNHGCEHECINTLGGYECSCRIGFELHSDKKHCEDACGGVIEYPNGTITSPSFPEMYPLLKECIWEIVAPPKHRISLNFTHFDLEGTAHQQSDCGYDSVTVYSKLGENRLKRIGTFCGSSIPPTATSESNALRLEFHSDKSIQRSGFAAVFFTDIDECAVNNGGCQHECRNTIGSYICMCHNGYSMHENGHDCKEGECKYEISAPFGTIFSPNYPDSYPPNADCVWHFITTPGHRIKLIFNEFDVESHQECTYDNVAVYDGESESSSVLGRFCGDKIPFPISSTSNQMYMVLKTDKNKQKNGFTASHSTACGGYLRATSQVQQFYSHARFGNQDYDDGMDCEWTIAAPDNSYVQLIFLTFDIESSENCTFDYVQVFSDIDDVYGQYGPMYGQYCGNVLPQDINSMTHSLLVRFKTDGSVPMKGFSASYVAVPNSGEYDHSDEDVENSYSSEMVTPFPGSLKSIYIEDTQEETDEYSDFSGNQLVFNGQYRGRYSLPKRYYSGKA

SEQ ID NO: 40126 - DNA, 5258 bp, DROSOPHILA
actaaatcacgcatccatcattgacggcatccgtctgtgcaaggcgaagaaacagcgctataggcaccgggacctgggcgacttggaggagcagctaaaggccagcgatgctcgcctcaagctgatcgccaccgatggtgttttttccatggatggcaacatcgcaccactggcccgaatcgttgaactggctaggaaatacaatgccctggtgtttgtggacgagtgtcatgctacgggcttttttggcgccactggacgtggcaccgaggagtatgacaatgtcatgggtgaggtggacatcataaactccacactgggcaaggctttgggtggtgcttccggtggatacaccactggacccgccgagctaatctcgttcctgcgccagaaatcccggccgtatctcttctccaacactctgccgccagctgttgtggccgttggtctgaaggtaatggacatgctcctccaatccagcgagctcacccagcgcgtccagagcaacacgcaacgctttaggcaggccatgacaaaggctggattcaccatagccggcgagaaccatcccatctgccccgttatgctaggtgacgctcgtcttgcctcccagtttgccgatgagatgctaagttagttgaaatcttaatcatccctttatctacatatatatttaactaatattaaatttcagcccgtggcatctatgtcatcggatttagctatccggtggttcctcagggaaaggcacgcatccgtgttcaaatctccgctgcccacacggaagccgaaatcgatcgggcaattaatgcattcattgaagtcggtcgctctctgaaagtaatcaagtgaaaaatggaaatcaaatggagtccagtattttgaatattgcatttatattaaacgaaactgcatttatctacaaacgttgtagtagtacttattcatcatgagttttccaatccccaaaaacaaattaactcagaggtgtttttgtgtttacggagttgctttatttggtttataatattaactaaaaatcatttactaagtaaataatagacagttgcagctggatttaactcaagcttggattgcacttaatcgaacacaaaacgtacgtatgtttgcatttaaatcaataacaataattcgagtcgagtaacaaataaacataaaaataattaaggaagcgtgttggggtcgactggccaagtcactcaaggcatatggcattaactaaagtggaattaataaaaaatctttataattctagggccagtgcatgagatgacttaaaacaaaaggaaacttttacaaagcgtgaaatgtgagtagattgggctaaaagtaccgaggtgtacatattgcgatgactatgaaatactttggttagtgttgtgtttgcacgacaatggttagatgcaattcaattcgattaaaatcgtttgtgattatttgttgaccaggccgcgagctttgggatacgccgaagctggcttctttgccggcagacggcccgtgggcggacggcggttcgagtccagatttgaggcggcacttggcagcccccggcttgacttaatgttgcgaacattgggtatggagctgcccacagcgacgccagcacctggtccagctcctccattggcattcgcgttgataatgttctctagacggctgcgcagtgagtttgtgtgcgagtccacgatgtctatatcatctccgcccgtttgcatggcttgagcgagcaccgcctgcagcgaggcggacaccttaggcgtacggtactcctgggtggtgcgacacggcatctccagctcgtagttcacgatgttctcgctcttgaagcgtagagagctcggtgaattcgatttggcttcctgcagagcgtattcggaggtgggccttctgcgctgaggatgcgataccggtcgcttgctgctgaacttgccatcaccaccaggaggcgtgggcagcgacatcgaagagaatttccattcctcctgctcctcgtcatacttggcctgcgtgtacaggcgctgcttgacctcgatgggcacaaaattgtcgatgataagaagctggcgttttagctccttgaccagctcgttctgagccatctcgagctccctaagatcctggttgtggtcggacttgcaatcgttgagttcctgctgaagagccaaatatttggcgtagcatttggagagcttgcgcttcttaagctccacctcttgttcaagtgaaacatttcgttcgcgaatttccagagtagtctcctcctgcagttccagctgctgttggatctcaatttcacgcttcttgcgctcagcgatctccaccagcttcttctccagctctatctggcgctcactgtacgtgtccagcaggttttttccgccgcgaacaagttgaccctccaattctgcgagtttggctgccagttttgagttctcgacgcgctcccgttccagttcctcgttggacttcgccacctcggcctcgttttccttatccgattcggactcggcaccctcgggatcgctgtcatcctccaccggctgctcaattgttgaaacctgcagagagtctgacatctctttagttacggtctcctttttgggcttcttgacgcgctgcttcttggccgtgacctgcttttcactgcgttgctgctgttgcggacctattagccgcttgagtcgctcaatttcctcttggtactccttcaacttggcatcctgtggatcctcattcttaatcggctgattctggatggacttggcccgcgaagcgtaccgcagcgttgtaagcgtttcgttataattgtaattggatggtccaatgttggcaatcataatggtcttggaattgccacccaacgaatcctgcaacaatcgcgtcagctttgagtcacgatacggaacatgtggcgaactttcggccagggcggagatcacgttgcccagcgacgagagtgccagattaatcttgctggcttcctttagccgctccgctgatgctcctgtcttggactgccgctcactgcccgccaaatcgatgagattcagtttgcccactttgatggtgttcgtttccgtatcgcacatctcgattttgatcatgaaaatggcgtgggatctgcaagtaaacgataattaattaactaaagtttatccttatcgaaagcctcggattcctgatgaaatgcgagtattcgtatagcctgtttataccgaaacttaccttgaactatgctcattcatgttggtgaatcccactgtgcggttcttgttgcccacctgcatcactttgatcatatcttcgacactcttgcagttaatggcgtgcagattgggcacataaacgcccgatccacgttcccgcacctccaaatgcttagagttgggctttagcagatcgcgcagctcctccatataaatctctaggtaggatacatcgaccagaaactggaaattctcggtgcgattaatgtgcagccagatctgttcgaatgtgcgcggtattatgcccatcagttcgtcatttccgcgtactccctccattgtgaaggttttaccagtgcccgtttgtccataggcaaatatacatccgttgaatccctccaaaacggaactgactaggggaaagaccacttcatggtagagcgtcgtctgcgttgcactcgcatcataggcggcatcgtaggtgaaaaccttgcgctgctccttattgccatcgaccacattctgcagctccacaacgcctcgattcggatacacgttgaccacctccggcgatctttccgagcgttctctgttgctcatgggcctgcatcggaccaccacctggacgcactcgtttggcgtctggctgctgccggtgccaggtctcctgctcttggcactcatctccaaatatccggagatccacaaggtccgtgttaactgtgctcttttctgtggtggtgactcaggcagctccgcctcaacaaaaacaaagtcgagtagctgtggcgaccgaaaacaaatgacgaataaaatcaataattccctcctgacgcaaccttctgatttgggcacttctgtgctcgatttgcacgcacaatttgaagctagtcagccacttgagctaatgagcaaatcgatttggcaatcaactgctattacctgttattttgaagccaattacttcaccttgaattcgcttttttgtctcagctgctgttaactttgtctggctcaaacgtgcagtgtgcccaggctgaccaacgttgcaccaccaaatggagcgaaaatacggtactcccaattcaataccgcgcaattcaaaatggcagagaaatgagcacaacactaacttaccacccagtttagtagatagtaattgttttttggtaatagtatacgcaagcagataattacgatatatataaatacatcaatatttattgaaactatctttttttattttttctttaaaagtcacgtttactgctttttgatttacccgaactcgatttactagagccagtttcgccccgcttacgtttatttagaggatttcgtggatcgtaggcatcgtaccaatcgtcgccctttttattggcatccttagctaaaaccggagtcgtactattaaaatttaaggtatgcgacaaccaatcgtcgccgattatttcctgttctactacgcgatcgtctatatccttcggttccgattcgccatcatcagagcttgacttttgcttcaagttatccagtttcgttcggaacttggagagtaggctcaatgtaaatgcctctctaaagtttaaaaaaattggtaaaatctttgaaaagaataaaatttatatatatcccaccttgactgtcccttcggttgaagctttactttggcggtgtacttctccttagactctataaaatcgttaatataatggttttcgctggaccccttgatttcattggactttgctgctttctcttgtccattaactagtttgtctttgctctgcttatccatttgatactgctttttcagagaagcgatttcctcacggatcttggatctaaaatacataaattatatgacttgaaacatgataaaacctatttaagtatagctcacttttcctccgagacttttcgactttgttcctcctcccgtgttaacaaaacatcctcgtcatcctcagaatcagacttttcctccactggctgaacttttttgtctgctccactctttgatctctt

SEQ ID NO: 40127 - DNA, 2994 bp, DROSOPHILA
cactgcacgtttgagccagacaaagttaacagcagctgagacaaaaaagcgaattcaaggtgaagtaattggcttcaaaataacagctactcgactttgtttttgttgaggcggagctgcctgagtcaccaccacagaaaagagcacagttaacacggaccttgtggatctccggatatttggagatgagtgccaagagcaggagacctggcaccggcagcagccagacgccaaacgagtgcgtccaggtggtggtccgatgcaggcccatgagcaacagagaacgctcggaaagatcgccggaggtggtcaacgtgtatccgaatcgaggcgttgtggagctgcagaatgtggtcgatggcaataaggagcagcgcaaggttttcacctacgatgccgcctatgatgcgagtgcaacgcagacgacgctctaccatgaagtggtctttcccctagtcagttccgttttggagggattcaacggatgtatatttgcctatggacaaacgggcactggtaaaaccttcacaatggagggagtacgcggaaatgacgaactgatgggcataataccgcgcacattcgaacagatctggctgcacattaatcgcaccgagaatttccagtttctggtcgatgtatcctacctagagatttatatggaggagctgcgcgatctgctaaagcccaactctaagcatttggaggtgcgggaacgtggatcgggcgtttatgtgcccaatctgcacgccattaactgcaagagtgtcgaagatatgatcaaagtgatgcaggtgggcaacaagaaccgcacagtgggattcaccaacatgaatgagcatagttcaagatcccacgccattttcatgatcaaaatcgagatgtgcgatacggaaacgaacaccatcaaagtgggcaaactgaatctcatcgatttggcgggcagtgagcggcagtccaagacaggagcatcagcggagcggctaaaggaagccagcaagattaatctggcactctcgtcgctgggcaacgtgatctccgccctggccgaaagttcgccacatgttccgtatcgtgactcaaagctgacgcgattgttgcaggattcgttgggtggcaattccaagaccattatgattgccaacattggaccatccaattacaattataacgaaacgcttacaacgctgcggtacgcttcgcgggccaagtccatccagaatcagccgattaagaatgaggatccacaggatgccaagttgaaggagtaccaagaggaaattgagcgactcaagcggctaataggtccgcaacagcagcaacgcagtgaaaagcaggtcacggccaagaagcagcgcgtcaagaagcccaaaaaggagaccgtaactaaagagatgtcagactctctgcaggtttcaacaattgagcagccggtggaggatgacagcgatcccgagggtgccgagtccgaatcggataaggaaaacgaggccgaggtggcgaagtccaacgaggaactggaacgggagcgcgtcgagaactcaaaactggcagccaaactcgcagaattggagggtcaacttgttcgcggcggaaaaaacctgctggacacgtacagtgagcgccagatagagctggagaagaagctggtggagatcgctgagcgcaagaagcgtgaaattgagatccaacagcagctggaactgcaggaggagactactctggaaattcgcgaacgaaatgtttcacttgaacaagaggtggagcttaagaagcgcaagctctccaaatgctacgccaaatatttggctcttcagcaggaactcaacgattgcaagtccgaccacaaccaggatcttagggagctcgagatggctcagaacgagctggtcaaggagctaaaacgccagcttcttatcatcgacaattttgtgcccatcgaggtcaagcagcgcctgtacacgcaggccaagtatgacgaggagcaggaggaatggaaattctcttcgatgtcgctgcccacgcctcctggtggtgatggcaagttcagcagcaagcgaccggtatcgcatcctcagcgcagaaggcccacctccgaatacgctctgcaggaagccaaatcgaattcaccgagctctctacgcttcaagagcgagaacatcgtgaactacgagctggagatgccgtgtcgcaccacccaggagtaccgtacgcctaaggtgtccgcctcgctgcaggcggtgctcgctcaagccatgcaaacgggcggagatgatatagacatcgtggactcgcacacaaactcactgcgcagccgtctagagaacattatcaacgcgaatgccaatggaggagctggaccaggtgctggcgtcgctgtgggcagctccatacccaatgttcgcaacattaagtcaagccgggggctgccaagtgccgcctcaaatctggactcgaaccgccgtccgcccacgggccgtctgccggcaaagaagccagcttcggcgtatcccaaagctcgcggcctggtcaacaaataatcacaaacgattttaatcgaattgaattgcatctaaccattgtcgtgcaaacacaacactaaccaaagtatttcatagtcatcgcaatatgtacacctcggtacttttagcccaatctactcacatttcacgctttgtaaaagtttccttttgttttaagtcatctcatgcactggccctagaattataaagattttttattaattccactttagttaatgccatatgccttgagtgacttggccagtcgaccccaacacgcttccttaattatttttatgtttatttgttactcgactcgaattattgttattgatttaaatgcaaacatacgtacgttttgtgttcgattaagtgcaatccaagcttgagttaaatccagctgcaactgtctattatttacttagtaaatgatttttagttaatattataaaccaaataaagcaactccgta

SEQ ID NO: 40128 - protein, 784 aa, DROSOPHILA
MSAKSRRPGTGSSQTPNECVQVVVRCRPMSNRERSERSPEVVNVYPNRGVVELQNVVDGNKEQRKVFTYDAAYDASATQTTLYHEVVFPLVSSVLEGFNGCIFAYGQTGTGKTFTMEGVRGNDELMGIIPRTFEQIWLHINRTENFQFLVDVSYLEIYMEELRDLLKPNSKHLEVRERGSGVYVPNLHAINCKSVEDMIKVMQVGNKNRTVGFTNMNEHSSRSHAIFMIKIEMCDTETNTIKVGKLNLIDLAGSERQSKTGASAERLKEASKINLALSSLGNVISALAESSPHVPYRDSKLTRLLQDSLGGNSKTIMIANIGPSNYNYNETLTTLRYASRAKSIQNQPIKNEDPQDAKLKEYQEEIERLKRLIGPQQQQRSEKQVTAKKQRVKKPKKETVTKEMSDSLQVSTIEQPVEDDSDPEGAESESDKENEAEVAKSNEELERERVENSKLAAKLAELEGQLVRGGKNLLDTYSERQIELEKKLVEIAERKKREIEIQQQLELQEETTLEIRERNVSLEQEVELKKRKLSKCYAKYLALQQELNDCKSDHNQDLRELEMAQNELVKELKRQLLIIDNFVPIEVKQRLYTQAKYDEEQEEWKFSSMSLPTPPGGDGKFSSKRPVSHPQRRRPTSEYALQEAKSNSPSSLRFKSENIVNYELEMPCRTTQEYRTPKVSASLQAVLAQAMQTGGDDIDIVDSHTNSLRSRLENIINANANGGAGPGAGVAVGSSIPNVRNIKSSRGLPSAASNLDSNRRPPTGRLPAKKPASAYPKARGLVNK

SEQ ID NO: 40129 - DNA, 2400 bp, DROSOPHILA
tcctggcgcctgcgcagcttctccagtgtctcctcgctgggtggcgcaggtgccacagcctcctgggagcgtatgatggtgcgcagcttctccagcgcatcggccaggttcatttgctgggagcgcgtaagatcactcttgatgtaaaagtagccgtctttggtaatccggtttgccagcaccttgagcagcttctggcgcgtctgctcgggtatccagtccgcttgtgccaccttgaagcgtacatccaccttggtattcaccgtgttcacgtgctgaccaccgggtccggagctcctgctgtaggtgatctccagtcggtccatgggaatgaagccgctgaacttgtcgctgccactgggctgggtgggggatgtatacatatatcaatagatgggatccctgaaggcactgcatccacttaccggcgggggcggcgtgtagatttgcagtcgggcgccgggatagatcttgtccagggataaatcgctcttgtaggagagctgacgacccagaaggttgcctgtgccgcctgaggagctgctctggcgcagaactcttatgaaggcactcgtaattttattcattttatgccaaaatttcaatgagttaagctaaattaaatgttacgagaacgacgtttgtgttcaccacagaacagctgttcgaggtgagttgcgtgcagtgtgaccgaacttagctaagcgcgacaattcaaaactcccaaatcgaaagcttgttttatcttttatgtaaccgtgttttctttattgttaatcctaaaaaacaatctttaatcttaaaacaagggaaaacgatactttgtacgccatactctgtaacttttccactgtcacaagcataaggcagtgtggaaagtgcattaggtaagtcctctggttgaagtgcgcactagccaagttccaagccattagtggagtgccaatttaggcaattttcagcttcgtatggcgaacattttcgtattcgaaatgtctgaccacagtccctctgcaactttcattgaatgcggtcgagtgcggttgtgcgacggccgattgttgttattaatccgccgcaaacgaaactgaatccagctctcgatttcgttctgaccctgggcattcgtcaccgccgcaatgtacttcatgatgatcttggaggcctccgttttgcccgcaccggactcaccggaaattaggatgcaggtgtcttgttggcgctgcttgagcaccctgtaggcggaatcggcaatggcgaacaaatgtggggcattctcgaagagctcccgacccttgtatttgcgaatggtttccggaccgtagatgttcatctgtctgtagggattcatcgagacgcacacttcgccgatgtatgtgtagatggatccgttttggaatctagagaaagagtaatggacagtcgttcattagttcggcagtgttcgctgcagtgtttggaatggcatttccccaagcttacgaaatacatttcgagtgagtgggagtgacaggtggggagccaccacccgtcgttggcgcctgtagctttcaattcgaaaattgctttttcaacattctacatgcgggtctatatacctgatatacctgctccacatgaagccaacgatcgatataattgagcgagatgcgctatgtagatcaaattgttgatctcttttctcactttttgattgactgacatgtggatgcatttattctgcactcgatttgtcaggcgccaaaagattgggcatataaaagtttgttgtgttcataaaatgcattcgctaagtgggtcacttgcgatcgatagacaatgagaaagaaagagagcatgagaatctcaaatatttcacttggagactacaatataaagtatatattattctgaactaaaactttagttgataagagttctaataagtctttttcatgacacaggctatcttatctgaagcgattgcgagttcttgaaactatcgactggattattataagttggaaactaagattttgcaaaagatacttttttattgaactttgcctcttcacaagtatttagattaaaagtgagttgaatttacacatgatagagtgattttctagtttgccttaagaacagtttagatttcactgcatgtgagtggaattgaaaaacaataaagcaacttaaatgcaaattacgcattacgtgttcccagaaaattacccagagtgttccgaaagtaagagttacaccatcagcgagtgtaaattaacccagatgagctacataaccaaaagtccagccccaaaaagaaaaaaaaaacaaaactgtgcaacaagtggctattacaaaaggctggacagagtgttattttccctcccaaaaccagaaaaacaaaaagccaaaaatgta

SEQ ID NO: 40130 - DNA, 3874 bp, DROSOPHILA
ccacagtccctctgcaactttcattgaatgcggtcgagtgcggttgtgcgacggccgattgttgttattaatccgccgcaaacgaaactgaatccagccggcaattagcatcccccccttcgatccccggaataccgcaccctccgctcgcgagttaaactctaataaacgcaggatcaaaaggacaccatggctatgcaacgggaagctggagtgcaggacttcgtcctcctcgaccaagtgtccatggagaagttcatggataacctgagaaagcgattccaaaacggatccatctacacatacatcggcgaagtgtgcgtctcgatgaatccctacagacagatgaacatctacggtccggaaaccattcgcaaatacaagggtcgggagctcttcgagaatgccccacatttgttcgccattgccgattccgcctacagggtgctcaagcagcgccaacaagacacctgcatcctaatttccggtgagtccggtgcgggcaaaacggaggcctccaagatcatcatgaagtacattgcggcggtgacgaatgcccagggtcagaacgaaatcgagagagtcaagaacgttttgatccagagcaatgcaattctggaaaccttcggcaacgcaaagactaaccgcaacgacaactccagccgcttcggaaagtacatggacattgagttcgactacaaggcggatcccgtgggtggcatcatcaccaactatctgctcgagaagtcgcgcgtggtgcagcagcagcccggcgagcggaacttccatagtttctatcagctgctgcgtggagccaacgacaacgagctgcggcaatatgaactgcagaaggaaacgggcaagtatcactacttgaaccagggcagcatggacatactgacggagaagtccgactacaagggcacctgcaatgccttcaagaccctgggcttctccacggatgaggtgcagaccatttggcgcacaattgccgctgtcttgcatctgggaaatgtggagttccaaaccattgaggatgagctggtgatcagcaataagcagcacttgaaatccacggccaagctgctccaggtcaccgaaaccgagctgtccacggcactgaccaaacgggtcattgcggccggtggaaatgtgatgcagaaggatcacaacgccacgcaggcagagtacggaaaggatgctctggccaaggccatctacgaccgtctcttcacctggatcatctcccgcatcaacagggcaatcctattccgtggcagcaagacgcaggcgcgatttaactcggtcatcggagtgctggatatttacggcttcgagatcttcgacagcaacagctttgaacagttctgcatcaactattgcaacgagaaattgcagcagttattcatagaactggtgcttaaacaggagcaagaggagtaccagcgtgagggcattgaatggaccaatattgaatacttcaacaacaagatcatttgcgatctcgttgagcagccgcataagggcatcattgccatcatggacgaggcctgcctcagcgtgggcaaggtgacggacgacacacttctgggggccatggacaaaaatctgagcaagcatccgcactacaccagtcgtcagctgaagcccacggataaggagctaaagcatcgcgaggatttccgtatcacccactacgccggcgatgtgatctacaacatcaatggattcatcgagaagaacaaggatacgctgtatcaggactttaagcgcttgctgcacaactctaaggatgccaacctgagcgagatgtggcccgaaggagcacaggatatcaagaaaaccaccaagagaccattgacagccggcaccttgttccagagatcgatggctgatctggtggttactctgctgaagaaggaacccttctatgtgcgctgcatcaagcccaatgaccttaagagctcgacagttttcgatgaggagcgtgtggagcaccaggtgcgataccttggcctactggagaacttacgtgtccgtcgagccggattcgttcatcgccagcgctatgataagttcctgctgcgctacaagatgatctcgcagtacacttggcccaatttccgtgcgggaagcgaccgcgatggtgtccgtgtgctgatcgaggaaaagaaattcgcccaggacgttaagtacggccacacaaagatctttatacgctcgccacgcaccctgtttgccctggagcatcagaggaacgaaatgatcccacatattgtgacgctgctgcaaaagcgagtgcgtggatggattgtgaggagaaactttaagaagatgaaggcggcaattacgatcgtgcgcgcctataaggcctacaaactgcgtagctacgtccaggagctggccaatcgcttacggaaagccaagcagatgcgcgactacggcaagagcatccagtggccacagccgccgctcgccggacgtaaggtggaggctaaactgcatcgtatgttcgatttctggcgagccaacatgatcctgcacaaatatcctcgcagcgagtggccgcaattacgtctgcagattatcgccgccactgcgctggccggaagacgaccctattggggtcaagcgcgccgctgggtgggtgattatctggccaactcgcaggagaacagcggatatgaagcctacaacggaagcataaagaacataaggaaccaccccgccgacggcgagaccttccagcaagtgctcttctcctcattcgtcaagaagttcaaccatttcaacaagcaggctaatcgcgccttcatcgtttccgattcgaccatccacaaactggacggtatcaagaataaatttaaggacatgaaacgcaccattaaaattagggagttgacgtccattagtgtctcacccggccgggatcaactaatcgtcttccactcgtcgaaaaacaaggatttagtgttttccctggagagcgagtacacgcccctcaaggaagatcgcattggcgaagtggtgggcattgtgtgcaagaaataccatgacctcactggaaccgagttgcgtgtgaatgtgaccaccaatatttcctgtcgcctagacggcaaggcacgcattattaccgtggaggcggcgtccaatgtggaggtccccaacttccgtcctaaagagggcaacatcattttcgaggtgccggcggcgtactgcgtttaggcggaatcaactccgcccaactgtattgtaaattatggaacctagttttaagactgggctcatcaccctcttttctacttgtgacccatgtgtcccaccaaggacatgacgactctgtgtataccgtgccttccgccaaacacccgctttgtagtttttaatacgtcattctatagttagtcctatctgtttatctgttctgtgtgtgacgacatgattgtaattttgtacatttttctattatgcgtatgcgttaaggcgatatttatttaacatccatgtgagaggaataccacctccgccggttgagctggccgacgaaaagaacgaaaagtattaaatgtactttgtgcatttcttcaaatatgattcacagcacacaagaaaccatttgtaacgatcagtaaaatgtttgtacttaaagcgaaagatcacaaacatatgtgtgccatttgcaaatattattgaaataatatatgaaataaaagatgtaaactttgtacttgagaaagctggttaatgactatttttttatatcaataagttaaagagaagttaacttaccaaacataagcataatgtgcataagttccctatcccaaccttgatctgaattgaacccattcaaaatttcggtcatttcgtcatg

SEQ ID NO: 40131 - protein, 1011 aa, DROSOPHILA
MAMQREAGVQDFVLLDQVSMEKFMDNLRKRFQNGSIYTYIGEVCVSMNPYRQMNIYGPETIRKYKGRELFENAPHLFAIADSAYRVLKQRQQDTCILISGESGAGKTEASKIIMKYIAAVTNAQGQNEIERVKNVLIQSNAILETFGNAKTNRNDNSSRFGKYMDIEFDYKADPVGGIITNYLLEKSRVVQQQPGERNFHSFYQLLRGANDNELRQYELQKETGKYHYLNQGSMDILTEKSDYKGTCNAFKTLGFSTDEVQTIWRTIAAVLHLGNVEFQTIEDELVISNKQHLKSTAKLLQVTETELSTALTKRVIAAGGNVMQKDHNATQAEYGKDALAKAIYDRLFTWIISRINRAILFRGSKTQARFNSVIGVLDIYGFEIFDSNSFEQFCINYCNEKLQQLFIELVLKQEQEEYQREGIEWTNIEYFNNKIICDLVEQPHKGIIAIMDEACLSVGKVTDDTLLGAMDKNLSKHPHYTSRQLKPTDKELKHREDFRITHYAGDVIYNINGFIEKNKDTLYQDFKRLLHNSKDANLSEMWPEGAQDIKKTTKRPLTAGTLFQRSMADLVVTLLKKEPFYVRCIKPNDLKSSTVFDEERVEHQVRYLGLLENLRVRRAGFVHRQRYDKFLLRYKMISQYTWPNFRAGSDRDGVRVLIEEKKFAQDVKYGHTKIFIRSPRTLFALEHQRNEMIPHIVTLLQKRVRGWIVRRNFKKMKAAITIVRAYKAYKLRSYVQELANRLRKAKQMRDYGKSIQWPQPPLAGRKVEAKLHRMFDFWRANMILHKYPRSEWPQLRLQIIAATALAGRRPYWGQARRWVGDYLANSQENSGYEAYNGSIKNIRNHPADGETFQQVLFSSFVKKFNHFNKQANRAFIVSDSTIHKLDGIKNKFKDMKRTIKIRELTSISVSPGRDQLIVFHSSKNKDLVFSLESEYTPLKEDRIGEVVGIVCKKYHDLTGTELRVNVTTNISCRLDGKARIITVEAASNVEVPNFRPKEGNIIFEVPAAYCV

SEQ ID NO: 40132 - DNA, 6749 bp, DROSOPHILA
atataattgttgtttcgttctaaagtcatggtcattcacaactttgccaaaaagaaaaagcaaatcagatcagatcagatcatagaaatcagcacggaataaacggaataccagggtgaccgacccaaagaacaaatgcaatagacaacgtcttggagcgagatctatgaagtgcatcactcactagaaaatacaactattgcggcaataacaacaattggggcaataacaatgatccaagaggaccacacgcgaaaactctccattaagtgtaatttcattatatatatatattttttttttttgtatagtctgtagtgaaagaatgcgctatatttatataaacgtaaatattgtatgtacattgtagatttattattataattacgattatttaaaaatgtgtacattgatgtattgaaaatctgttaaatgtcattcacaccgaaaccaaggttaaaaaaaaaagcgaaaagcaaacttaaatgtttagacttatgtacttacgtgcgcaaattttgatgtactttgtgagcagtttggcctatgtaaatacgtcattccaccacaggatgtatgccccgaaggattaggatcgaccactttccgcatccttgcgaagatcttcttcagcccagagaagttgtggtgtgaatgatatgatcgtgatttgagaagagctcctcgatcttctcggggagtccccttcgaatttcgttgttcttattttttagttggagtactctgtttttagtcacatttcctttgtttgcctctgtcattctgttaatctgttatcggtgctttgaaacccacgcccaaatcactcacgccccctgaaaatgtggaacacgtgagttgcagtcacctcgtaaatccgaaaaacacaaaagaaaaatggcgaaaaaaggatgtcgcgtcacacacacacacaccacccaacacacacacatacaactgttacgaaaaaaaagaaccaaatacaaaaacaataataaaatgtcaaaatatatgtgcatgtcttttatattcggagcttgggctgaaaatttcgaaaacaaacaaaacaaaaactagtaaggttctaattttataccttggaaaaaaaaatgcctgctttttttttgggaaatcctttttcaaaaaatatacccatctctctcgtaatcatgtttttttgatgttggctgtcgaaaataatgaaatcgggtaagaaaagtaaatgtgataagttaagttattcgaatcatctgagttctgcagtttagcttagatgacccaggaatgaattcaatcaatacagatcaatggattctatattggtaaattataaaacatggatgggtaatacagtcttggttgatataaagttcctaacgatcatttcctaaaagataacgaacatagcaaagtgagtctaatccagctacaagatgggctgtcaggcatttagggactcctccttccggcacctcttttgctgctcctccgttgacatctgtgattgtttggcgttctctccaaattcaaaagaatttccgcttgggcgtgtcaaacgccagtccggacatcctgcgaaatgaaatcgaatgcttgcatttggaacgtaaaaaatgaaggagtcttgcccacttagccaacttgggtccattgatgtcttccactacgttcgagttcatcagcggtgtggccgcggccttcggttcctgaagcgtttgctttggcgaagccacaactttgccgggcgcttctggagtgacgaacttcaccgcgttctccttggaggtctggggctcgtcgtcgccgtcatcatcggacttgtcggcatcctccgtttcatccttctggccatcgccatccccgcactgcgaagcgtgatccttgagatttagaggattgcggcagttgctcttgcaaacgcaagtctcgctgcacgcattgttgcccgaaaggcagccgcaacgcttggtggtgcactttgtccgacacttgcaacccttgcagcgtttgccatcctctgtggcggatgtggagttcagcgattggatggatgaattgcccaatgacgtcacgttggcatcctgtttctctggcggtgaaatcacattgcggctatcggattgaatcctctgcggcgaagtcaaaaaaaaaataaaaaaaaattgtggaacaattagtttcaggagttttcgaacttcaaatgcaaactcaccttggatttcgatgtggatggcacccagtcgggatcgtcgctgacatcgcttagtaccactgtctcgttgccatccactatctggaagctgtcatctaagtcctgaggctcggacttaactgccttgctttttgacttgttcttggctctaagcttgtccagctcctgctgcagtgcctctcggctgctgagcagctcttcgaggatctgattgcgctgctgatcctccgccggggaccgtgcttcagcccatcgctggttggctgtcctgattaaaacggagaccttttcctcgtaggcgcgctgttgcgccagcatttgctcttcatgctgggattggagcagacgaaggcgtttgcttgccgcatcttcctgctgttgagcatccagtagctgcgcgcgcagctcatccaacgttgtgcgctgctcattcaagctggacgcctgcagacgccgttgctgcaccaaagtcttcaaaagttgcttactaaccgtcctggactcgccaaggctttggacgccctcagccaaggagcgaatgcggctatccagatcggtggggcagactttctgctgaagatcggagatctgagcattacgcatttccagctcctcctcgagactcgccagaatgcgggcctgctctgcggcttcggcgggatcgctggttttctcctgctggagcagatggtagtgattgttgattaccgcccggtcctccatcagttgctccaggctgtgctcagcatctataagcgagagtatgatctccagttcacgatccacccaggaatctgtcttcgcgttcgcgttggaggagccagcggccgagcccccgttatccttgtacttgtgacgctgggcctgcgccgatgcctgccgctcgagagcatccttcagcctcttgttggcagccagtgcctcctcgcacttgcgcttgaggacctggcgctgcttggagtgcaacgtctgttggcgcacaatctccgattgcattttgcggtccttgctctttagttgggttagctccttttcgcgaaccatcttccattggcggaacttctcggactcaccacgcattgctcgtatgagcttcaccttggattccttcatggtgcggatttcggtacttagattttgaatcttttcacgctccttgtctcgtatctttagcaagttggcctgcgtgatcagcttccggcgcagatcggagatctcctgctccaggagctgcaggcgtttgcgtcgctcctccgccaatttggcagatatatctttgctcttaatgttgcgcagctgatccatgaggtctcgtcgctccgcctcgagatcgtcgatcttttggttgcacagccgcaacttgacatcctcgtcatccgaatccagtctgctaaagttgcgcataatacgctcgtgcagctcctgtttgagatccagctggcgattgatgttgcgcagttcgccagcgaagttcatttgcttgttggtatactcctccgaatgggaatgcagcatttcatggacctcatcgccgccgctttccccgccttctgtatgggaacgactgctcagtcgctggcgtgactcatggccctgggactccagctcctcctgagtgcgttgcaattctacgtgcactcgattcaccagcagtgagaaatcacgcatctcattgtcaccatttgtattttcgtttccaaattgcgcctgttctctttgatccagtttgttctttagctccgacacatggcttcggagtttatcgtgtgcctgctcggcgatgtgggcacgcatttctttctcggtgagatcgagcaacgactgatgaagctcttgctgtaatttcctattcctgtcctgcagggtgcgcacctgttccttaagccgctggatctcggctgcattggccattgaaccagctagtgactcctcacagggaatggcacccaagcctgcggctccaacagcgctaattaaggaactgctcatcttgccgcccgacaatagctctacacgcagcttttggatgacgtccttcagcatattaacctccgccgcatgcggatcgagattgaccactggcttgtttttgatttgcagtgctcgatccgcatagcgtagggtgctcaatgtctcggccacgttgtagtcggcgggactgacgcaagcaatcatcagcgtaatggaattaccgcccagggagtcctgcagcagacgcgtcagcttggactggcgatagggtatgtagccagcggcctggccagctgcaatttatatggaatatataaaaatggagatcaattttcaagccagtggctaaatgatagatactcacatcccagggcattgatcacgttgcccagggccagaagacccttattgatgttcacaccctctttgaaccgatcgccgctggctagggtctttgagcagcgttcagaaccagccagatccaccaggttgaacctggacgtggtaacggattgcctatcggagattggaggtcaaatgtgtataagcattaagtattctaacgaggtgatggcggcccacaacatacttgccgtccagcttggtggctactagcgtcaatgtgaatatggcatgggatcttgaagaggtttcattcatagccgtggcggccacagcccgtccggctgagccgcggatcagatgatcggtcacttgctgggcggatgtgaccactagctcggtgaggcccggcatgataatacggttcttgacctccctgatgtctacggtggccttgtcccgagttttcgacgaaaaaaggtcatagaactgctcctggtagagctccacaaaagagcatgtgacagcaaaacgaaattcgctctgcatttccgcaatggctgtgaatatatcatgaacggcgcgtggtataacgcccacatggtcatctaacactccgttgaaggcggtgcccatagtgtaggtctttccggaacccgtttgtccatatgccaagattgttacgttatagccatttaacagctttttcactttggcctgtacacacgtctcgaatagatccttttgcgagtcgtcaatgtcgaagacatagttgtacgtatacgactcattccggttgactgtaacctgtggcgctccatccgccgatcgttcgacggcaatccggcagccgcgatccaactcggactgcaccaaggggcgcacgcgcaaggccactgccacacagctgggatcctcgctggacatctgggggtagggggagggaaggacaatcataacattccatcacctttaccgccatctcgaccaacaccaccaaccacttaccttctctggggcacagcaagtccgactttggttaactgatcaactggttagcacttacaaaaacttagaattttggttggtctagattttggagcaacgcggcttctccacgcgcagcccggcactctcaatgaattcgatttttggatcaaggaactaaactaatgaaacgcgacgctaagaagcaaatgcatttctgccagtatttttaaaaatggcgttgttatcgattcgttgcagatgtcgattagtggcgcgatcgacggaggtgccggtgtagaaagatttcgatttttttataatttggctcttgaatagcacatttgcaaaaatgtggttggacgatttgtgcacgccgatttgacaaaatgaatcattgacagtgtatctacatacttatacataaaaataaaagctacctagatctacaactattttagctactgccagtgataagagcccaattcttgtcaactagccaattcgccgatagccgatagcagacagccgcacatatctatcgcttttttgaacaatcgttggtagcaacagggaattgcagaaaccagttgtcttgggtttcgcaagaattggaaaaggaggatctggtcaaagagcaggacatggaggaagaggcgccgcggttcaatgtgctggaggaggcgttcaacggcaatgggaacgggtgcgccaacgtggaggccacccaatcggccatattaaaagtgctgacgcgcgttaatcgcttccagatgcgcgtccgcaagcacatcgaagacaactacacggagtttttgcccaacaacacgtcgccggacatatttctggaggagtcggggtccttgaatcgcgagattcacgacatgctcgagaacttgggttccgagggactggacgccttggacgaggcgaatgtcaagatggcgggtaacggcaggcagctgcgagagatccttttgggtctgggtgtcagcgagcatgtgctaaggatcgacgagctgttccagtgcgtggaggaggccaaggccaccaaggattacttggtgttactggaccttgtcggtcgtttgagggctttcatctatggcgatgattccgttgacggggacgcgcaggtggccacgccagaggttcgacgcatctttaaggctctcgagtgctacgagaccatcaaggtgaaataccatgtacaggcatatatgctgcagcagagcct

SEQ ID NO: 40133 - DNA, 4381 bp, DROSOPHILA
atttttaaaaatactggcagaaatgcatttgcttcttagcgtcgcgtttcattagtttagttccttgatccaaaaatcgaattcattgagagtgccgggctgcgcgtggagaagccgcgttgctccaaaatctagaccaaccaaaattctaagtttttgtaagtgctaaccagttgatcagttaaccaaagtcggacttgctgtgccccagagaagatgtccagcgaggatcccagctgtgtggcagtggccttgcgcgtgcgccccttggtgcagtccgagttggatcgcggctgccggattgccgtcgaacgatcggcggatggagcgccacaggttacagtcaaccggaatgagtcgtatacgtacaactatgtcttcgacattgacgactcgcaaaaggatctattcgagacgtgtgtacaggccaaagtgaaaaagctgttaaatggctataacgtaacaatcttggcatatggacaaacgggttccggaaagacctacactatgggcaccgccttcaacggagtgttagatgaccatgtgggcgttataccacgcgccgttcatgatatattcacagccattgcggaaatgcagagcgaatttcgttttgctgtcacatgctcttttgtggagctctaccaggagcagttctatgaccttttttcgtcgaaaactcgggacaaggccaccgtagacatcagggaggtcaagaaccgtattatcatgccgggcctcaccgagctagtggtcacatccgcccagcaagtgaccgatcatctgatccgcggctcagccggacgggctgtggccgccacggctatgaatgaaacctcttcaagatcccatgccatattcacattgacgctagtagccaccaagctggacggcaagcaatccgttaccacgtccaggttcaacctggtggatctggctggttctgaacgctgctcaaagaccctagccagcggcgatcggttcaaagagggtgtgaacatcaataagggtcttctggccctgggcaacgtgatcaatgccctgggatctggccaggccgctggctacataccctatcgccagtccaagctgacgcgtctgctgcaggactccctgggcggtaattccattacgctgatgattgcttgcgtcagtcccgccgactacaacgtggccgagacattgagcaccctacgctatgcggatcgagcactgcaaatcaaaaacaagccagtggtcaatctcgatccgcatgcggcggaggttaatatgctgaaggacgtcatccaaaagctgcgtgtagagctattgtcgggcggcaagatgagcagttccttaattagcgctgttggagccgcaggcttgggtgccattccctgtgaggagtcactagctggttcaatggccaatgcagccgagatccagcggcttaaggaacaggtgcgcaccctgcaggacaggaataggaaattacagcaagagcttcatcagtcgttgctcgatctcaccgagaaagaaatgcgtgcccacatcgccgagcaggcacacgataaactccgaagccatgtgtcggagctaaagaacaaactggatcaaagagaacaggcgcaatttggaaacgaaaatacaaatggtgacaatgagatgcgtgatttctcactgctggtgaatcgagtgcacgtagaattgcaacgcactcaggaggagctggagtcccagggccatgagtcacgccagcgactgagcagtcgttcccatacagaaggcggggaaagcggcggcgatgaggtccatgaaatgctgcattcccattcggaggagtataccaacaagcaaatgaacttcgctggcgaactgcgcaacatcaatcgccagctggatctcaaacaggagctgcacgagcgtattatgcgcaactttagcagactggattcggatgacgaggatgtcaagttgcggctgtgcaaccaaaagatcgacgatctcgaggcggagcgacgagacctcatggatcagctgcgcaacattaagagcaaagatatatctgccaaattggcggaggagcgacgcaaacgcctgcagctcctggagcaggagatctccgatctgcgccggaagctgatcacgcaggccaacttgctaaagatacgagacaaggagcgtgaaaagattcaaaatctaagtaccgaaatccgcaccatgaaggaatccaaggtgaagctcatacgagcaatgcgtggtgagtccgagaagttccgccaatggaagatggttcgcgaaaaggagctaacccaactaaagagcaaggaccgcaaaatgcaatcggagattgtgcgccaacagacgttgcactccaagcagcgccaggtcctcaagcgcaagtgcgaggaggcactggctgccaacaagaggctgaaggatgctctcgagcggcaggcatcggcgcaggcccagcgtcacaagtacaaggataacgggggctcggccgctggctcctccaacgcgaacgcgaagacagattcctgggtggatcgtgaactggagatcatactctcgcttatagatgctgagcacagcctggagcaactgatggaggaccgggcggtaatcaacaatcactaccatctgctccagcaggagaaaaccagcgatcccgccgaagccgcagagcaggcccgcattctggcgagtctcgaggaggagctggaaatgcgtaatgctcagatctccgatcttcagcagaaagtctgccccaccgatctggatagccgcattcgctccttggctgagggcgtccaaagccttggcgagtccaggacggttagtaagcaacttttgaagactttggtgcagcaacggcgtctgcaggcgtccagcttgaatgagcagcgcacaacgttggatgagctgcgcgcgcagctactggatgctcaacagcaggaagatgcggcaagcaaacgccttcgtctgctccaatcccagcatgaagagcaaatgctggcgcaacagcgcgcctacgaggaaaaggtctccgttttaatcaggacagccaaccagcgatgggctgaagcacggtccccggcggaggatcagcagcgcaatcagatcctcgaagagctgctcagcagccgagaggcactgcagcaggagctggacaagcttagagccaagaacaagtcaaaaagcaaggcagttaagtccgagcctcaggacttagatgacagcttccagatagtggatggcaacgagacagtggtactaagcgatgtcagcgacgatcccgactgggtgccatccacatcgaaatccaagaggattcaatccgatagccgcaatgtgatttcaccgccagagaaacaggatgccaacgtgacgtcattgggcaattcatccatccaatcgctgaactccacatccgccacagaggatggcaaacgctgcaagggttgcaagtgtcggacaaagtgcaccaccaagcgttgcggctgcctttcgggcaacaatgcgtgcagcgagacttgcgtttgcaagagcaactgccgcaatcctctaaatctcaaggatcacgcttcgcagtgcggggatggcgatggccagaaggatgaaacggaggatgccgacaagtccgatgatgacggcgacgacgagccccagacctccaaggagaacgcggtgaagttcgtcactccagaagcgcccggcaaagttgtggcttcgccaaagcaaacgcttcaggaaccgaaggccgcggccacaccgctgatgaactcgaacgtagtggaagacatcaatggacccaagttggctaagatgtccggactggcgtttgacacgcccaagcggaaattcttttgaatttggagagaacgccaaacaatcacagatgtcaacggaggagcagcaaaagaggtgccggaaggaggagtccctaaatgcctgacagcccatcttgtagctggattagactcactttgctatgttcgttatcttttaggaaatgatcgttaggaactttatatcaaccaagactgtattacccatccatgttttataatttaccaatatagaatccattgatctgtattgattgaattcattcctgggtcatctaagctaaactgcagaactcagatgattcgaataacttaacttatcacatttacttttcttacccgatttcattattttcgacagccaacatcaaaaaaacatgattacgagagagatgggtatattttttgaaaaaggatttcccaaaaaaaaagcaggcatttttttttccaaggtataaaattagaaccttactagtttttgttttgtttgttttcgaaattttcagcccaagctccgaatataaaagacatgcacatatattttgaca

SEQ ID NO: 40134 - protein, 1212 aa, DROSOPHILA
MSSEDPSCVAVALRVRPLVQSELDRGCRIAVERSADGAPQVTVNRNESYTYNYVFDIDDSQKDLFETCVQAKVKKLLNGYNVTILAYGQTGSGKTYTMGTAFNGVLDDHVGVIPRAVHDIFTAIAEMQSEFRFAVTCSFVELYQEQFYDLFSSKTRDKATVDIREVKNRIIMPGLTELVVTSAQQVTDHLIRGSAGRAVAATAMNETSSRSHAIFTLTLVATKLDGKQSVTTSRFNLVDLAGSERCSKTLASGDRFKEGVNINKGLLALGNVINALGSGQAAGYIPYRQSKLTRLLQDSLGGNSITLMIACVSPADYNVAETLSTLRYADRALQIKNKPVVNLDPHAAEVNMLKDVIQKLRVELLSGGKMSSSLISAVGAAGLGAIPCEESLAGSMANAAEIQRLKEQVRTLQDRNRKLQQELHQSLLDLTEKEMRAHIAEQAHDKLRSHVSELKNKLDQREQAQFGNENTNGDNEMRDFSLLVNRVHVELQRTQEELESQGHESRQRLSSRSHTEGGESGGDEVHEMLHSHSEEYTNKQMNFAGELRNINRQLDLKQELHERIMRNFSRLDSDDEDVKLRLCNQKIDDLEAERRDLMDQLRNIKSKDISAKLAEERRKRLQLLEQEISDLRRKLITQANLLKIRDKEREKIQNLSTEIRTMKESKVKLIRAMRGESEKFRQWKMVREKELTQLKSKDRKMQSEIVRQQTLHSKQRQVLKRKCEEALAANKRLKDALERQASAQAQRHKYKDNGGSAAGSSNANAKTDSWVDRELEIILSLIDAEHSLEQLMEDRAVINNHYHLLQQEKTSDPAEAAEQARILASLEEELEMRNAQISDLQQKVCPTDLDSRIRSLAEGVQSLGESRTVSKQLLKTLVQQRRLQASSLNEQRTTLDELRAQLLDAQQQEDAASKRLRLLQSQHEEQMLAQQRAYEEKVSVLIRTANQRWAEARSPAEDQQRNQILEELLSSREALQQELDKLRAKNKSKSKAVKSEPQDLDDSFQIVDGNETVVLSDVSDDPDWVPSTSKSKRIQSDSRNVISPPEKQDANVTSLGNSSIQSLNSTSATEDGKRCKGCKCRTKCTTKRCGCLSGNNACSETCVCKSNCRNPLNLKDHASQCGDGDGQKDETEDADKSDDDGDDEPQTSKENAVKFVTPEAPGKVVASPKQTLQEPKAAATPLMNSNVVEDINGPKLAKMSGLAFDTPKRKFF

SEQ ID NO: 40135 - DNA, 4428 bp, DROSOPHILA
ctgaaattaaagcaagcgaaaaaataataataatacagccaaaaagatgctctaaaacaaagaaataagtaaaggacagacagaaagatttcattagtccgaaatttgtcattaacttattacgttttaattactcaacttatcacttgattgattactcaacttatcacttgatctatttgatagaagtatttcaagttactgcaacattttctcgcagtgtagtgtctgcgctaatggattgtgtccttcgcaaagttcgggcatttccgcggacatttctctttgcggccacaggacgtaattgaaataaatatttttctgtagtgttcccttcagagcggtggaatatttttgaagagccactttattgaaatttgtttgcttatttgcatttcttgtactgggaattgattgaaattgaagaatgtaaactcaagtaatacggggtatttgccaacatttaaggcatggaattctaaaagccagattaagtgttgtggcaaaaggaaaaacaaagtgttgcatggttgatgctggttcatgtaagaggcattactcaaattaatgcgcacagcagcgggtgaaaaattatgcaaatcacgtaatttttatttcgccgtgttgaaaagtcaagacgacatgctttttgtttcaaacggctgcttttaaggggggtggcctatgtattgtgcccacttttattgcaaacacgcgcgtaggtttcccttttgcagacagaaggtgcatgtattactgacactttgcgccttctcctaaactttatttcggttttattgttttaagctttcgttttgggctgctgaattatgttatttgcgagcattctttaaataacgaatttcctttacttttcaaattacgcgcccgctgtgcaaccctgcgcacgttatcgattgccagtgggcatgcgcacaactatcgattaccgatgacaaacagctgtgtacctatacttatccaatatggctgcaagtaaaaaaaattgtaacgctgtgaaaaaactgcaatttgaattgcattttccgcttgagtattagatagaaaagtgcgagaaatgtgaatttgtgcaaacgaaagtggaacactatccgaaaatcaagtgcgcgccaagaaatcgaagcgaaaaagtgaatatcgaaaaagtcgccggtgccccgccaaaaaaaagaagactcccccactccacttgaaaacatttctctgcggaaataaggaaaatactgcgaaaatggaagccgacataacgcccctggcggaaaccaacggagagcagcgccaaaatccccaggaaagtgctcaaaaccaagagcaaccgcaaccgcggcaggatttggcgggcaagtcggtgggttccgctgatgatggcgtctccggaactgtgggacagattatggattacctcgaggtgcgcccggctttaaaagacttggaaaagcttgtgaaactcatacatatatatatatatatgtttgtttatttttatttatattataggacgatgccggtgcaactgccgaccaggacgcggagatgggcgaggcagagtatctggatggcgagatgccgcaggaggatgagagcgagactccgcaaacggagaaagccaatgaaggttgccaggaatcaagcaataagaaggatttgcaagaatctgcagctaaagatgatttttccaaggaaaaaagtggagaggatggtgaaaaagacaccgacaaggagaagaaggcaactcatttacatgaagataacaacgatgatgccgaaaaggatggcgacgaggccgacgcagaggatgaagacgatgtagagaagccagaagatgaggatggcaccgaagaaggcgacgaggccattgaagaagatgaggacgctctcgatgaagatgaggatcccaacgaagaagtcgaggaaattgaaccagatttcgagactggcaccgatgcagaaggtgaactaatcactggcgatgagccgggcgatctggccgatgtgcccattagggagcgcaagaaagaggaacccgtggacgaagaccagtgccgcgtttgcaccagcaaggaagagctagtctgcctgtttaagaagcaaatcgatgccacgcccgcggacatgctgctggtcatctgtcctaatgtctcgattttgcccaaggactttatgccgcaattcatatgcaccaagtgcatgggcagccttaccattgccatacagctgagaaagcagctggagaccacggaccaggagctgcgcaagcgtttgtcccgaagcaagaataaagtgcgaagaccccgcggctatgtggtcatagacgcacctgtcaccgattccagtgaggatgaggatgagctcgatgatgagttcaaggtatccgatgtagccggaaccacgagtgccgacagcgattctgccgattcggatgacagtgagaaggagaaaaagaagcccggaccacgtgggcgtcctcgaaaaaagccactcaagagaggcacggacagcgatggggagccttccagcgcccaaaagaagaaataccagccctcttcgacggcttcagtgggcccattcgagtgtcccaactgcgacttgacgttctcgcgcaaacaatcctatgtgctgcatcgtaagactcacgagagaatagagcatgcctgtcccatctgcggcaagaagttcaaggtggagtgggcctataaaacgcacatgcaacggcacgagcaggagcgcgcccatttccgctgcgagctgtgccccaagatattccgactgcgcgcggaactgaagcaccatatggcccagcgacacgacgagcatggcttcatttacgagtgcaagcgctgccagcggacgttcctcacccagcagcgactgcagcgtcaccaggccgtcggttgtcagcggcacaaggaggatagcgttcgcatcaaggaggagcagtcgcggttcaagcaggagtcgcgcagcaaggacgaccgccatcatggcaacaacagcagcaaacgccgtcccggcgaaggacgggatcttttcaaggctgtggccccaccaacaaccacctattggagcgatagcttctcggactaaaaaaaccaaggtgcggcggcttgcggatttcaattcaataatttctaatgaacgattttaagtttctctagctgtaggaagaattcagtgcaaataaatcacatttgtaataaatacaaaataacactagtggaagttttgagtacatgtaaacttctcaagctaagtaagtaagcgaaaaggcaaaataaaaagttcgattaatggcagattggaaaatattgacttagacgctaagattttcatttgttcctaaggacaccattagattataaatacttcaaacatataagattcgctgttaaaataaacactatgtttggaataagtgcgtcgtaacttacatggagtgcgctgctcctcagtgacccacaatgctttccttttgaaccccttttaattggatcccaaagcgtttgctcgccaaatggcagcacttagtgccgccgagctaaagaacaaccaactgcagttctgcacaatcttggccataatgtggcgttctaatgtttataatttcgcttgtggagcataactaggagtgtttaactactggggattactttggacccaagctgggggtctttagtgtagacttgcagcatatatgtgcataagcggagcactaagtgtggttactcacaactttcagatccgtgtacaattcttatcaggtatttcagaaaggtttggtaagaaaaatgctgtagtacttcaagcaactaatttggaccacaaaatttgcacttttccaagaaagttttactcatggccggaaggaaaacgaactgagttgcaacgttttagttataattttaaactgtaagccaataaactaagttatttgtgtaagcctaatttgtaagccgtaatttatgcaaaattgttaagcttttcttttgggtttctgtgggaagttttgttgtgattgcagtgagtttttagggctaaatttaaaactctttaaattgaattgaagacacacgtttgactttaacatttatttacatagcaatcgggaattgtttgggcaggaaatctgatgcacgtgcgaatgtttcggcaatgctgctgcactacaaaggtgtctaattgatccgccgctccgtgtgcgtgcctaattagaagtggtggatggagtggtaggtgggcaggtgataggacaccgaagacaccggatggtgggcaatcagcggggcatgggcgatgagtggggcatgcgatatgattggggcatgatgcaccagcgtgggtgcagctatgtagtgcgagtgggtgaccaagggggcatggtagccgagccccaatgatatgccgcgcttt

SEQ ID NO: 40136 - DNA, 2339 bp, DROSOPHILA
aaaaaattgtaacgctgtgaaaaaactgcaatttgaattgcattttccgcttgagtattagatagaaaagtgcgagaaatgtgaatttgtgcaaacgaaagtggaacactatccgaaaatcaagtgcgcgccaagaaatcgaagcgaaaaagtgaatatcgaaaaagtcgccggtgccccgccaaaaaaaagaagactcccccactccacttgaaaacatttctctgcggaaataaggaaaatactgcgaaaatggaagccgacataacgcccctggcggaaaccaacggagagcagcgccaaaatccccaggaaagtgctcaaaaccaagagcaaccgcaaccgcggcaggatttggcgggcaagtcggtgggttccgctgatgatggcgtctccggaactgtgggacagattatggattacctcgaggacgatgccggtgcaactgccgaccaggacgcggagatgggcgaggcagagtatctggatggcgagatgccgcaggaggatgagagcgagactccgcaaacggagaaagccaatgaaggttgccaggaatcaagcaataagaaggatttgcaagaatctgcagctaaagatgatttttccaaggaaaaaagtggagaggatggtgaaaaagacaccgacaaggagaagaaggcaactcatttacatgaagataacaacgatgatgccgaaaaggatggcgacgaggccgacgcagaggatgaagacgatgtagagaagccagaagatgaggatggcaccgaagaaggcgacgaggccattgaagaagatgaggacgctctcgatgaagatgaggatcccaacgaagaagtcgaggaaattgaaccagatttcgagactggcaccgatgcagaaggtgaactaatcactggcgatgagccgggcgatctggccgatgtgcccattagggagcgcaagaaagaggaacccgtggacgaagaccagtgccgcgtttgcaccagcaaggaagagctagtctgcctgtttaagaagcaaatcgatgccacgcccgcggacatgctgctggtcatctgtcctaatgtctcgattttgcccaaggactttatgccgcaattcatatgcaccaagtgcatgggcagccttaccattgccatacagctgagaaagcagctggagaccacggaccaggagctgcgcaagcgtttgtcccgaagcaagaataaagtgcgaagaccccgcggctatgtggtcatagacgcacctgtcaccgattccagtgaggatgaggatgagctcgatgatgagttcaaggtatccgatgtagccggaaccacgagtgccgacagcgattctgccgattcggatgacagtgagaaggagaaaaagaagcccggaccacgtgggcgtcctcgaaaaaagccactcaagagaggcacggacagcgatggggagccttccagcgcccaaaagaagaaataccagccctcttcgacggcttcagtgggcccattcgagtgtcccaactgcgacttgacgttctcgcgcaaacaatcctatgtgctgcatcgtaagactcacgagagaatagagcatgcctgtcccatctgcggcaagaagttcaaggtggagtgggcctataaaacgcacatgcaacggcacgagcaggagcgcgcccatttccgctgcgagctgtgccccaagatattccgactgcgcgcggaactgaagcaccatatggcccagcgacacgacgagcatggcttcatttacgagtgcaagcgctgccagcggacgttcctcacccagcagcgactgcagcgtcaccaggccgtcggttgtcagcggcacaaggaggatagcgttcgcatcaaggaggagcagtcgcggttcaagcaggagtcgcgcagcaaggacgaccgccatcatggcaacaacagcagcaaacgccgtcccggcgaaggacgggatcttttcaaggctgtggccccaccaacaaccacctattggagcgatagcttctcggactaaaaaaaccaaggtgcggcggcttgcggatttcaattcaataatttctaatgaacgattttaagtttctctagctgtaggaagaattcagtgcaaataaatcacatttgtaataaatacaaaataacactagtggaagttttgagtacatgtaaacttctcaagctaagtaagtaagcgaaaaggcaaaataaaaagttcgattaatggcagattggaaaatattgacttagacgctaagattttcatttgttcctaaggacaccattagattataaatacttcaaacatataagattcgctgttaaaataaacactatgtttgg

SEQ ID NO: 40137 - protein, 587 aa, DROSOPHILA
MEADITPLAETNGEQRQNPQESAQNQEQPQPRQDLAGKSVGSADDGVSGTVGQIMDYLEDDAGATADQDAEMGEAEYLDGEMPQEDESETPQTEKANEGCQESSNKKDLQESAAKDDFSKEKSGEDGEKDTDKEKKATHLHEDNNDDAEKDGDEADAEDEDDVEKPEDEDGTEEGDEAIEEDEDALDEDEDPNEEVEEIEPDFETGTDAEGELITGDEPGDLADVPIRERKKEEPVDEDQCRVCTSKEELVCLFKKQIDATPADMLLVICPNVSILPKDFMPQFICTKCMGSLTIAIQLRKQLETTDQELRKRLSRSKNKVRRPRGYVVIDAPVTDSSEDEDELDDEFKVSDVAGTTSADSDSADSDDSEKEKKKPGPRGRPRKKPLKRGTDSDGEPSSAQKKKYQPSSTASVGPFECPNCDLTFSRKQSYVLHRKTHERIEHACPICGKKFKVEWAYKTHMQRHEQERAHFRCELCPKIFRLRAELKHHMAQRHDEHGFIYECKRCQRTFLTQQRLQRHQAVGCQRHKEDSVRIKEEQSRFKQESRSKDDRHHGNNSSKRRPGEGRDLFKAVAPPTTTYWSDSFSD

SEQ ID NO: 40138 - DNA, 4169 bp, DROSOPHILA
tgaagggaaggcatatcatgcaagaacccaaaagttaagaacgggcagaactaattctaaaatagcttacatagcatacattttgtaaatatttatcccaaagtaaataaaaaatcgtaattaataatcggaactgtgaatagaggaaattatacaaaatatatacccatgatgaacaattctaatacgaatcaagatataccaaaacagatacaatttgaaagaacttttggacataattaactaaatgcttgtatacgatactttcttggattaatatcgaaaaaataaataaataaataatgaaaggaaagtcttggaaatacactctgccagtcgagagaaccgaaatcaaaatgttatatacctacatagatatacaaaaagccagatttgcagcatatctacgcgtaatattacaacaaatttataccaaacttttggcaaacatatcgtgcacttagtcctaatatccaccctaagcgaacatatttgtataatgcccatcatatccacaattcaaaattcattttgagcgaaccacttacctatatcaacaaccaaatcatcaaattagacatacatacatttcgctattcaagtcagtgtttgataaactaccgatttgttgactagaatctaagcctagcatactatatatatatatatataggcttaagtttattgtttattgctcgatttgtaggagttttactgtaatttgtattcgtattgtatgataatgtacgcttgcactcctagatctacaaaatattgaagagaaaaacgaaatggctggctacgcaattggggagcggccaatacaagcatatctctataagaaacgcataaacagcagaacttagccgcaaaatcgatttgtaaattacaatacaataatttataataacaatctagcaacgctctctgttttgtaaatcttaacaagttatttaaataaaatttatttaaaataaacgtaatacaccatgaaatcgccttttccttaatttattgtagtgctttatttgagttttaagtaaaatataattgggaaatatacaatcaaagtaagtattttcaatcgataaaagagcataatttaaatgaatacataacatatgtataattattaacctagattacgacacgctgatttgcccatttaccatatggtttccttcgttcctcgttttattattcctctgggtaaatgtatataatggaccgcctactcatccttggcaagcgttgagtcctcactttccttgaacagtatatcctggatcttggaccgcacgtacatcttccgactgagcgaaaggtggcgcattgcgggcaccaagctaagtgcaaaatagtagtcgtcgtccttggtgagctcctcgtgattctgttgtatgatgtagctgagctgttcgctgacagcggtcagccgttcgatggacgtctccaggttgttcttcagctgcttggccgagctgctgctggaggacgtggaggccaccacagtagcctgtacgcccgaaccaacaccgatgggcctgctacttccaccggctggtgaagtcgaatgggttagcacggtcacttgcttctcaggctgatccaggccctcatcatccatcacgtgtataggactatagcacagtggatcctcgctgtatatgatgtccttaatgtcctcgctaatctcatcgttctgctcgtactcctcccacttttgcggcagggcgcccgcctcgcccagataattggcgacgttcgactcgatcttcggcttggccacacgcagcggctccctcagcgtcttggccttggtaatccgcacggttttgtctgcaatgcaaaggatggaagcgatggttaatacgatacatattggtacagctaccggataataacaaaaatatcataacccagagatgggcgccggcgatagtttcccgccgacccaagggtcgatagcccgccatacgaacttcgctggaattacctttcttgatgattgggatcatccgggcctggggacgttgctgcaccggactgaccagcacctcgtccctgtgcttgtgccgcagatgcgtccacaaattggtcgtattgttgcccttcaaattgctggccatgccaccacgcgatatattgttgccgcaataacggcatatcgcaaagttttcgcactcctcgttaatatcgtagtgctgccacacattgctaacacgacccttgggcatttttaatacttttctctaggtaattagtacgtcaaaagtgatttttctccacaaatttatttattgcgatattggcgttgctgtagtcagtgttgtcaagtgccgttgcagtgttgtaaaacgcatgaacataagagtggaaacaaaggcaacggcaaacagaggtgaaaaacgaaaataagagaatgtttacatactttacaacagcgcaaaatcataaaaatacttttaacataacaatattttttagctgattttttaatagcattttagataatatacaataggtttataaactatttacaagcacaaccactggttggggaaaattctgtacctatcctgcactatttttatctatagttttttttttcaagacgatttactgccttgctataactagagtttctactttttccgcgccaaagtggaggagcctgtaccgatgacccgtggatttatcgcgatggcatcgggcactgatccgtgctcggtttctacggcacggagcacgcgtggcagtggatttcgattgtgaagggcgtgcgtgagatttcggatcccgaacttaccgttactgctgctggagtggagacatcggtgccgtagcagggatccggttccagttttgccgctgtaggataacagatcgccacaggttttgcagcaggcgtacggctctatgtggtcgtcgcactggacgagattgaaaaacctccagacgcagcttttggtgttcctgggctcaacgagtttgcaacgcttgtccccggattttagtaggctacgaagctctgatttcttttcaacatgcatcgtggtgtatcggttgttcgatttgcggtggtaattcggtttgccaagaagaaaacaaacccaaattacaaaatgtacacaaatacaaactcacgaaaattcagtcacgcacaaaactgtgttggtaaacaagcgctagcacggtgcgaaaagtgtaaggtggtgtaaacagccactgattttcttaaaaagaacttgattgtaagtttaattttttttgaattttatttgtttcttatgttttttgaatattttcttttagtttaaaacctaaaattctcatatgactagcgattccgattacccatagtaaacagtctatcgataaactcaattgagttgactattgtatattgaatcagtagaatctttttatttaaatgggtaaagtttcgatggctttcctacagccaggacaatatcaaggcccaattgaacgccggagtccggcaattcaacaagaagcgcagtcgcggcaaagtctggaatgtcttctccagaatcgagcttggtcaaataacatggatgcacttcacacatggagcggcacaagtgctacagaacctatgtcatatatccaacatcagaggatgaagaggattcccactggaatccggacgtttccagtgcggacaaggctacagataagataaccgaggccctgatggattggtgcgtcgtggttagtgcgcgggacatcgaaacgcactacgatttcttcttggtctttgtcgccttggacagccaggaggataagattatcaaagaaattcaaggctaccaggcaatacagatgcctgcatgtggattagctgcaccgaaagatgttgcccaaccaatatgaataaaagaatcgattcttagctctagcttaccaaattgtaggttttcctagaattcctgttaatttaaaactattaatgatccacaatgtcgatacacaaaaaaatttgaaaaattaaaattttgaataaagaaaacaatacgaacatttaaagttttgtcaatattaccgttttcaagaaatccgccataaattaaaaccccagagttgcaaattcaaaaagctaatattttcgttatatgcatttatatacgttggtattttatgtggag

SEQ ID NO: 40139 - DNA, 1199 bp, DROSOPHILA
ttttgtgcgtgactgaattttcgtgagtttgtatttgtgtacattttgtaatttgggtttgttttcttcttggcaaaccgaattaccaccgcaaatcgaacaaccgatacaccacgatgcatgttgaaaagaaatcagagcttcgtagcctactaaaatccggggacaagcgttgcaaactcgttgagcccaggaacaccaaaagctgcgtctggaggtttttcaatctcgtccagtgcgacgaccacatagagccgtacgcctgctgcaaaacctgtggcgatctgttatcctacagcggcaaaactggaaccggatccctgctacggcaccgatgtctccactccagcagcagtaacgacaaaaccgtgcggattaccaaggccaagacgctgagggagccgctgcgtgtggccaagccgaagatcgagtcgaacgtcgccaattatctgggcgaggcgggcgccctgccgcaaaagtgggaggagtacgagcagaacgatgagattagcgaggacattaaggacatcatatacagcgaggatccactgtgctatagtcctatacacgtgatggatgatgagggcctggatcagcctgagaagcaagtgaccgtgctaacccattcgacttcaccagccggtggaagtagcaggcccatcggtgttggttcgggcgtacaggctactgtggtggcctccacgtcctccagcagcagctcggccaagcagctgaagaacaacctggagacgtccatcgaacggctgaccgctgtcagcgaacagctcagctacatcatacaacagaatcacgaggagctcaccaaggacgacgactactattttgcacttagcttggtgcccgcaatgcgccacctttcgctcagtcggaagatgtacgtgcggtccaagatccaggatatactgttcaaggaaagtgaggactcaacgcttgccaaggatgagtaggcggtccattatatacatttacccagaggaataataaaacgaggaacgaaggaaaccatatggtaaatgggcaaatcagcgtgtcgtaatctaggttaataattatacatatgttatgtattcatttaaattatgctcttttatcgattgaaaatacttactttgattgtatatttcccaattatattttacttaaaactcaaataaagcactacaataaattaaggaaaa

SEQ ID NO: 40140 - protein, 283 aa, DROSOPHILA
MHVEKKSELRSLLKSGDKRCKLVEPRNTKSCVWRFFNLVQCDDHIEPYACCKTCGDLLSYSGKTGTGSLLRHRCLHSSSSNDKTVRITKAKTLREPLRVAKPKIESNVANYLGEAGALPQKWEEYEQNDEISEDIKDIIYSEDPLCYSPIHVMDDEGLDQPEKQVTVLTHSTSPAGGSSRPIGVGSGVQATVVASTSSSSSSAKQLKNNLETSIERLTAVSEQLSYIIQQNHEELTKDDDYYFALSLVPAMRHLSLSRKMYVRSKIQDILFKESEDSTLAKDE

SEQ ID NO: 40141 - DNA, 2784 bp, DROSOPHILA
aaaggggcagactttcgggtaagtggaaaccacatccatggtccatgtggtgcactcaaggatcctcggattctggctcctccctaggttctttaggttcagcgtttctctttttctattctgtattttgtttcttttgtttttatactattttattgttgcaggtacttgtggttgcggttttgttgttgctattgttgctctgtagtttgtttgttgctatgtgtttgcagtgtttaattatagttactcgcgtcttatttaattcagtttttaggcttagcattgtcgtttcgttttgatctgaggcaacttgcagttctgtgacgtttctataggaaatcaaaaatatatgcgacaataatctaatcatcgatctactccctcaacacacacgaataaacaaattctcaacgttttgtttttgctatatgctggctactctctctctttttgggcggtaccaatcaaaaacgttcaaactttttgcattactatttcgttagtttcgtaagtttcacttgtttttcattgtttgattagcaccctgaaaacgatttttcagccggattgcatttaattctatatttctggttctgtttctggtttctggttgagtgtcctgtttcatactgccattaattggtttggtttggtttggtttggatttgttgctcttgcttgtgcctgctgcttgaattgtgattggcttcaaaaacacaaattcgtaataaaaatgcctgcaaaaagttggtggtcatcaaattcgccatctgtttttcgtgtgttcgcttgtctgtccgtctgtttgctgtgtgtttggtgtgcacacgtgcacgtgtgtggtacatcttatcattaggttccttgtttccttgtttagttatcatagtaatcaatgtgcccagtttggggcttcttgtccagcttggtcgtaggtggtctccgagggcaacagcagttgcatcagtagtcatgtttcatcttctttgcgcgcgcgtaaatcactcgtctatctttcactccgtcgtttcatcgattcttagcctaaatctaagcagcttctttggggggcatcctctgggggcatctcctcgtttctcctcatcctattgctccacattgaccttgggcgtggaggtcagagtgggcgtatcgttgggcggtattatatgtggggggctggtgggcgtgttgggcatgtgatcgtaaatggcctcggcctggatatccggttcggcttcggacatgtgcagtcgatcctcctcgtcctcggactccgaaagcacctcgatcttgggctccactacaacgagctcagatcctggctgtggctccggtggctggtcctcgtccacttccatgggtcgatcgctaccatcgctggcctccgcgtcactgcaaccatcactggtggcgccagtggtgttcgttgtggttgtggtcgtcgtggtggtgttgaccgtggtgttcatggtcgaatccatcgcctcggcggcctgttccgccgccatggccgccctgatctgctgcgtcagctcctggtgcattcgctgctgctgctgctcgtaggtgagcggttcagtgccctctgaaccggctccctcttccgatcctgccccgtcgactgcctcgcccgactcccctcctgcctctgccccatctcctcctgcccccgtggtggtctccgccaccattgcgtcccgtcgctgcatgcacttctccagtgccatcttgagtgttttacgtttgcgctgctttgccgcctccttgttggcgttcatgactactgatgccgctgctgttgcggctgcttcctatggtgaatgattgctggctgccgctgtagccgctgctgatgctgcagctgccgctgccaagtgtgctggagcaattgttgcacccgccgccaatccgatttcctgcttgtgctccctggcaatgtgacggcgcaccgtgttgtttcgcgtgaaggtccgctcgcagaagggacatggcactcggatgccctgatgacgctgccggatatgcgcccgcagattcgtctcgtatccgtacagacgatcgcagtagagacacttcagcttcttaccgtcggccgtgttcacgctgttcttgttgttcatcttggtggcgttccatacgttcaacatgtccgccggcgcaatcgacgcggccaggttactggacagcgttccgtccgccttcaggttctccagcagcgtattcggtgtggtcgacgaggtgttcgagtttggcggcggtggcggtgagtacttcaagttctccagcttcacgcgcagatcctcggctccgttctgtttcgtttttaagcgatgtaaatatcattgttctcaccaatttcgttttaactacttacatctgtagactcatccataagctcgcggtcgtcgtcattagcctcattggcactgccattgtttcgctccgatttcacaatgcgctccaggctactggtggcatttccatttcccgctgtggtgctgggactatggttctcgtagcgactgggaaaaaaaatactcgaattagtttaaacacttcggggaaaaggatttggtgaacccacctggactgtggcgatgcgcgttcggagtgcatggtgtcggcctcggtgggcgccgtggaggaggcgctggacgagggacggtggtacggcggcttgttgatggggctgggacactcggaggacttggagccatctcgcaggacggaaccgcgctgttcctgctcggaatacggactgcggactatagccctctt

SEQ ID NO: 40142 - DNA, 784 bp, DROSOPHILA
atgaacgccaacaaggaggcggcaaagcagcgcaaacgtaaaacactcaagatggcactggagaagtgcatgcagcgacgggacgcaatggtggcggagaccaccacgggggcaggaggagatggggcagaggcaggaggggagtcgggcgaggcagtcgacggggcaggatcggaagagggagccggttcagagggcactgaaccgctcacctacgagcagcagcagcagcgaatgcaccaggagctgacgcagcagatcagggcggccatggcggcggaacaggccgccgaggcgatggattcgaccatgaacaccacggtcaacaccaccacgacgaccacaaccacaacgaacaccactggcgccaccagtgatggttgcagtgacgcggaggccagcgatggtagcgatcgacccatggaagtggacgaggaccagccaccggagccacagccaggatctgagctcgttgtagtggagcccaagatcgaggtgctttcggagtccgaggacgaggaggatcgactgcacatgtccgaagccgaaccggatatccaggccgaggccatttacgatcacatgcccaacacgcccaccagccccccacatataataccgcccaacgatacgcccactctgacctccacgcccaaggtcaatgtggagcaataggatgaggagaaacgaggagatgcccccagaggatgccccccaaagaagctgcttagatttaggctaagaatcgatgaaacgacggagtgaaagatagacgagtgattta

SEQ ID NO: 40143 - protein, 224 aa, DROSOPHILA
MNANKEAAKQRKRKTLKMALEKCMQRRDAMVAETTTGAGGDGAEAGGESGEAVDGAGSEEGAGSEGTEPLTYEQQQQRMHQELTQQIRAAMAAEQAAEAMDSTMNTTVNTTTTTTTTTNTTGATSDGCSDAEASDGSDRPMEVDEDQPPEPQPGSELVVVEPKIEVLSESEDEEDRLHMSEAEPDIQAEAIYDHMPNTPTSPPHIIPPNDTPTLTSTPKVNVEQ

SEQ ID NO: 40144 - DNA, 1760 bp, DROSOPHILA
ctctgattctgttcaactaaataacaaggtcaatgcgtgcaatcaacaagcgttttactaaaatcactgaaagaaatgtattatttattattattacttgattattgtcaaaactgtgacttaaaactgtaactacctcctaagtacctcagtaacctttcagctaacccatgacaaggagaatcaagagggttaaagaaatacacggatcatccagatgatcaaagctggcattcctttgatggtttaaaccagtaccaagttggcaaaaaatcggaatatattgacaagatttgtcaccaataaaaactctgtggacagccttcgtcttatgaaaaagaaaatatagtcgtaagcctagctcaatagtattgtgaagttatagggcaagctttagagataacgaaattgctgtatttagtcgattttagtatgttcctgttttttcacatatttttaattttttaaatttctatcgatttgccaaaaactttttgccacgcccactctaacgccctaaagctgtcaaaccggtcaaccacacactttagagcaatttaaaaaacatttctcattttattccccaatattaattggggaatgcattcaagctttcgctgcatcaatttcgctgcatcaatattaattggggaatgcattcaagctttcgctgcatctttgtctctagaatttgaatgctgaatatcaaccttctagttcatatatttcctccaatctcgacgttcatacggacagagtgatatgactagatcgaatcggctattgatcctgatcaaggatatacatatatacttaatatagacggaaacgctttattctgcctgtaacatacttttcaacggatctagtatacccctttactctaagagtaacgggtaaaaatatttgtaaacataagtgtcaattaatcgaactaattaataataggtcttaaagtttcataaatattctctagctttaacagagtatttgaacttacctgagtcaaagttaggagattcactatcgtctaatatttcaattatgtgatccatgtttcgaataaattgttgatatgtttgcgaacgggtgacttcctccttcacacactttgtgttcgaaagaggtgtaattctttcgacccgacgcattttaggctttgaaactctatcctatgatcagtactcaggcaaattaaatacggaaccattctaacagggtgaaccaaaccttgacggaggacaatctgtattactttgacagcccataaccgaactgtgtcatcccgattaagaaagcattcaagaatttcttctaaatatagttgaattattcgacttgccatgccagacgaaacgtcgttcatttccttaagatcttcgtgttttgattgtttttcccctgtaatcattaaatatgaaagtttatttatacaaaagattttctatataatattattcttaataacgtagaactccatagattgtaagattttattgtttccgtatgcgtacagtagattcgttgaaatatatgtatgtacgtaaaaaatttacgaaactaacatagttttggtcggttttagggcgttaaagcgggtgtggcaaaaactttgttcttacaaatcgatataaattttcaatactaataaaagtgagaaaaaatatcaacacagttttgtgcgatttgtgggtgctagtggttgtggcactatgggtcaacaaacttgcgctgcgtctttgtctctagaatctgtatgt

SEQ ID NO: 40145 - DNA, 8091 bp, DROSOPHILA
gtatttaattaaaacgcaaaggagaaccggagtaattcgtttatattgaactgtggcaattcgttaataattgttgatcgcaataacataacggtaaatggtaatgctaccgcaatttttttaactacctcctagaatcaaagttgtgttgtaatctatcggattatccttacatttaatatgggggaacgtgacaacccaaccgtacctgtaacaacattagctggtttaaccagcacttctgatttgctaagcgagctaccagtggcggattcgctccagagtgctgcgtccttaaataaatctttattgttccatgctttggtagctaacgagtctagcaatttactttctatgcgaaacgaaaatctagttcgacaattggtaactgccattgagagaacaaactccgataatatagagttaatacattgcccagttcaagacacagcaactaactgtagtacttatcctgagcttctccagggaatatatcattttcgcccagcggtttttaacacttccataaaaatacactctccggaccaacatactgctaatgctcgattagaggcaaagaaaatgcaaattgattcctattcaataccggaatgttatgcatcaccaacaaatttgtcgatttcaaatgaacatcaattgcaagacgctcaagcctgcttcaatcagcttactagtatgacctcaaaagaaatcttagaagaattttcacaaataaattttaaggaaaatgcaacagaaaaagataaaattgacgttattgaaaattcagatttaaatgtgactaagatactttcacaaaatactctaaaaaaaaagtctaacacaccagaaagaagtacggtgcaatcaatacaagaacagttttttattcagcaacaagaagccaattataatttaaaacatgatttaaaccaagtatcaacaaatgttggtcaaattcaaaatatttctgatacttttccccaagagccgtcaaattttaatttaaattctgtaaatatcccaaacatgttatatgtacaaagtccacctttcactgaatcagaaccaactcaagcacaccactcttcaattgaatatttaaaaaaaaaaaaatcacaaattcttgacgtcagcattttaaatcgacaacaggtgttagaaaataccagcttacatattattaataaaagttcaacgtaccaaacgaaccaaaatgtatcaacaactacatcgacatctacttcctcaagtggcaagtcccaggtccggtcaccagaattggctagaagcatggggttactacaagaaacgtgccagcagcaacatgaaaacttgaatattatacccacgagtgcggaagaatgtgtattagagagtcgtgcttccagtacaaataatacagtcaaaatccctattgatacattttctactataaaagccgatgaaaaacgatccgcgaaaagaaaacttgccatatcaattggtgacatcccaccggaacaaatattttcaaagcctaaaatgcgtcgggtcgaaagaattacacctctttcgaacacaaagtgtgtgaaggaggaagtcacccgttcgcaaacatatcaacaatttattcgaaacatggatcacataattgaaatattagacgatagtgaatctcctaactttgactcagaggatgtagacgaaaccattgaatgcatttcctcaaaacttttaaattcaatgagtactgatgttgccaagttaaaagctaagcaggctttagattcaataccaaaaaataagttaaccctacttattaactatgcaatgcgaaacgtgtacttagcccggaattattttgctggaacggaggacgaagatgaatttgtagatgatgaagttattgaaaaattacttaacgcaatggatgcttgcttgcttatatgtaacatttattctacagtaagcgaccttcagttcttacaagaagataacgtatcacacattataaaatttacgcaatttcaactgcgtgaaacaatttttcctcttcatgacccggtttacacggcaaaaagtataaaaaggacaactcatcgtaaaaaaataaaatcacaccaagctcaaaatcgaagtatgcagctattctacttgaaaactgtagagctattaaaagtttttgttacactttttgacaaatgtgtatttgttgatactatagttttaccattgtcgacactggctattgaaccattttttgttgacaacatagagacgttgcaatttgtatgtttggaactcgttaccacaatttttcgcaaggaaagatatgataaaataagaaacagtatcttaggcgacattttgacatctattgatcggttaccttcatcaaaaaaaaatctccgcccatataaactcacaaacaatggcggaaatattcaaatggttacagcacttgtattgcaattgattcaatgcgccacgattttaccagattccctttgtgataatggcaaatttagtaacaaaccccaagagggaaatacttttgatgaagaaggaaaaaaattgcttcagcctagtcaggatctactcgttttacaaaaatatgatgtagctgtcagcattggtggaaattttttaacaactttccttaacaaatgcaaatctcggtctaatgaaactgattttcgacctctgtttgaaaattttattcatgatttactggccaccgtgaataagcctgaatggcctgcatctgaattgttgctttcgctgttgggaactatgctggttcgctacgtttctgataagggtatagaacaaagcattcgcttggtatcattggattacctgggcatagtagctgctcgattgcgaaaagacacagtggaatctcggtgtagagttaacattattgattcaatgattcaatccatcaaattagagcaagaaaaggagggagatgtaacatcaaacaatgatcaatttgatctagaacccgaggagcagcgaacggattttttgcaaaagattcttctcgactttctagctgtaaatgctcaagaagaaaacttaatctgggactatgctagacatttttatttggcacaatggtatcgggatgtcatatatcaaagacgtcggataaatgatggcaaaaaaggtttggctttcaggaagtccaaaattcgtaataatcggaggactaatggtgattatttagatacgtcggattctggatcgtgcgatgaaagtgataccgatacaaacaaaaagagaattcactgtgtggacagcaatgatttcgaactaaatattaacatctataaggctttagaagcaagaaagcaatattttatcaacaaaattaagccattttcagtttttggcgagcaaaaccactcgtcaaatcaacacatcaaaacatacatagattataataacgcacagttaatagcacaatatctggccaccaaaaggcccttcagtcaatcttttgatggatgcttaaagaaaattatattagttgttaatgagccatctatagcagtaaggacacgtgcaatgaaatgtcttgccaacatagtggaagttgatccattggttctaaaacgaaaagatatgcaaatgggagttaatcagaaattcctagacacagctatttcggtacgagaagctgcagtagatttggttggaaaatttgttctaagtaatcaagatctaatcgatcagtattacgatatgctgtctactcgtattttggatactggtgtctccgtacggaaaagggtcattaaaattttgagagatatttgtttagaatatccagacttttcaaaaattcccgaaatttgcgttaaaatgattcgacgtgttcatgacgaagaaggcatacaaaaacttgtcactgaagtttttatgaagatgtggtttacaccttgtactaaaaacgacaaaattggaatacaaaggaaaataaatcatataattgacgtggtaaatactgcacatgatactggaactacttggttagagggccttctaatgagtatatttaagccaagagataatatgctaaggtctgaaggatgcgttcaagaatttattaagaagaactcagagccaccaatggatattgtgatagcttgtcaacaattagccgacggactagttgacagactaattgaattggaagatacagataactcgcgaatgctgggttgtattaccacacttcatttactggctaaagtgcggccccaactgcttgttaagcatgctataacaattgaaccatatctcaacataaaatgtcattctgccacagccgccaagttcatatgtgcagttgcagatattctcgaaaaagtagttcctctggttaataatgccagtgaatcctttttagcatcgttggaagagcatttaatgttattggttgtttcacgaaatcaagccgaagttactagctgtgtttcttgcttgggagcacttgtgaataagattacacataactttaaattgatccgcgactgttttcaaaaattttatcgggttcttgatgtgtctcgaagtcaagtaatacaaggaaataacagcgtagataatatatacactcccagctttcggcgaagtttgtttacgatcggaatactaatgcgatatttcgactttaagtctcctattgcgttaggtgaaacaaatgatggacttcctgtttctatatgtgaggatgtattccattgcttgatgttcttctgccgttgtactaatcaagaaattcgaaagcaagcacttatttcgcttggatcattttgtgtactaaacgatggctaccttacaagatccgaacttaaaaatttgtattgcgaaattttaagttcaatagccaacgacgccggctttaaaataatctgcatgcgaaatatttggatttatctaacggaatctgaaatgtttatgcacaataaggaaaaagaatgggaaaaacaatcaaaacacgaagatcttaaggaaatgaacgacgtttcgtctggcatggcaagtcgaataattcaactatatttagaagaaattcttgaatgctttcttaatcgggatgacacagttcggttatgggctgtcaaagtaatacagattgtcctccgtcaaggtttggttcaccctgttagaatggttccgtatttaatttgcctgagtactgatcataggatagagtctgctcatcgagctgatgccctgttgaaagatattgataaaacatactctggatttgttaatatgaaagtgcaattcgggctacagctttgctttaagctacaaaaaattttacaaataaacaacagagggaaactggaaataattagaggttatgcgagtcgtggaccagataatacaactaccgctttaaacgattttctgtatacacttcttcgcactactaaaccgcaaaggcgtgctttggtgcaaacagttacaaaacagtttgacgatcagaaaacatcattacaacaaatgttatatattgcagataacctggcttactttccatatgtagttcaagatgaacctttatatctaatccatcaaatagatcttctaatttctatggctggaacacatttacttgctacattcaaggaacatataaaaccaagcgacaaggaaggagatgttttagaagatgatgatgacgtagaagatccagaggtgttgtttaatagattgcccgaagatttgacggaaattattaaatgtataacatctgctcaagcatgtatgcttcttttaatactgaaagatcatctgaaggaaatgtatgcgattactgacagtaaaatttcaagatattcaccttccgaacaaaaattatatgaaaaagccgtaacacgtaaaagtgttaatgattttaacccaaaaacgactattgatgttataaagaaacaaatgtcgcaagagaaattgagtacggacattaattttacactgactaaagaggagaaattggaccttgttgttaaataccttgattttaagcaactgatgcttaaattggatccggatgatggagactccgatgctgatgaatcccgcgacaaaacaatgttaaatatctctgcttcttcggatggagtggcattctctagttcagcaaaaaattctcactccgcttgtgatggatactcactaacagtcacggatgtggttgatgtcccaatgtctcatattgcgaaggcatctatgttgacttcaaaacctagtggtcgcaaaacaaatcctgtgcgaactaaaaaaaaaagaagaaaaattgattctacggatgatgaaaccagtgatgcggaatatgcctgagtgaacaattataattttgtgtattgaataacatttaaaattttctttttagtacataagaagaagtcgaagctaagcaacaataaaattacatgtatattacaagacaaaaacaaaaaagataaaaatgaattgcattagtttgtaataacttgatgaataaaataattattcctcttctatgccatacaatatgtttttatataagaaaaaaatatatatgtgggtttttattattaatacttttaagtgtttatggatcaattatttaagaacaccatcgtcttgtcgctcttctcttctgtttcatactagtggggagtgggtaaacagacaaagaccaatcccatatatatttatacacaatcaaataaggtaaaaaaaaacgcttggctattgtccaatgatttgtccaattataataaattcaaagtaatttaaaatttataaatgtggttttgagaaaacttcatgtatataaaacgaaatgagcatttaggttttttaagacctaaattaataaaattattaaaataattcataaaaaagcaaaaaatataagcaggggtgccacagaatgcacttgcgcttcaatttcaaaaaatttcaatccaccgactatttggcggaacccgaaagcactaattacatccataaaacgcacgtgaattgctacaaatctttatatatatatatcataatataataatgatattccaaataataatattaataatgatattaatataataataatattcctaatgatattaatcattaggaattagtgtcactgcagccacagtgacaccgcagtcgcgacagattatcgttaaagtagatggtcggtcggctaaagaactcttcgttggatttcaatggccgccacccgatcatctcaccgaagggtcagccaatcaatatggccacgctcttagcttagctcgattccaatattgtcctattggtctaagagggtctcgatggatctcatgcgtttgaagttactggcaccgactttagtggaccatatttctacaagctcttccgtacacccgctgtgttaagatcattagattttgaaaattcacctatgaaacagccagagtctgatgcaaaaggaggggcacttcccatttaagtcagactgaatgcaacaaagaaaatgcagttcgacagcggttgtaattgtgcaaatgaaaattctactccagtaattggcaaagttcatcggttgggcattgacttccaaaattggagaaatgaccgaagtagtccagagaaagccctagcccggtataaaaaacctcagcccactatagataaagatttcgtgtccagggtgaaggggttatagttatagaagtccaactattatagagagaggtcctgcacaaaatccggggatttaagaatccaccatatgtagtgcaccgttgcccggtggtaaattctaattctttccggggacaaggacactaatacgccgacgcaaaaaagccttaggccacccactctgttggccatctcgtcggatcggccaccaagggcggtcttggcgatgaccgggccactgaagatgtcaagtctacctaccgcctctgcttcaacaattgctccacttggcagccacgacgaattcaaattctgtgacgcacgggaaatactgctgttggccgccataatgtcgtctgcattgggaatagttcccctacaacattagccaggacaccagggtccgatctcttc

SEQ ID NO: 40146 - protein, 2053 aa, DROSOPHILA
MGERDNPTVPVTTLAGLTSTSDLLSELPVADSLQSAASLNKSLLFHALVANESSNLLSMRNENLVRQLVTAIERTNSDNIELIHCPVQDTATNCSTYPELLQGIYHFRPAVFNTSIKIHSPDQHTANARLEAKKMQIDSYSIPECYASPTNLSISNEHQLQDAQACFNQLTSMTSKEILEEFSQINFKENATEKDKIDVIENSDLNVTKILSQNTLKKKSNTPERSTVQSIQEQFFIQQQEANYNLKHDLNQVSTNVGQIQNISDTFPQEPSNFNLNSVNIPNMLYVQSPPFTESEPTQAHHSSIEYLKKKKSQILDVSILNRQQVLENTSLHIINKSSTYQTNQNVSTTTSTSTSSSGKSQVRSPELARSMGLLQETCQQQHENLNIIPTSAEECVLESRASSTNNTVKIPIDTFSTIKADEKRSAKRKLAISIGDIPPEQIFSKPKMRRVERITPLSNTKCVKEEVTRSQTYQQFIRNMDHIIEILDDSESPNFDSEDVDETIECISSKLLNSMSTDVAKLKAKQALDSIPKNKLTLLINYAMRNVYLARNYFAGTEDEDEFVDDEVIEKLLNAMDACLLICNIYSTVSDLQFLQEDNVSHIIKFTQFQLRETIFPLHDPVYTAKSIKRTTHRKKIKSHQAQNRSMQLFYLKTVELLKVFVTLFDKCVFVDTIVLPLSTLAIEPFFVDNIETLQFVCLELVTTIFRKERYDKIRNSILGDILTSIDRLPSSKKNLRPYKLTNNGGNIQMVTALVLQLIQCATILPDSLCDNGKFSNKPQEGNTFDEEGKKLLQPSQDLLVLQKYDVAVSIGGNFLTTFLNKCKSRSNETDFRPLFENFIHDLLATVNKPEWPASELLLSLLGTMLVRYVSDKGIEQSIRLVSLDYLGIVAARLRKDTVESRCRVNIIDSMIQSIKLEQEKEGDVTSNNDQFDLEPEEQRTDFLQKILLDFLAVNAQEENLIWDYARHFYLAQWYRDVIYQRRRINDGKKGLAFRKSKIRNNRRTNGDYLDTSDSGSCDESDTDTNKKRIHCVDSNDFELNINIYKALEARKQYFINKIKPFSVFGEQNHSSNQHIKTYIDYNNAQLIAQYLATKRPFSQSFDGCLKKIILVVNEPSIAVRTRAMKCLANIVEVDPLVLKRKDMQMGVNQKFLDTAISVREAAVDLVGKFVLSNQDLIDQYYDMLSTRILDTGVSVRKRVIKILRDICLEYPDFSKIPEICVKMIRRVHDEEGIQKLVTEVFMKMWFTPCTKNDKIGIQRKINHIIDVVNTAHDTGTTWLEGLLMSIFKPRDNMLRSEGCVQEFIKKNSEPPMDIVIACQQLADGLVDRLIELEDTDNSRMLGCITTLHLLAKVRPQLLVKHAITIEPYLNIKCHSATAAKFICAVADILEKVVPLVNNASESFLASLEEHLMLLVVSRNQAEVTSCVSCLGALVNKITHNFKLIRDCFQKFYRVLDVSRSQVIQGNNSVDNIYTPSFRRSLFTIGILMRYFDFKSPIALGETNDGLPVSICEDVFHCLMFFCRCTNQEIRKQALISLGSFCVLNDGYLTRSELKNLYCEILSSIANDAGFKIICMRNIWIYLTESEMFMHNKEKEWEKQSKHEDLKEMNDVSSGMASRIIQLYLEEILECFLNRDDTVRLWAVKVIQIVLRQGLVHPVRMVPYLICLSTDHRIESAHRADALLKDIDKTYSGFVNMKVQFGLQLCFKLQKILQINNRGKLEIIRGYASRGPDNTTTALNDFLYTLLRTTKPQRRALVQTVTKQFDDQKTSLQQMLYIADNLAYFPYVVQDEPLYLIHQIDLLISMAGTHLLATFKEHIKPSDKEGDVLEDDDDVEDPEVLFNRLPEDLTEIIKCITSAQACMLLLILKDHLKEMYAITDSKISRYSPSEQKLYEKAVTRKSVNDFNPKTTIDVIKKQMSQEKLSTDINFTLTKEEKLDLVVKYLDFKQLMLKLDPDDGDSDADESRDKTMLNISASSDGVAFSSSAKNSHSACDGYSLTVTDVVDVPMSHIAKASMLTSKPSGRKTNPVRTKKKRRKIDSTDDETSDAEYA

SEQ ID NO: 40147 - DNA, 3707 bp, DROSOPHILA
tgaaataaacaaatatttacatttacatataaccagtataaacatccgaaaacctgcagccttcatagatcaacatcggagccgtatagcaagcaggagcaacggatcactatacccgatgagggagctgattccctggacagcagtgcaaagccaacgccgccagatagttcaagtaactaaaaattagatctattctatttatagtattattttcgtaaaagttttagactacttgcctagcgaatgggaacataaataaaacgttaaatcattatattggctttttttgtttctatatttttttaatttcctttttataactatgaattaaatgtatatcgacagattagagaattcttattttaaaaaatatgatacgtgttgtgaaagcatttaaaagttagattattctaaacacaaactatctcccatttagttatattaatcgatgagtacgaggacttcgaggaggaggatcttaactgtgagggtgaaatggatcatttccccacttgggagatcgacagtgatattggcgtagaagtcgatgtggacgcggatgccgatggcgactgtgatgagtccaccgaggacacggcgctgctgcagtgtgccacgcgcaccgccattgttataacaccaattagcccagtaagtcttggaagatttgtttcatttcgttaagaatctttttaaaacaagttaataacaatttcaggtaagctccgcacacaatcttcagcaattaaatgaccaaactacaacgcttaataaatcaaatttgcttccgccagactctggctagttaattgcaattgaaattagctaaagtagccattacattatcactagaattatatattatatactatggaatgcatattaatgtcattttgggacatcatttgtgttcaattaattggtagcaaacaaatgaaaatcaaactaaataaatctgttttagcagcaaatcttacattaccgaaatgtaccagccttaattctgtgtgtcctcatctggtatctcgtcaataaaatcgtccgcctcctcgtcatcatcttccatcactatgtcatccccatctgcttcctctataaactcattattttcatttaggcggcgctttttagatgtggatggcgcatcatcggtgatgtattcgtcctcctcaaccacatcctcctggagcaaaatgatgccatcgtgaatctttcggacatgcacattcaactgggaactgtttacaaaagtccgtccacagccgccgtcgaaatagtcgcggcacgtgtatttatcaccatgggctcgctgcatgtgcgtcttcaatccttgactgcgtccaaacctctttttacacacgttgcactcgaacgcgaatcgcttgtagtgctgaccaagaacatgaacagaaagggactttttgttcctggtggtgaaactgcactgttcgcagctgtaagactgcccatgaagctgcaggaaatatgctattaatatgaaccgtttgtggatccgtctactgcactgaccttttgatgagcttccatttcactcttgtgataaaagcccttttgacagacactgcaggaatagcgcttcttattcgaatgcaccacattgacatgagtgtcataatttcgtcggtttttgacgattttaaagcactcaggacactctattggttcatgccaataggcatggtgcttggccagagcatcatggcttttgtacgaagaattgcataacggacaagtgacgttgtcttaaatataaaattatttattaaaagaagaacatattataaagcacaccatacttaccattgttatgactccttgccacatgaacagacaaggacatctttgaccggcattcctttaagcaaaactggcaaacccattcctgggcagactttgaactcttctcggcctgcttgctcgcggattcgtgtgtgcgccgcttgtgtgtgtacaaggagttccagttcacgtaagactctgtgcagttctgaaaggagaggaaataatgttatgatcaaacgttctgtgaccaaacgcaggacaactcacttcctggtcgcacatgtagtaaacacatatttctagcctgcgatgtgttgagtccgatcgaagttgttgatagttgcgcaggtgatggcgataaagtttcatatgtgggaattctttgccgcagggctgacacaaaaacactccatctttatgtaccccggaatcgcgatgggcttgaagacagtccttttccttgaagtacgaggaacagtactcgcacacataagcatcccgtaggagttccacgtctatcttcgagccaaaacaggctgtcttcacggaatttacatgggctaggagggtttcgcggctatcacttaatagaccgcaggtgctgcacacgtgcacatctttttcgatgatcagatgcttcttcatgtgaatattgtaagtagcttcggtggcaaattcccgggaacaaagttcacagcttattacactgccgtgcatggctctctgaaagaaggatttcaattacttcctgtaccacaaagcgtattcgaaggatttgatgtttagattcatgccctaccatgtgtccatttagccggccccgcgactcaaagttggccatacattcgctgcaagagtaggtcgtgctgctaacattggcatgcgacttattgtgctccataaaaacggaggggtcccggaaagtgcggtcgcaactaggggataaataattaatataaatgtcttaacaagcatttgtaatactaacaggtcgcagaataaggtgcccactggctcatgagaataatttaaatgctgaaaaagttcatctatgttcgtggtggcatagtcacagacgaagcaagctcttggtctgtgcttttctaagtgaaactggctgtggaaattaaaactgtaaagaaatataagtattattagtattggtttggttaactttagagagaataaacataccgcttccaggaaggaaactccagcgaacacatttcacaataagagcgaaaacctcgcttcttttttattacatgcgcgcaagaatgcttgttgtactgcagaatgttggagaacgtcaatttacattccggacagctgccgtagatcggaattctaggtaatacaagcatcatatatattacacaaatatttcctttagtaaatataattactcagccactggcgcgtgcaacaaaacaagatgcatggctaggaatttgcgacctttcaactccttgttgcatccttcgatgggacactcgtagacatctctccggcttttgtgtgcctttgacaagtgactaaaaaggctctcgaatgtgggacatttcagagagcagtgcttgcacacagtgcaccactgaaatgtcagcttttcaaagctcgtcttcaccacggtggccaagtactccggaatattatcaacttcatcctctgtaaatgtaaagatatgtagaattgtgattgccttttagtttttgatattatacccactctctttgatgtccacaaagttaaacagaacaacattgctagtctctccctcgtcgatgtcatcatcgctttgactttcctcagcttgagctaccaatctagacgaacaacttatgggttttaccttaacattgtccaaatttggatccataacatctagaacaatttaagtg

SEQ ID NO: 40148 - DNA, 1455 bp, DROSOPHILA
atggagcacaataagtcgcatgccaatgttagcagcacgacctactcttgcagcgaatgtatggccaactttgagtcgcggggccggctaaatggacacatgagagccatgcacggcagtgtaataagctgtgaactttgttcccgggaatttgccaccgaagctacttacaatattcacatgaagaagcatctgatcatcgaaaaagatgtgcacgtgtgcagcacctgcggtctattaagtgatagccgcgaaaccctcctagcccatgtaaattccgtgaagacagcctgttttggctcgaagatagacgtggaactcctacgggatgcttatgtgtgcgagtactgttcctcgtacttcaaggaaaaggactgtcttcaagcccatcgcgattccggggtacataaagatggagtgtttttgtgtcagccctgcggcaaagaattcccacatatgaaactttatcgccatcacctgcgcaactatcaacaacttcgatcggactcaacacatcgcaggctagaaatatgtgtttactacatgtgcgaccaggaaaactgcacagagtcttacgtgaactggaactccttgtacacacacaagcggcgcacacacgaatccgcgagcaagcaggccgagaagagttcaaagtctgcccaggaatgggtttgccagttttgcttaaaggaatgccggtcaaagatgtccttgtctgttcatgtggcaaggagtcataacaatgacaacgtcacttgtccgttatgcaattcttcgtacaaaagccatgatgctctggccaagcaccatgcctattggcatgaaccaatagagtgtcctgagtgctttaaaatcgtcaaaaaccgacgaaattatgacactcatgtcaatgtggtgcattcgaataagaagcgctattcctgcagtgtctgtcaaaagggcttttatcacaagagtgaaatggaagctcatcaaaagcttcatgggcagtcttacagctgcgaacagtgcagtttcaccaccaggaacaaaaagtccctttctgttcatgttcttggtcagcactacaagcgattcgcgttcgagtgcaacgtgtgtaaaaagaggtttggacgcagtcaaggattgaagacgcacatgcagcgagcccatggtgataaatacacgtgccgcgactatttcgacggcggctgtggacggacttttgtaaacagttcccagttgaatgtgcatgtccgaaagattcacgatggcatcattttgctccaggaggatgtggttgaggaggacgaatacatcaccgatgatgcgccatccacatctaaaaagcgccgcctaaatgaaaataatgagtttatagaggaagcagatggggatgacatagtgatggaagatgatgacgaggaggcggacgattttattgacgagataccagatgaggacacacagaattaa

SEQ ID NO: 40149 - protein, 484 aa, DROSOPHILA
MEHNKSHANVSSTTYSCSECMANFESRGRLNGHMRAMHGSVISCELCSREFATEATYNIHMKKHLIIEKDVHVCSTCGLLSDSRETLLAHVNSVKTACFGSKIDVELLRDAYVCEYCSSYFKEKDCLQAHRDSGVHKDGVFLCQPCGKEFPHMKLYRHHLRNYQQLRSDSTHRRLEICVYYMCDQENCTESYVNWNSLYTHKRRTHESASKQAEKSSKSAQEWVCQFCLKECRSKMSLSVHVARSHNNDNVTCPLCNSSYKSHDALAKHHAYWHEPIECPECFKIVKNRRNYDTHVNVVHSNKKRYSCSVCQKGFYHKSEMEAHQKLHGQSYSCEQCSFTTRNKKSLSVHVLGQHYKRFAFECNVCKKRFGRSQGLKTHMQRAHGDKYTCRDYFDGGCGRTFVNSSQLNVHVRKIHDGIILLQEDVVEEDEYITDDAPSTSKKRRLNENNEFIEEADGDDIVMEDDDEEADDFIDEIPDEDTQN

SEQ ID NO: 40150 - DNA, 2617 bp, DROSOPHILA
caagttcaaattgctgcatgcaatttataatccggcaattagcaggatgaccgtaacacagaccctggaataatagaatagttatgtaaacaactaacgtttttcgtattatgatgcttcctggaagttttccgcctgttgctgagcagttctgacgcaattaatcggcgactggcaaatataagcgagtgagacacaaagagagtgtgagaaggagagaaagagtgtgggggcaacatgtgaccagcgtctgaagctttttcaaagtgtgtttctgatgacgttgcgacgccctccacgcgcgtattagtgagagcaaagtatgtgggttaaaaagggggtggccgcaaatggaaatgcagactacgttagataataatttcgggccttatcagaaacaacagccgactaatgcacttagcatgagcaattttaataattccgtttccgcagggagcttatcaattgtttacataacggggcaaggggacaaatattaattcacggtccataactacctacattaacccattatttcccaagcatggaaatttttgatgatataaagacgttattattttaataccttaaaaatatataatattatataagtaacgttgggaaatcaactggttaataaattttaaatttcgggtttatttattcaataatcttttgataatgtatggctgaaagtgaagcttttatcagtatctacacaatggttcattggggctaataataaatggtatcaaatatcgtataactattttttgcagtgaaaccagaatttcggactaagtacataagcaaatgatataaaatatatattgtaatcaatttatcagaatagaacaaattaattggtagcagttatgaactttgaaccatttagtagccagttttttaagtttttcaaacctaagatgtaagataacagatatattggttacccttgttttatgaaccactcattaataacaaacatttctttttacagtcgagtccgtgttaacacattaattaaccacataatccataatgggcgttcctgctggtgatgttgagaagggaaagaagctgttcgtgcagcgctgcgcccagtgccacaccgttgaggctggtggcaagcacaaggttggacccaatctgcatggtctgatcggtcgcaagaccggacaggcggccggattcgcgtacacggacgccaacaaggccaagggcatcacctggaacgaggacaccctgttcgagtacctggagaaccccaagaagtacatccccggcaccaagatgatcttcgccggtctgaagaagcccaacgagcgcggcgatctgatcgcctacctgaagtcggcgaccaagtaatggtgctgtccatcaacttacccacaaccactgcaggatgtcaaactgtattattgtgttcagtcacagtccggcacgcaaatgcagcagcagcaacaactacaactacaaatcaacatagtacagacctaaagaactacaattatgttaattataaagtttaaataggacaatttattatttaatttaaataaaaagtggaatatttaattcaaacccgatgagaattgtgacatccacaaaaaagttaaataataaaaaaagaactaaaaaatgatataaaatctgttttatgcgaggacctggtttttgtagctcgcaggtcaaaaagaataaaaaaagcttcttcagatttttgactcgggcaactcaaattaaaaataagagataccaatcatatttataaaacaattgtcctggcaatttctatcaataggtatctgttagtcgtcaaactcgactgcagcatactctttgcgtctgtcaaaaatgttgttggctgatctatataggccttactcatctgagtcgcacaaagatgaccacaaatcatcctgggttgctgcaaattccttagttcattgcgtggaggtagacatcactaaaaacatccaacaaagaaagagtcgatacgttacgcagaaacatcacaataagattgtattactgagagagaaagtagaaaactattagggtcgaaatgctctcttaatgcacattctatttggccaatcgttaaacaagaatacactggtatttttatattttttggctaatttatgtatattttcttttacactcccaaaattgtatcatacattttaataacaactttattatgcaatacatatttttcgttttaattatgcttatttgatttattttttttttaatgaaagaaatacttgataggtttatacaatatattttttgttttctttagtttcgttttttgcttagatgtggatgcgcagatgcgactatataaacgtaagaagcgcatatcatctggtttagaaaaactctgtacagcggcgcactcataaaattaagaacacaaataataataacaacaaaatatataaacaatcgaattgaatggaacaatttgtagaggatagttgcttgtatttgttctgccattacagtgaattgctttttggaatgccaacaaaaaatcgaatttttctctcaatactttctaagaactgagggcgtacacggaggtatgggctaacaaaaacttagt

SEQ ID NO: 40151 - DNA, 617 bp, DROSOPHILA
tcgagtccgtgttaacacattaattaaccacataatccataatgggcgttcctgctggtgatgttgagaagggaaagaagctgttcgtgcagcgctgcgcccagtgccacaccgttgaggctggtggcaagcacaaggttggacccaatctgcatggtctgatcggtcgcaagaccggacaggcggccggattcgcgtacacggacgccaacaaggccaagggcatcacctggaacgaggacaccctgttcgagtacctggagaaccccaagaagtacatccccggcaccaagatgatcttcgccggtctgaagaagcccaacgagcgcggcgatctgatcgcctacctgaagtcggcgaccaagtaatggtgctgtccatcaacttacccacaaccactgcaggatgtcaaactgtattattgtgttcagtcacagtccggcacgcaaatgcagcagcagcaacaactacaactacaaatcaacatagtacagacctaaagaactacaattatgttaattataaagtttaaataggacaatttattatttaatttaaataaaaagtggaatatttaattcaaacccgatgagaattgtgacatccacaaaaaagtt

SEQ ID NO: 40152 - protein, 108 aa, DROSOPHILA
MGVPAGDVEKGKKLFVQRCAQCHTVEAGGKHKVGPNLHGLIGRKTGQAAGFAYTDANKAKGITWNEDTLFEYLENPKKYIPGTKMIFAGLKKPNERGDLIAYLKSATK

SEQ ID NO: 40153 - DNA, 2985 bp, DROSOPHILA
gggagaagaaacagattaggcacggaaagcaaatggattgactgatctcatgatccttacccggccacaaacatgaacacttggtagggcgtgcgactgcgaagatattcggccagattcttgcgagtaaaatgagccgattcacgtggacttaaatcgtagccattgcgcatcttgtacaacgctatgttcttcgaaatgaattcggtaaattgctccgtgtcgcccgattcgccgacggttgaaataagcagactatccgacaccttgtggattttgttctgatctgcaatggaaattcaaggagactaacgaaatgagtcccaagccgccaagaaaatgagcaccatttgggcttaccctctttcatcactataatggatcgggcgtgggtggtgtccgccgccagcatcacgaagtcagggcccttgatacccagtagagtctccatgttgcaattatatttatactttcggggttttttaacgaaaattacaagttgtttgtgagttgccgaatgcgatgacaagcaagttaaatgcagagtggccgtatgctgggcggctaaaaataccgctattctgaaaagatactaataaatataagctaacacatatttataattttattttatatttattatttatcattttaaattaacttaattatacttaattttcaattatacctaattggtatgatattcaaatcttataagtttacttgcttactaaaattaaaattaaaattatttcaatgtttcaactttgtctaaataaaaaaaaactttatttttaataaacccatttttgtttcctttaatatgaatatgaatatttacatatacataaaaattatgttatataaattataattataaattaaattattaataaaattgaatatcttagttatatattatttttaattttaatcgcagttaatcaacacttgttgagtgcccggttataacttggccacactgttcccttgttatcatttcatttcacaattagtttacggaattcgaactattgaaactaagagccatgcaggcaccacctccggaacactgtcctggcgtcgagagcgaggaggcgggcaagggaagtgcctgttcgggctgccccaaccaaggactctgcagcgatcccaacaagaaactcgaagatcccggcaaggctttggtggtcgaatccatgaaagatgtcaaacacaagctgctgatcctgtccgggaaaggcggcgttggcaagagcacggtaaccagcttgctaacccgctatctggccagaagtaatccggacagtaacttcggcgtgcttgatatcgacatttgcggtccatcgcaaccgcgtttgatgggcgccctgggggagagtgtccaccagtctgggtacggctggtcacctgtgggaatcgaagacaacgtgtgtctgatgtccatcggatttcttctgggctctgtggacgatgccattatttggcgaggacccaagaagaatggcatgatcaggcagtttctgagcgaggtggactggggaaatctggatctcctgctactggacacaccacctggaacttccgatgagcacctgtctgtggtttcgtacctgaaagacgacgccaacccggagtccctgcgcgccgtgatggtgaccactccacaggaggtgtctctgctggacgtgcgcaaggagatcaacttttgtaaaaagcaaaatatccccattgtgggcgtgatcgagaatatgagcagtttccgttgcggccattgtggaaatagctccgaaatctttccagccaaaaccggaggagccgctgccatgtgcgccgaaatgggaatcccgctgttgggctccctgcctctggatcaacagatatccaaagcctgcgattctggcgaggatttaactgagtttaagaatgtcaccactgaggcgctggaaggaatttgctcaaagattatggccagctttagttaagaataagttaaagaccactcagtttttaaataaaaaaaaagatgcctgtacaattttatgtaacatttattattaagcattgaaaggataataccaattggaaataccgattcacctgaggtcatcaaattacgtctcggtctttaccagaaattagattaccaggcagtttacaacatgcccctttacaggataagaaaacattctacaatattgaagtaggttggagttaaacattaagtatggctggggaagatggcgggcttgctagggacacatccgtggttactcttcccgtggcatctgacggttgagcagcaacctcagtggcggcctgtttcagattttgcgcgagtattgtgtccctcaccgtactttccaagggcggcgcaaatgtggtatccctccccaactcactaatcaagcggactatttgctctgacggcggcgattggctcttcttcgtgggggtatcgtcttggttctcggcagctatcgtgttatccccctcaattgttccacccacgtactggctgttagcgaccactggcgactgagtgggcagcgtaggcggatagttcagcatagtgatggagtccgtacaatcgctgaccttgtatatgcccaccaggaagttggccagctcaaacatgttgacacgaagtgaaacaattatgaactgagcgtttttcgtacgttcctaagtgaacacaacaacaattggctttaaaatgtgaatgtaaggcaagaaagcagagaggtatttaccttgatatagtgacccactatagacacattcttgaaatccagcgccgcatcaatttcatccatgaagtacagcggagagggcttgtaataatgcagggcaaacacaagtgccaatgaggagagagttttctcaccacctgagagattcgagatgtatttccagcttttctttggcggtcgcacagtaaaatttacgccctcggtgaacggatccatggagtccaccagctcc

SEQ ID NO: 40154 - DNA, 985 bp, DROSOPHILA
ttcatttcacaattagtttacggaattcgaactattgaaactaagagccatgcaggcaccacctccggaacactgtcctggcgtcgagagcgaggaggcgggcaagggaagtgcctgttcgggctgccccaaccaaggactctgcagcgatcccaacaagaaactcgaagatcccggcaaggctttggtggtcgaatccatgaaagatgtcaaacacaagctgctgatcctgtccgggaaaggcggcgttggcaagagcacggtaaccagcttgctaacccgctatctggccagaagtaatccggacagtaacttcggcgtgcttgatatcgacatttgcggtccatcgcaaccgcgtttgatgggcgccctgggggagagtgtccaccagtctgggtacggctggtcacctgtgggaatcgaagacaacgtgtgtctgatgtccatcggatttcttctgggctctgtggacgatgccattatttggcgaggacccaagaagaatggcatgatcaggcagtttctgagcgaggtggactggggaaatctggatctcctgctactggacacaccacctggaacttccgatgagcacctgtctgtggtttcgtacctgaaagacgacgccaacccggagtccctgcgcgccgtgatggtgaccactccacaggaggtgtctctgctggacgtgcgcaaggagatcaacttttgtaaaaagcaaaatatccccattgtgggcgtgatcgagaatatgagcagtttccgttgcggccattgtggaaatagctccgaaatctttccagccaaaaccggaggagccgctgccatgtgcgccgaaatgggaatcccgctgttgggctccctgcctctggatcaacagatatccaaagcctgcgattctggcgaggatttaactgagtttaagaatgtcaccactgaggcgctggaaggaatttgctcaaagattatggccagctttagttaa

SEQ ID NO: 40155 - protein, 311 aa, DROSOPHILA
MQAPPPEHCPGVESEEAGKGSACSGCPNQGLCSDPNKKLEDPGKALVVESMKDVKHKLLILSGKGGVGKSTVTSLLTRYLARSNPDSNFGVLDIDICGPSQPRLMGALGESVHQSGYGWSPVGIEDNVCLMSIGFLLGSVDDAIIWRGPKKNGMIRQFLSEVDWGNLDLLLLDTPPGTSDEHLSVVSYLKDDANPESLRAVMVTTPQEVSLLDVRKEINFCKKQNIPIVGVIENMSSFRCGHCGNSSEIFPAKTGGAAAMCAEMGIPLLGSLPLDQQISKACDSGEDLTEFKNVTTEALEGICSKIMASFS

SEQ ID NO: 40156 - DNA, 3589 bp, DROSOPHILA
ctatagtcacacatatgtatgcacatatctccaatcttgagatcgcatcttgcatttggccaacacgcgtcgcttgcccaaccgcctgagttacgatatggtgcggcacggctacgggccattgctgccgatccatgatgcaaacgcatttcaacccgtccgccgcaatgtggcacatggctgggacgcatttccaagtgggtggagctggcgttagtttcagaaagacctattacacaagtgatttgaaaaagttcaacaatttactatacttatctcaaaggtgctccatagtttacactcaattctagcaatatttatccaatattttcaatattcataatcatttccaagtttgccagtgcatataaattggaaaaatatttttaaatggcaagtcaacataattttgagtgctagtttagtgccagctgtacttcgtgactagttgtcttactattgtttccatcacgtttaaatcacggcggaagatcatctaagatcacattatggttaatataatgttaattgaggcctcgagccaatcaaaaaggtcatcgaagtccaacggtcctcggaattcaggcacttctaagcgagcaagtggcctacacacattcatatatacatatatttccttgaagtttgtccaacttttcgtttcaattgaagtagcgacgtgggttttttttttgttttttgtcgtcttgctccgtaatagttgactactattggcaactatgcgcaccacccatttcagtgcgtgattggtatccagctggaaaaaagcaaaaatatttctgcaagcggctaattttgggctgacgtgagcggtttcgtttttgggtcaatgcattaatcagtaatcagtctccttgttaattacacacggctatctcacacccagtttctttttttgtgtgcctgctttgcagacaatgatggaatagtcggcaaccaaactcggcatcgtcgctcgacctccggcgcagccagttgcatgcaagatgcacgcttctaccgcaaccccaacaggccggtccacaagatctggacgaacagcgagtgcgccaagtatttcctctgcctcgacggtgaggtgttcgaattcaagtgctccgagggattgctcttcgatgtggtgcgtcagatctgcgacttcaaggcgaatgtggacaattgcgatgtcagcgcggagacgccggctccaaaaccactactggagatggccgactgtgcggatgaataccagttgggctgcgccgatggtacctgcctgccgcaggagtacttctgcgatggttcggtagactgtcccgacggctccgacgaaggctggtgcgatgtggagcacgatccgaatgcggctggtgcctgtgatccgcgaaagtgccatttgccgcagtgcttctgctcgaaggatggcacccagatacccggcagtcttccggcacagagtgttccgcagatgatactgttgaccttcgacgatgccatcaatcacgataactgggagctgttctccaaggttttgttcacacagcacaggcgaaaccccaacgggtgtcccattaagggcacattctacgtttcacatccgtttaccaactatcagtatgtgcagaagctttggaacgatggtcacgagatcgcagtgcactcagtaacgtaagttgttgatcagcctgtaaattatttaaaattgaaatttcacttttattgattaaaggcatcgtggcccagagatgtggtggtccaagaatgccacaattgaggattggttcgatgagatggttggccaggcgaatataatcaataagttcgcagcggtacgaatggaggagattcgtggcatgagagtaccctttctgcgcgtcggctggaatcgacagtttctcatgatgaaggagtttggcttcgtgtacgattcatccatggttgcgccgcattcgaatcctcctctgtggccctacaccttggactacaagatgccgcacagctgcacgggcgtaaatcagaattgcccgtctaggagttatccgggcatttgggagctggttatgaaccaactggaagtgggcgagtatatgtgcggcatggtggacacgtgtccgccgcatttgagcggcgaggatgtgtacagaatgctcacgcacaacttcaagaggcactacctcagcaatagggcaccatttggcctgtatttccattcgacttggttcaagaaagtcgactatctgaatgcatttctggtgaatattcgaattgttacccataatactagatcttcattccttcctgatcatttagaaattcctcgacgatctgcaaaagctgccggatgtgttcttcgtgactaaccagcaggcgattcagtggatgcgccatcccacgcccagcaaccagctgcaccaattcgagtcctggcactgccaaccgaaggacttggatccccacgagcaggtctgcaacacgccgaatgtgtgcaaggtgcgtagtcgggtgctgcaagaggatcgattcttctacacttgcatggagtgtcctgcccagtatccctggattcgcaacgagttcggcttggactaaggtgatagcccgcttgacactatagggctctgcgcaaggcgctttgatatatccataatgtttggagcgttccataagtaattggataagattgatacaattttaggttttaattgtttagaaaaattaatatttataaattggattacgcatatttagatgattcagctttcaaaatctgaccgtaagcaaacccgtagataacttcgtaacatacctgaagaggataaagtgcattaatttaaaatcggaacactctgaattttatggagaagcttaaacaatttcgcgggctcataaacgtggtactttgcggcctgattagattttaagaactaatttatacgtatgtatgtctccgctaaatatatttaaaccgatttccaaaagagctttgtacttagtctacattctggaacgcatcccagccacaaaaccttggactattgcgttataaacggattggcgatgctctcgactccgtcttgcggacaaatgaggacgagggctgtgccgcgacagacgaccagtcccaggctgcgggtctgctcctcggtcagtttgtagggctcatccgagtcgcgcagatactccaccgtgttgtccagcaccagattgagcagcgcatcgtagcccttgaggattccggatgcctcgcggccgcccgcgaatttcacgcggatctgtttctccaagtacttggagaggtccagaatggactccttgcggcgcttctccttaccgtcattgttgccacccacctgacaagtcacgattttgatgattaagcaccacaatgtagttattctatttaatttacctttttatctgccattattctgtttttggtaaatgccggctggtaaagagtgaccaaagcatatttttttagaaatacaccaaataaggcgctactagccagcagatggcgctggtgaagtaatcttatgggccgcgctttttgaggtacataatcgataataatggaataaacatatgt

SEQ ID NO: 40157 - DNA, 1470 bp, DROSOPHILA
atgcaagatgcacgcttctaccgcaaccccaacaggccggtccacaagatctggacgaacagcgagtgcgccaagtatttcctctgcctcgacggtgaggtgttcgaattcaagtgctccgagggattgctcttcgatgtggtgcgtcagatctgcgacttcaaggcgaatgtggacaattgcgatgtcagcgcggagacgccggctccaaaaccactactggagatggccgactgtgcggatgaataccagttgggctgcgccgatggtacctgcctgccgcaggagtacttctgcgatggttcggtagactgtcccgacggctccgacgaaggctggtgcgatgtggagcacgatccgaatgcggctggtgcctgtgatccgcgaaagtgccatttgccgcagtgcttctgctcgaaggatggcacccagatacccggcagtcttccggcacagagtgttccgcagatgatactgttgaccttcgacgatgccatcaatcacgataactgggagctgttctccaaggttttgttcacacagcacaggcgaaaccccaacgggtgtcccattaagggcacattctacgtttcacatccgtttaccaactatcagtatgtgcagaagctttggaacgatggtcacgagatcgcagtgcactcagtaacgcatcgtggcccagagatgtggtggtccaagaatgccacaattgaggattggttcgatgagatggttggccaggcgaatataatcaataagttcgcagcggtacgaatggaggagattcgtggcatgagagtaccctttctgcgcgtcggctggaatcgacagtttctcatgatgaaggagtttggcttcgtgtacgattcatccatggttgcgccgcattcgaatcctcctctgtggccctacaccttggactacaagatgccgcacagctgcacgggcgtaaatcagaattgcccgtctaggagttatccgggcatttgggagctggttatgaaccaactggaagtgggcgagtatatgtgcggcatggtggacacgtgtccgccgcatttgagcggcgaggatgtgtacagaatgctcacgcacaacttcaagaggcactacctcagcaatagggcaccatttggcctgtatttccattcgacttggttcaagaaagtcgactatctgaatgcatttctgaaattcctcgacgatctgcaaaagctgccggatgtgttcttcgtgactaaccagcaggcgattcagtggatgcgccatcccacgcccagcaaccagctgcaccaattcgagtcctggcactgccaaccgaaggacttggatccccacgagcaggtctgcaacacgccgaatgtgtgcaaggtgcgtagtcgggtgctgcaagaggatcgattcttctacacttgcatggagtgtcctgcccagtatccctggattcgcaacgagttcggcttggactaa

SEQ ID NO: 40158 - protein, 489 aa, DROSOPHILA
MQDARFYRNPNRPVHKIWTNSECAKYFLCLDGEVFEFKCSEGLLFDVVRQICDFKANVDNCDVSAETPAPKPLLEMADCADEYQLGCADGTCLPQEYFCDGSVDCPDGSDEGWCDVEHDPNAAGACDPRKCHLPQCFCSKDGTQIPGSLPAQSVPQMILLTFDDAINHDNWELFSKVLFTQHRRNPNGCPIKGTFYVSHPFTNYQYVQKLWNDGHEIAVHSVTHRGPEMWWSKNATIEDWFDEMVGQANIINKFAAVRMEEIRGMRVPFLRVGWNRQFLMMKEFGFVYDSSMVAPHSNPPLWPYTLDYKMPHSCTGVNQNCPSRSYPGIWELVMNQLEVGEYMCGMVDTCPPHLSGEDVYRMLTHNFKRHYLSNRAPFGLYFHSTWFKKVDYLNAFLKFLDDLQKLPDVFFVTNQQAIQWMRHPTPSNQLHQFESWHCQPKDLDPHEQVCNTPNVCKVRSRVLQEDRFFYTCMECPAQYPWIRNEFGLD

SEQ ID NO: 40159 - DNA, 8024 bp, DROSOPHILA
ctgaccgtaagcaaacccgtagataacttcgtaacatacctgaagaggataaagtgcattaatttaaaatcggaacactctgaattttatggagaagcttaaacaatttcgcgggctcataaacgtggtactttgcggcctgattagattttaagaactaatttatacgtatgtatgtctccgctaaatatatttaaaccgatttccaaaagagctttgtacttagtctacattctggaacgcatcccagccacaaaaccttggactattgcgttataaacggattggcgatgctctcgactccgtcttgcggacaaatgaggacgagggctgtgccgcgacagacgaccagtcccaggctgcgggtctgctcctcggtcagtttgtagggctcatccgagtcgcgcagatactccaccgtgttgtccagcaccagattgagcagcgcatcgtagcccttgaggattccggatgcctcgcggccgcccgcgaatttcacgcggatctgtttctccaagtacttggagaggtccagaatggactccttgcggcgcttctccttaccgtcattgttgccacccacctgacaagtcacgattttgatgattaagcaccacaatgtagttattctatttaatttacctttttatctgccattattctgtttttggtaaatgccggctggtaaagagtgaccaaagcatatttttttagaaatacaccaaataaggcgctactagccagcagatggcgctggtgaagtaatcttatgggccgcgctttttgaggtacataatcgataataatggaataaacatatgtaagaattaatgttatttgaaaaatatgacaacaaagttctcttatttctactgtcatcattgtgaaattattttcttaccttttgctattgaggcgaacatatcaatttatttgtataataattattatattggtttaagatatcgataagattcatttatttgtatcgatatgctggtcactctgactggctctccattttgttttccacgacagagcaatttttagtacaacagattgttatcttctaccaattaccggatcgattttgtacatttaagtgttttaaagccaccttaggatcatgggacgcaagaagaagaaggcctccaaaccctggtgctggtatccttttcgcaaaacaaagatataaatattttttcactgcatgtgccgctcgctgtatctgcacatacacacacatttatataatggtattgggttgggggtagatacacacacacatgtatatgcatactggctacaacgccgcatccccgtgaattttccttaactcttaacgcaaaaaactaggtactgcaaccgtgagttcgatgacgaaaagatccttgtgcagcaccagaaggccaagcacttcaaatgccacatctgccacaagaagttgtacaccggacccggactatccatacactgcatgcaggtgcacaaggaaacggtggacaaggtccccaactcgctgcccaatcgctcaaatattgaagtcgaaatctttggcatggacggcattcccgccgaggatctcagggatcacgaacgtcagaagaatggtggcaagtctgattcggacgatgatgaaccggtggccaaaaagaaagtagaatgtaagtgatcagcaaactgtattgtatacaaaatcgctatacaacattcattgcagatgccatgagtgtaccgccgcctatgatgatgcccccgaacatgatgccaccgcacatgctggggcagtacggcatgggcatgatgcagcacatgccgccactgcctccgtatccagtgcccatgatgccgcacatgatgcctccgcgtcctttgtttccagccgccatggccacaacatcggcggcagctgctgcggcggcggcccatcatcaccacgccgccgccatggctcaacaaaagccaacatttccagcgtacaggttagcatcgttaggggaagaccatataagaatccttccaatttttttttctaaagctagcagttagacgtagagccctgttaataatcttttttttttaaacgattcgtatgtaaattcagttttgggggtattttaggtgaaatactttctactccaaataattgttcacattggcacatttttaatggttttcccctattaaacatagttgtgaagcaagtcaaatgacttattattaggcttaatcctaagaatttgtttttaactaacgtaaatcaattatttcttctttttgctaaagtaatgctaccataagtgctccgcctaccaccaatcatgctggtggcgcatccagcgcaccaccaagtggtccgccagatgctcagcaacaccagcagcgacctccagctccaccggcggcaagcggaacttccgctgctgctgtgaccacaaagattatgcatccacaggaggacctgagtctggaagaattgcgcgcgcgccaaccgaaaatacaagcacggttggcggccgctttggcttcactggcgaatccacaaagtcgcaagagtcccagcaacaatggtggcccctctacgtcgattcccaccactccgccgcccccgtcgctggccgggatctcgcccacgggtagcaatagcagcagtggcatggctaactcgattgtcgtctccgcagccatgtcgaaggcccaggaagtgagttcttatcatagttatagaaaccatagtcaatataaataaacagaccgtgacggaaacgacttccactgattaacaggaaatgacaagcacaacggactgaaacgaggacgtgtaaaaaagacaatttcctccaaaaaaagaaaaataatgaaagaataaatgtaattgcacataaaaaaacctgacccaatttcgactgcattttaagagaatgcattcagcattctaacagaattccatttttccaaactggacacttttatacatttactctgcgcagatcgcaaattgcgacagcggaagttacgtttagacgaccacagcgtacgagagcaaacagattacgagaatcacacaatacgaaacaacattaaaaagaaaagaaaactttttttagcatatagtatgatatatgtctgtacaatttttaattaaaaaaaattaatggcaacaaaacaaatgaaacggcggttttcaatttaattaatttgatttaaaacattttacctcaacacatagagaactcgatagaagggaaaagcaaggtttcgcattgtcttggccctaaaagtaatctccatcaatgtgatatgccaacacatgtgctagttttgtatcttaaaggtaaagcggaagcagctgaaatgcaattcacatgcccactgataaatagtgaaattctttatagcgggtgggctgatttaattggatcataggggcaggtttgaagccagcttgcttagtatgttttagaaatctatgtagtcggttccatacacgcttaggaagcgttttttacatcaagcgcaggctaaaaactcatttttaaatagggaatcttaaattagatgattactttaattcttgatatgatctagtaatttttgttcgtcaatttttgttacttcagcagcttacaatctgcaattctattttttcatttggggttcagccccgtttttttgaaacccttaagcaaatttttttgttaccacgataggtacatagagacctgactcagtcaggatacattttttttgggttgaccccgaaactacaccctcccagtggcaagtgagataaattcaatcgattccaaacattttcttacagaacgccgctctagttgccgtggcacaggcgcaggcacacgcacacgcacatgctgcccaggtgcaggcccaagcgcaagcccaggccgtggtccaagctcaggtgcaagccgcgcatgtggcacacgctgtggcagcacagcagcaggcagtacagcagcaacaggcggctcagcagcaacagcaagccgctgtgcaacagcaggcggcggtgcagcagcagcaacaacaacaacaggcggcggtgcagcagcagcaggcggcgcagcagcaggtcaaacaactggaggaactgaatcgggctgtgatgctccagcgctttcaggctgcccgacagcctgggaatcccggtgcggcagcagcggctgcggcggccgcagccgtcggcatggtaagtctctaatcatgcggtgctgcgtatgccacgcgagcaatcaaaccaaagaatgaacttgccttaacaataccgaaattccgaaattgctgagaatctcaatctgtaaaagaccacaatacaaataccgatcttgtgtcctagaatggtatcataaagccaacgacagcattttcgagtgggttaacccaataaataaagcttcgccctcatcatcatggttggtcacctattagctaatgtttacgcgattagttgggggttctaaatttacaatgatcctatagcgagataatctatggttaaccgaaacgcacactcataagactaatctgaaaatttatgttaaaaccgtcaacggatacattaaaaaaatgtgtgtatttgtaaaaaaatataactttttttttttaattttataaaggatttagtttgttaaaaaattaaaatatttaggagctgataggaaaaagaaatttgcacttctttaaaacaaattaacgttttcatcagtgtaaaaacaatcacttggctaactacaaccgcttaccaacactaccgcttaaagttcccttttcttttcgaacccattacttttgcccagcttagaaacaaggaagatcaacagtctcaactacgtctttacgccatatgtataaatctaaaaaccctattaagcttgtaaactggaaaaatatgttaaagttaccgttacaattgcagtacagagcagaagttcagtgttgataaacgataagtgttgcaaaagtgttgcgcagggtccaaaaagagttacagtatgtatggtttttgtacaagcaagtttatctcttcccccaaaacccaacctaatcactccctcaataaaactcacaccccgcaaaatgatatgtgatatacaaagtgcgcaatgcaaccagataagtaaaagccaaaaactccattataatcttacttagtcgtacttatgcaagtaattatgtagtctaagcaagtacctactctactctatctctcaatatcacatccatgcgtatataatccacaaagatcaaaccccccgaccccaaatgagtttctagtacgtactgccttgcaagtaaaacagaaaaacaattaacatttacaaatatgatagtgaatgagagaacagtcgtgagttatgtttaaactattttgcaagccatgtaagtacatttcaataatttctattacaaaaaaaaaaaagaaacaattactttgaatttgtcgtaatggttgctgcgttggttggtttaattgattgatgattgattgactggttgattgattaattcatatccacaagatatacacttgaattaagtaagacaacactccgcattgatatgtctctctctctgtttctattaacttgatacttcaccccccaatataaaaaccaaacctgaaaactacctcataagcataatatctaaatgttttatgacctgtaaattgtattaccatatatcagtgttttatgtttttccgatcacgcatttctgtctcgaaatcattcttccttcattcaaaagcattccaaattcataccatccacatccacttccattcacactaacactccattcgtctggtttaatgcgcagtacaaatgctaaaccaaggtagaggacttccggttcgcgattccttcaatttcatttacaaccgatgagcttgccgtagacctcatcctaacccactctcatcctcatcctcatccaactcttactcttagccaagtttgaaactaactttaactgaaagatattggaacttgaactcgaccccatgcctccggttagtaaatcaaattactatttctttttcttaagtgcgaatacgaataatttttttatgttgctctacctgaagtgcaactcaattattaagatacaaaaccatatatggtttgcaatgcaatcccctcacaccttcttccacaccatcgtcgtcgtcagttcagtttccgaattgtaagtacttttcattttaaatcaacaaactatttaattacaatcaaaatatattgtttttaccatggtgagaagagaagaagtctcgcctcttctctctgctctactcaatattctactctatatttcttgtctctgctctatcatacatttgtaatgcgatgcaaaaatgttttccaccaacaaaaaaccaaacacacacacacaccttatccatttattgaataagtacgcaaaaccaacttattaatattttaaatgaaaaaaaagaaaaaaaaaaaacaaaaacgaaacaacataattaataacaacttagctaattttgtgtacaatggcttcaatatagacctaactaaagtgccatcaggagtattaattcgtgatctattttccatgctcttctatatctttctctcctcatccggtcctgaacctccagatgccgctccctgggcacatgcagcttatgcagccgatgctgagaccggccatggccattggaccccatggaactctcatcggtgggaatatgcttagagccggtggccccggattacacggcatgcctgcaggtatgtgacgagatcaacgattgcttgttgtaaatggagcagcagttgctaactatctaaagatctgaatatttaaagatatacattatgattgcggtttaggtctactgccgatgcagattggactaccgggaatgccgggtgccttaccagcaggagcgatggcaatgcctggaatgggcgtgatgctgcaaggacatcccaatatgctgcaaatgatgcagccgcgctttagatgatgtctgcccgcagcgccgggtctgttgcaggcgccagcaggccagccgccaacgcacctgcaaccgcagccgcatcctcagcacgtgcagccagcccggtccttttcccggaccacggccgctctgcaggctcaggcaccactgttgagcctgccgctgccactgcttttccatgagtgaggcacggatcaagcttatgattgcaaacagcaaacagcgcgcactcagcaagcaagttcttttataaaatcaaaccaaagtcagtttttttcaatgtataacagtttttgagacacggtaccctaaaaacacacatacacacttcttggccacacgctacccactaatcagcggttatgcctagtaaacatgtcgatgtcatagatatatatatatatttccttcatctaaagcactccattttagcttttgttttaaaccaaattgcctattttttccaatccgaccttctcgatgtgcgtgcataaatacatcttttagatatatttttcgtactatttgtataacacaatgtatcacaacgctaaaccacacacacactaacaccatccatctgaagctattttgttgtgctgtagaaatctatctaatatctgtatctatatctgtataatcaacaaattaatcgttgacacataacctatacaatttgttgttttttaacattctttttctttttttttagtttcatttagtgagcatatactttaaacacatccacacccacacactctcaagttgtttaataatatctcctacaaaacaaatgaaatccgaaaagaaaaaaaccttcgaaatcacacaaaaccaaatgcaaaaccaaaaaacatgaacgctcaaagccctgggtatgttgacaattgccataagcagcatttttgtgttgtttttgtgttattcgtgcgtaattatactttcgattctttatgtccatgtgaaaagctctgcaaactgttataatgttttaaaattcataaaa

SEQ ID NO: 40160 - DNA, 1815 bp, DROSOPHILA
tcactctgactggctctccattttgttttccacgacagagcaatttttagtacaacagattgttatcttctaccaattaccggatcgattttgtacatttaagtgttttaaagccaccttaggatcatgggacgcaagaagaagaaggcctccaaaccctggtgctggtactgcaaccgtgagttcgatgacgaaaagatccttgtgcagcaccagaaggccaagcacttcaaatgccacatctgccacaagaagttgtacaccggacccggactatccatacactgcatgcaggtgcacaaggaaacggtggacaaggtccccaactcgctgcccaatcgctcaaatattgaagtcgaaatctttggcatggacggcattcccgccgaggatctcagggatcacgaacgtcagaagaatggtggcaagtctgattcggacgatgatgaaccggtggccaaaaagaaagtagaatatgccatgagtgtaccgccgcctatgatgatgcccccgaacatgatgccaccgcacatgctggggcagtacggcatgggcatgatgcagcacatgccgccactgcctccgtatccagtgcccatgatgccgcacatgatgcctccgcgtcctttgtttccagccgccatggccacaacatcggcggcagctgctgcggcggcggcccatcatcaccacgccgccgccatggctcaacaaaagccaacatttccagcgtacagtaatgctaccataagtgctccgcctaccaccaatcatgctggtggcgcatccagcgcaccaccaagtggtccgccagatgctcagcaacaccagcagcgacctccagctccaccggcggcaagcggaacttccgctgctgctgtgaccacaaagattatgcatccacaggaggacctgagtctggaagaattgcgcgcgcgccaaccgaaaatacaagcacggttggcggccgctttggcttcactggcgaatccacaaagtcgcaagagtcccagcaacaatggtggcccctctacgtcgattcccaccactccgccgcccccgtcgctggccgggatctcgcccacgggtagcaatagcagcagtggcatggctaactcgattgtcgtctccgcagccatgtcgaaggcccaggaaaacgccgctctagttgccgtggcacaggcgcaggcacacgcacacgcacatgctgcccaggtgcaggcccaagcgcaagcccaggccgtggtccaagctcaggtgcaagccgcgcatgtggcacacgctgtggcagcacagcagcaggcagtacagcagcaacaggcggctcagcagcaacagcaagccgctgtgcaacagcaggcggcggtgcagcagcagcaacaacaacaacaggcggcggtgcagcagcagcaggcggcgcagcagcaggtcaaacaactggaggaactgaatcgggctgtgatgctccagcgctttcaggctgcccgacagcctgggaatcccggtgcggcagcagcggctgcggcggccgcagccgtcggcatgatgccgctccctgggcacatgcagcttatgcagccgatgctgagaccggccatggccattggaccccatggaactctcatcggtgggaatatgcttagagccggtggccccggattacacggcatgcctgcaggtctactgccgatgcagattggactaccgggaatgccgggtgccttaccagcaggagcgatggcaatgcctggaatgggcgtgatgctgcaaggacatcccaatatgctgcaaatgatgcagccgcgctttagatga

SEQ ID NO: 40161 - protein, 562 aa, DROSOPHILA
MGRKKKKASKPWCWYCNREFDDEKILVQHQKAKHFKCHICHKKLYTGPGLSIHCMQVHKETVDKVPNSLPNRSNIEVEIFGMDGIPAEDLRDHERQKNGGKSDSDDDEPVAKKKVEYAMSVPPPMMMPPNMMPPHMLGQYGMGMMQHMPPLPPYPVPMMPHMMPPRPLFPAAMATTSAAAAAAAAHHHHAAAMAQQKPTFPAYSNATISAPPTTNHAGGASSAPPSGPPDAQQHQQRPPAPPAASGTSAAAVTTKIMHPQEDLSLEELRARQPKIQARLAAALASLANPQSRKSPSNNGGPSTSIPTTPPPPSLAGISPTGSNSSSGMANSIVVSAAMSKAQENAALVAVAQAQAHAHAHAAQVQAQAQAQAVVQAQVQAAHVAHAVAAQQQAVQQQQAAQQQQQAAVQQQAAVQQQQQQQQAAVQQQQAAQQQVKQLEELNRAVMLQRFQAARQPGNPGAAAAAAAAAAVGMMPLPGHMQLMQPMLRPAMAIGPHGTLIGGNMLRAGGPGLHGMPAGLLPMQIGLPGMPGALPAGAMAMPGMGVMLQGHPNMLQMMQPRFR

SEQ ID NO: 40162 - DNA, 5694 bp, DROSOPHILA
cataaaatcaaaaaccaacaaaattgcctatgttaaatcatttttaatgttgtcatgtaaatgaaaagatgcaagatcaaggattaaaaacaaaaaaagaatatagcattcttgtacgtaaaatgtttttaccaaaccacaaagaaagatagtatacaacagcaagttatataagcaattgtttaaattctttttaactatacaaaaagcaaacaatactattaggaaaacatataaaatgcataaaagtactatttctagtttaatgtttcgattgttctctattcttttgaaattaatttattgacattttaaataaaacaaataaaagtgaacatcatgcgttttctttcatcgattttgtttcaggttaaaactgattcataaaaagtgtgaaactgaaagctaatattattattaaagggaacttgcattcatatcttgtatggaacggccacaaaatggatgactcattgggatatccccattttaaccaaggcactcattctgtcagttagacaatcggacgaccggaacattccatgatgataaaccaacaaattaattaaaatttaatttcaaatattgatttaatacaagaaaaattactcggacatgggcttgtctaatatcttttcacatttatgggtcaatcatgaatacacagtaggcctacaagctacaagtgtgggagttttttcaggggcttgtcaatcgcggggccacagctggagattttaatggatggattagtatgtccatggtgtgggagctatgcataatatttgtgggatagcccagggagcgtgccaaaaactactttaattcatagccaacgtgctaaaccgtcttacgggctgactaattcaagttcagtcgaattccaagagagccgcttggagcgggaaccactcacgcagaccggtctccaatgggttgacttgtctggcggctcacttgacttttagtttcgtttcgagtctcgacactggcggttgtgtgctgctctttggttgatcataagaaggtgtgttaagtgccgacccgaactgttgacatttggttaagatttgtcaagtaaatcacataaacatatgtattaactccggtgatcataaaagcgaagccagggccaaacgaaagattcaagacacaaacttagaggcagccaggtgacaaggcttgcataactggagctgaccaaaaagtgtgttttcaatactctttgaaccattcacaattgtaaaaaaaaacaataaatatgtatcagcaacaaagcaaacaaaaaacacgttaagtaatggcaataaaaaaagggatagatggaaaatcccgtggccataccattaaaatccattaataatgatacaacatttgtgattacatacggctagcttagacacgcccacaataaaaaacggaaagtatatttttacagctgactcacgaaaataacttgaaaattcaccatcgagaagagtcccaaatcgaaaatacactttatttgaggaacaaacgaaagatattggcggtcactccggagtgcgcattttgaaatgctaatggttgaactgcgaggctcaacttgaaattgatgatgaggtcgagtgtttcggacaacgagttagaaaaaatgaaagataccctaaaaataaagatcgagtgaggtggtggcagtcaacttgtaaacagttggttatggagaaaggtttagtttgaagagcacttaagttgtagtagatcgttctcattttttgtttagagcaaaataaaaagcgaaaaaataaaaaagggtaaagaaaacatcggccaacttccttggccacgttctgatcttgttcgttagataatatacctcaagtctcgcttttaaccagaaattaaactttgtggtttggcaactgagtcaaagttttggccgaccaaaggcaactttcaaatgccgaagtgaaccaaagcgacataaagtgtgagtcacacggagcattagaaggccaaaaaggctggtccaaatgacataatttaagaatttatgaacattagaagaaacaaatatactgagaactaaatgtgatggaaaattaaagaaccctactcatactatgattgaaaaagtatgtaagcacttttgtatctacgatttgtttgtgcccaattcagcagtttaatgctaccatattaaatgaatcttaatttggtttttttcgagtgtttgatctggttgcgtttatggcttggacaaggccgttgcggcttaacggaagcttaaatgaatagagcagcgtttattaattgattttggtatttgcagtgaatttattggagacatgctgcgattcagattaggcctgctacttctgtgggcggtctctgccctggcgaacgacaatcttcgcgtagcgtacgagtggcgggaaatggacttcaagtacgccaatccagaccaaagatggtcggccatcgagcggggcgagttcaagccggccaatgtgataccctttggcctggaggttgccggccaccgactctttgtcaccctgcccagatggagggacggagtgccggcctcgttggcctaccttgatcttaatggtaagcgcttgagttgcattgttgcagctgccacagtacatgaatttgaatataattgccccatgcaattgcactatgtgtgccaagagctgatctgagatctcaaatctcggatctcacagctcggcaattgttttggtcgcgtctgatggcgcttctgatcaacttgaccatccgaacaattccgtttcctttcgcacttgcggcaattagcatagtaataacgctcgctgacgttattagctgtctgacatcaacagcatgccacaaatcggtgcatactagatgtatgtatttatgtgtacatatcacttggggttctgtgtgggctgcgaagtacacttgtacaataaacagtcacatttggccaatgcaagtgtatcaagtacatatagtatcaagttgttaaattatcgccgttgttttcattttgtaaaacttcttgaatagaacaaaattaacatttatttttgcacttatcgagaacttttcttatattataatctgctaattggaatattcctggcgaatcgttgtaaatataaagttacatttccttttactgctcaacagcaaggccagtgggcagttgatttagccacaactcaatcagagctcattagcaagttaatcagtttagacaattgcactgaaaagcagcagtgcgaattactcaccaacaggcaacaaatacatacatacacaaacattttgtgagcaatccaattagcaatgcaaatggccaaatttaaatacaacaaggcgaataaaatgactgctgacgagagagatcaataaaccttcaaatataatatattatatataaatatatatcaacagaatatatatacaacgaatgtaaacttatataatatattatattaatgtaaagtaatagcgttaattggtctcactttagatgattatgtcagggataaaattagttgtattaaacatgagttattgtattttattaagcgttctattttgatgtattttattcagatacctccagcaagggtccagccttgaagccattccccagctggcaggctcacaatctccaggaagccgaaccggaattggtttctccattccgcgtgcgagccgatagatgcggacgcctgtgggtgctcgactctaggatctccggagtcctggagcagaccaagatctatggagcagcccagctgctggtctacgatctgcacaatgatgatttgttgagacgacacgttttgcccgccggtcagttgaagcagggatctttactggccaatctggcggtggaggactctgactgtgagaatacctttgcctacgcagccgatttgggcagtcccggcttggtggtttactcatggaaggatgaggaatcgtggcgtgtgcagcatcacttcttccacccagatccaatggccggtaacttcagcatcaatggcattgagtttcaatgggatgatggcctatacggactggctctatcgaagcccctggaaacgggctatgccacattgtacttccatcccctctgctccactacggaattctcggtggatacatcgatattgcgtaacaagaccctggccacttcgccgatgatttatcgagaattcaaggtgctgggctccagaggaccgaacacccaggctggagccgagttcttggatccggataccggagtcctattctacgccctgcccaatctgaacgaagtcgcctgctggcgcactgccacagactttagtcacagttcccagagccgcatccacatgaacaatgataccttggtgttccccagtgacatcaaggttgatgatcagaaacgtctatgggtcctatccaatcagctacccgtcttcatctacgatgaactgtacgccggctcaataaacttccgtatcctgactgccagtgttaaggaggccattgagaatacagcctgtgaaattagaacttcccctctgccagatgtaatcaacaaactgggggatattctcaatactaacatcaaactgaagtccaattcggcttcttcccttaggaacctcagctcccttatgctgattgccttatgtttgctgatgagctttagaatctagattcccgcagcggtacaaaagtatcttgcgcacttgcgaacgaaaatgttttatgtttttcaagaacagagaacttgaaaaatttctgtaattttagcattttcactgatttcttaaacgtacgaaatatttttatttgagtgcaattgtaatctgttaagatgtaggcttagaaaacttaaacgttgtacgtgaagttgattaaatgtaagaagtgtatttgaatagttttctttatatgtacttcccacttattgcaaatccaagccagcttggttattgactcaatatttgggttgcttttccttctttttataggcaatttctacatcgatggtctcatcgctggtttgtgattgaccatcctcggagtttgcctctaactttgcctgctccttctgctgcatcctcttaatgaatccgccacagaaaaagagcatcatctgaaaggatgtcaaataccttgttactctgccagtttgaatgtggacttggtcttacatgctccagtattccaatcaatcccaggacagacaagcccagtagaaaaccaagagaaccacccacatcggctatgaattgtgtggtgtcatagctgggacgctcttcaatcatctgaaaatgttaacgggctcagtgaaagatcgatgcatcataacattattaacctaccgatatcagttttgttgtatagtatatgtagatttgggtgcgtggctctggttgattaaaggcctttctgttctgaatgaaagttgtgtatattctcgattggcagggctgaacacagtcacagtcaaagtcatcctcattttcatagacactgaaagagaaaatagaaaatacatacttacatacataataaaacactaatgcttctgtcttactctttataatccgatatcagtttcctcatggaaagggagtcattgcagggctcacttgcaatctcatgcatccaaggacccgaacactgcatattatcggctaaatcctgcca

SEQ ID NO: 40163 - DNA, 1407 bp, DROSOPHILA
tgctgctctttggttgatcataagaagagtgaatttattggagacatgctgcgattcagattaggcctgctacttctgtgggcggtctctgccctggcgaacgacaatcttcgcgtagcgtacgagtggcgggaaatggacttcaagtacgccaatccagaccaaagatggtcggccatcgagcggggcgagttcaagccggccaatgtgataccctttggcctggaggttgccggccaccgactctttgtcaccctgcccagatggagggacggagtgccggcctcgttggcctaccttgatcttaatgatacctccagcaagggtccagccttgaagccattccccagctggcaggctcacaatctccaggaagccgaaccggaattggtttctccattccgcgtgcgagccgatagatgcggacgcctgtgggtgctcgactctaggatctccggagtcctggagcagaccaagatctatggagcagcccagctgctggtctacgatctgcacaatgatgatttgttgagacgacacgttttgcccgccggtcagttgaagcagggatctttactggccaatctggcggtggaggactctgactgtgagaatacctttgcctacgcagccgatttgggcagtcccggcttggtggtttactcatggaaggatgaggaatcgtggcgtgtgcagcatcacttcttccacccagatccaatggccggtaacttcagcatcaatggcattgagtttcaatgggatgatggcctatacggactggctctatcgaagcccctggaaacgggctatgccacattgtacttccatcccctctgctccactacggaattctcggtggatacatcgatattgcgtaacaagaccctggccacttcgccgatgatttatcgagaattcaaggtgctgggctccagaggaccgaacacccaggctggagccgagttcttggatccggataccggagtcctattctacgccctgcccaatctgaacgaagtcgcctgctggcgcactgccacagactttagtcacagttcccagagccgcatccacatgaacaatgataccttggtgttccccagtgacatcaaggttgatgatcagaaacgtctatgggtcctatccaatcagctacccgtcttcatctacgatgaactgtacgccggctcaataaacttccgtatcctgactgccagtgttaaggaggccattgagaatacagcctgtgaaattagaacttcccctctgccagatgtaatcaacaaactgggggatattctcaatactaacatcaaactgaagtccaattcggcttcttcccttaggaacctcagctcccttatgctgattgccttatgtttgctgatgagctttagaatctag

SEQ ID NO: 40164 - protein, 453 aa, DROSOPHILA
MLRFRLGLLLLWAVSALANDNLRVAYEWREMDFKYANPDQRWSAIERGEFKPANVIPFGLEVAGHRLFVTLPRWRDGVPASLAYLDLNDTSSKGPALKPFPSWQAHNLQEAEPELVSPFRVRADRCGRLWVLDSRISGVLEQTKIYGAAQLLVYDLHNDDLLRRHVLPAGQLKQGSLLANLAVEDSDCENTFAYAADLGSPGLVVYSWKDEESWRVQHHFFHPDPMAGNFSINGIEFQWDDGLYGLALSKPLETGYATLYFHPLCSTTEFSVDTSILRNKTLATSPMIYREFKVLGSRGPNTQAGAEFLDPDTGVLFYALPNLNEVACWRTATDFSHSSQSRIHMNNDTLVFPSDIKVDDQKRLWVLSNQLPVFIYDELYAGSINFRILTASVKEAIENTACEIRTSPLPDVINKLGDILNTNIKLKSNSASSLRNLSSLMLIALCLLMSFRI

SEQ ID NO: 40165 - DNA, 22188 bp, DROSOPHILA
atatgttttaaaaataaccaaagacattagaaagagatcgccaatacttatacattatgtctatgtgtgccatgtggtagcatgagccaaaaagcttctcgaaattacgaattacatatagacgaatatgtatgtgactttagtttcgaaataatttcgagaattttaaaaataacgcattcgttaaaagttcgcgtcaattcgaatcgaattttcgattgtcgatttagtgtggattgtcgaaaatcgttccgccttcgaagtttactgaaaggaatcattgcgatctcgtgaattgcttgtatgagaacacgccaccatatcgagatacctgttcaaaatatcgaaatcgcgttccaaacggtagtagttaccagttgagtgagttgtggtgacagtttaacctctctacatttgtaataataagcattgttttggcgtatcaatagtctgtagattttttcacaaagaaacctggagaaatgtacacaaatatctaaatgaaaattggcgttacgtaacaaataccaacgccccgaaaatccgtatatatgcaaagcattctgatatatatatatataagtggtatacatatacatattcgtatcggatccgtgatctatatttaggcgacaacccacacaattcacttgttgtctgtttataacaaaaacaacaacacaagcaccgaccaggcctaattaactttgaggtgtgagataaaatcaaagccacacataaataaatatccggttacggtaacgggaatttcgaaagcgcgaaacgggaaaaatgttcatatttggaaatcgaaattaaatttcgaaatcctatccacgcacacacgcgtagaactgttatagtgtccgctattgctgctgctgtcaaaatgggtcaaaagcataaaatccataaaagaatcagacttcgaaacaaaattccaaaaatagtatgcttttctgagaaccatataataaatattatttttcttttgtatatttacagggaagttttgggctcacgacgcgattaacaaagaaattttgaaaagtcccaatattatttttcgagtttttaagtttctaaacgaaatttaagcaagatgccgaagccagtcgcaaatcaggaggatgaggatcccaccccatacctgttcgtgtctttggagcaaaggcgtatcgatcaatcgaaaccctatgactcgaagaagtcttgctggatccccgacgagaaggagggttatctccttggtgagatcaaggccaccaagggcgatatcgtctccgttggtctgcagggtggagaggtaaagtcatcgtctacacgaggcttcagcataaaaaaaaaaaaaaaaaagctattgaagagtcttatggtcgacctaaagtgttagtcaattgttacccaatgggaaaatcttcttggtactactactactactacaagaagggtttttcaatggatagcataagactgggactttgtcatgacctcatacacttcaatagcttataatgtagccacaaaattagaatgaaactatagatttcgcctacatatacgattaggtacgagatatcaaatccgagaaggtggaaaaagtcaatccaccaaaattcgaaaaaattgaagatatggccgacatgaccgtgcttaacactccttgcgttttgcacaatctgcgtcagcgttactatgctaagctcatctacgtaagtgttgtactgccagaaactcactaatgtatgggtatctcttctctctctctctcaatctcaaaaacgaactgctaacccaacgtctaaccaacaaatgttgtacaaaaactaaacataaccaatcgaactgaatccgacaaaccgaacgaaaatgataaacagacacgagacttaaagaaagatctgctccagcaagtgaaccccccgaaatacgaaaaagccgaggatatgtccaacttgacataccttaacgatgcctctgtgctccataacttgagacagagatactacaacaagctgatctacgtaagtaattgccgatcaagggtggcacacaagtatgcgttctatgttcttacccaaccgcttatctaccgccaatcactcacacttatgaaaaaaagaaaaacatcccaaaatttttcaaaattcgattagagctgcaactagtctccgaagctttgaagtatttaacgcaattgagtagactgctaaccttagtcattcgctcctttttcggacttatgaaactcattttattaagccctatgaaaaaaaaaacataaccccagctaattcctcatttcctgtgacgtatgcactaatccagcttgtattaaaacgaatcttggccgtccagtcggatgaaccgcacaactggaaagaaaacggttctacacacagcacacacaccacacaatcaaagccacaagaattggttctcaacgcacaatgaaagtcgagctgaaaacccccaagcagaccatcaatcattaccccaatccaaccagaaaaaaactttaaacaagtatcctgaaacatcgtagttagtttttttttttaaattacttataacacaaaaccgaacaccaaaaaactggtagaccaaaagacaaccgaaactgttactaaaaatcgtaattataagaaaaacttatttgaaactttcctctgtctatggagcgattacgagcactcggaaaactgaaaacttaaaaccgaaacagttgctaaaaactacaaaagacaactggagtggctctgaatcgcccgatacaaaaactaactttccaacgattctaacatatatgaatttatgcaaagatcttcacgatattaacaagcaacttctctcccatctttcttggccaaaaaaacagacctactccggtcttttctgcgttgccatcaatccttacaagcgttaccccgtgtataccaaccgttgcgctaagatgtaccgtggcaagcgccgtaatgaggtgccaccccatattttcgccatctctgacggtgcctacgtcgacatgttgaccaaccacgtgaatcaatctatgttgatcaccggtgagtctggtgccggaaagactgagaacaccaagaaggtcattgcgtacttcgccactgttggtgcctccaagaagaccgatgaggccgccaagagcaagggctccctggaagatcaggttgtgcagaccaaccctgtgcttgaggccttcggtaacgccaagaccgtgcgtaacgataactcctctcgtttcgtaagtagtcccgcactcgatagatcaccatgttggaactgaactaatttgaacttatccccttgcaaaccagggtaaattcatccgtatccacttcggacccactggtaaactggctggtgctgatattgagacctgtaagttgtcactttaatacgttgtgaatattgatccggatcctaatgtcatactcttaccattacagatctgctggagaaggctcgtgtcatctcccagcagtccctggagcgttcctaccacatcttctaccagatcatgtctggctccgttcccggtgttaaaggtatacaatcgtctcacttactcatccatacatccttcattcagagaatcatcgaactatctagttctttttaaatctcttttagttgtggtttaggttcaagacacacacacgaacacaaaacacaacccacacaaacccattcaaaattgatttcatagattaatcgatgtactttctatatacacactatctgtctagacatttgtctgttgaccgataacatctacgattaccacattgtctcccagggcaaggtcactgtagccagtatcgatgatgctgaggagttctccctcaccgatgtaattgccctctccttatttgattctaaatttcgtttttatattgttgattgacacttagatacttataatttatttggctaaactactactatttgatctatcgtaatctattttagagcaatttatagctagttggttaactattgcgtaccgctatcgtatcgtaaatggattaggccactcccctatatccgcttagctgtagcccaatactatgccatgaaacatcccaaggaacggatatttggatactcatagtagaaagctttcactgagacccccagccctccccccacccaacaccaaagtagtactaacccatttcatatccaactaacttagattcaaaccccttcaataagatcattattgaacaaatttctttctacctcttccacataccttccaccaaatacctcaacatacaactacacccttcataacaatcgtacaatgttgttcgcatatatatcgtgtatatgacatataaagaatactgtctgctctcgaacaacatttacgactatcgcattgtctcgcaaggcaaaacgaccatacccagcgtcaacgatggcgaggaatgggtcgccgtggatgtaaggccatacaaaaatggttacttatctgcattatcgtactacccacgaaaacataacataacccacacagtgcataactcctaacttccttctgtgttgtacactcaatgttgtccaatatgattattcatgtacatatatatatatgtacgtttttccatgtcctaaatttcatgtcctggtcttattctaaattcacaaagcttgccaagctagcaaaaaactataactcttaaccttatatagaacctaatcaacttaatccaaataatgtgacttagaccgattttatgataataggtagggttactttcacacaaaaacacatatccctttacttaagttatatgatgacatatcatcgagtctttttgttcgcgtaaattagagatggtatttctgggccaacatattggtgattatcccggcatttgccagggcaaaacacggatacccggtgtcaacgatggggaagaatttgagttaactgacgtaagttgaagtgcaggtccagtgtgtgttcccaaagcaaatcctactccagctcggaactgttgtaaaaagatatcttcttaaccagtgttacgtattcaattttttttttctttttaaactccactgatgatgtttgataatgatccgagcacgatcatattgatctttcgctctatgtagtgacggctatgacatctgtgtacatatggttaactttcaagtgttattccggaattatcttgagttactgctctctctctctatctctctctctctctatctatatattcttattagttttttttttcccacgtagtcttgcatcataatccaaaattccgcttgtaccatacacaaaaccgaagccacttaatagacccgaatccctcagctgggagcaggaatgatctctgttgacctagcactgaatctgtacagttgaaccctctctctattcgatttctcacttgacaccgggttgtaattgattgtcataaaatgattgaacgagatgaaagcctgctcctggcaaagaaaaagtgcacaaagataatgcccaagtcgaagacacatacacacacacacacactgcaaacacttcacacaccacaacacaaagcattaagcatatggcacatgtgcattgaggatgtgaaaccctaggcttagagcataagttatgttcttcttgctaaaccaaagaaaaacctcttttccaactatgtgtatgtagagatgtgcttcctctccgataacatttacgactactataacgtatcccagggtaaagtaactgtacccaacatggatgacggtgaggaattccagcttgcagatgtaagtggtcgccaaaccaagcacacactaccccaaaaacccacacaacaactgcacctcacccacacacacacacacacacacacagacacactatatagacacttttcgtatatatatatgcatccaatatcggtaatgtctgaacgacaaggaacccacgaaccgatgagctatgccaaacacaccgaaaccaacaaatatattttgagtgttttgtgattatcttttcttccatgtttttttttccgttacccaagttccgtttcaaaatccgatcccaaaaatggaacttatagagaataagaatgatggaatggcgaatgtcgcaacccttgcccgaaaaagcatcctaagaatcggtctttaagccgatgtcctgtcaatttctttgtacctgtacctaatacgaatgtcctgactacgacgattctgttttactcgactttgacttttatgcctggaatgtcattgcatcatgttatcctaagatattcataattatagatagaaaaaagagcgcgtgtgtgtgaatacccctgtaatttgtacctgcaaacgacactttgtacaaattcaagtttgtattccttgtgtctatgatagtttaagtgtgtaacggctaaagactgacccaaaagccgtcctcaccaactggttgagaaatatagcacgtaaacctcacaaaaaaaaaaaaaaacaactagtatgtcccacagaaagtttatattttcatctgccttgtttgagtttaagcaacccggcaaatcacgcgtttcccaatgattccggaatacttaagccacctggtaaacctagctatccgtagcacccgtaggtctactaaccataacgctgttcgatacgaaattatttgtagtctatagtaaaatcgttaaagcatgttgtgcatgatctactagatgtaagctacactgatccacagaaaaaaatgctcaaaaacaaacccaaaaaaataatgcctataaatgctgattaaccaaaggatgttaaatgacaccatactaaagctccgcaatttttcgccccgaaacctttataccaacagcaagccttcgacatcttgggcttcaccaagcaggagaaggaggacgtgtacaggatcaccgccgctgtcatgcacatgggtggcatgaagttcaagcaacgtggtcgcgaggagcaggctgagcaggacggcgaggaggagggtggccgtgtgtcgaagctgttcggttgcgataccgccgagctgtacaagaacttgctgaagccccgcatcaaggtcggcaacgagttcgtcacccagggccgtaacgtccagcaggtcaccaactcgatcggtgccctctgcaagggtgtgttcgatcgtctgttcaagtggctggtgaagaagtgtaacgagactctggatacccagcagaagcgtcagcacttcattggtgtactggatattgctggttttgagatcttcgaggtgagtatcggacggatcggggacttggtctgagtgaaatcctcccagggtgctcacttgtggctcactctgagggattttagtcagatgtagctggtgatgacttagcccaaatcatttttatgactgggttaccccatcaccagtcgacctgctaacacacgtctcttaaagatttagatagggattcagactccgattcagaatcactcggggaacaacatatgtaggtgcaacctatcttcgcactaaaacgcccaccaaacaacacaaagatacactgcagcactatccgtagagttaccttgatagatcactattataaattgtaaatattcccaactccaatgtagtacaacggcttcgagcaattgtgtattaacttcaccaatgagaaactgcagcagttctttaaccatatcatgttcgtcatggagcaagaggaatacaagaaggagggtattaactgggactttatcgatttcggtatggacttgctggcctgtatcgatctgattgaaaaggtgcttaatagattcaaattactccatgttttctctttgcgtactttgaattgtgtgcacatgaaaaatgcactgaattattttcgtttgttatgtcatgtcttagcactttcaatgtgaatcgaaatctgcggatgggtttccgccacagtgatctcaggtaatctgtaaaatgagtgtgttctgaatgtcagggaattttgttggcatgccccatccaagcactggttttaaatattttgaatatatactcatcccatcaatccgcaccatttccccctaaaaaaaatatgatatctagtacaacggtttcgagcaactgtgtattaacttcaccaacgagaagttgcaacaattcttcaaccatcacatgttcgttttggagcaagaagaatacaagagggaaggcattgactgggccttcatcgatttcggtatggacttgttggcctgtatcgatctgattgaaaaggttcgtctcctcccaaccaaccttcctagccaaaaattatccgccatcgctcgttgttctgtcaacatatatgaataagtttatttataaagttttcggcaccctgaatggcaaatcatctaaaactgatgatcccagttgggggtagcgtatatatacaatatttattgtttcagtcatgcggagaagtgcgcccataagcgttttctagctccattatatatatatatatatactataagcacacaaacccacatccatgtcatgcctctccagaatgaagaatccccagaaagagttcgagggaaaaccgagagtaactaacccaacgaaatcaaacattgaaagccacatccaaattaacaccgctttatctttatgttacatattgttccgttcctcgatctagtacaacggtttcgaacaattgtgcatcaatttcactaacgaaaaactgcaacaattcttcaatcatcatatgttcgttttggaacaagaagaataccaacgcgagggcatcgaatggaccttcattgatttcggcatggatctgcaattgtgtattgatctgatcgaaaaggtacagacacggccataactatctatcagagcagatagcccaagctgaccattacacaataatacacaattgcgattaaagtgcaccttgaagaatgatctaatataatataatctaatcgatattaatttccgttaacctagttataagatcgccttaagctaaacaagcaccaacagttaatgcatttgcaactttacgactcaccactaaaattgtaaggggtaagtcctatgtactaatgtgtttttgtaagtcgtcttagtgaagcgatatgccgcttacataaaatgtttaaaagttactttagtttaaatgcgtgcttttactagaaaacaaaaaaaatatgtaactagccccacagatgcatcttggaagaaactaacgagtgaatcttcgctttttcttaccactagcccatgggtatcttgtccatcctggaggaagagtctatgttccccaaggccaccgatcagaccttctcggagaagctgaccaacacccatttgggcaagtcggctccattccagaagcccaagcctccaaagcccggtcagcaggctgcccacttcgccattgcccattatgctggttgtgtgtcctacaacatcaccggttggttggagaagaacaaggatcctctgaacgacaccgttgtcgaccagttcaagaagtcgcagaacaagctgctgatcgaaatcttcgccgatcacgccggtcagtcgggtggcggtgaacaggccaagggaggtcgtggcaagaagggcggtggcttcgctaccgtctcgtcggcctacaaggagcagttgaacagcttgatgaccactctgcgttcgacccagcctcacttcgtccgttgcatcattcccaacgaaatgaagcagcctggcgtggttgatgcccacttggtcatgcaccagctgacctgtaacggtgtgcttgaaggtatccgtatttgccgtaagggcttccccaacaggatgatgtaccctgacttcaagatgcggtaagtatcggttgcaatgggttcttaggtattatatacaacataattaatacactagcacttagacacttagttcaagttcagttagagtacagcactttcggtcacttgtacatgcaccagttagatttatgagtaatctatttattatgatcgattattaacgtgtgaattgtaatactcaactatagttacatgattctggctcctgccatcatggcggccgaaaaggtggccaagaatgctgccggaaagtgcttggaagccgtcggactggatcccgatatgtaccgcattggtcacaccaaggcacgcacgcaaaaaaattttcctttttatatccaccttgtgtatgcaagcgaatgtactcactccaattgtatgactagtgtatctttcaattgaatccccacacgttgatcctcgttgtatgtaccatgtaccgtaccagaaatcaattccagtttcagtgctgtgtttaggtgtatctccgtcttaaggcttactgtgtgtatcacgattttttctgagtatggaatcaaaaacgaactctacatcctgacaggtaccagatcctgaacccccgtggcattaaggacctcgattgtcccaagaaagcctccaaggttctgattgagtccaccgagctgaacgaagacctttaccgtctgggtcacaccaaggcatgagaaagatatttatttaactaagcttaatctggcacaagaacttcaaaatttttgcaaaagcagacacttatgagtggatggctcaatagaatttttatgtagtcaataatatttgatacggtgctcaagaaaacctcaacgggagagctccccaatacaatatacccatatatacattcacactttacacacagaaaccaggttgataagtcaaaaaatgttccgggtgggaacgatggtataaatatttccatattgcagctatcaaatcctgaacccagctggcattgttggcgtcgatgatcccaaaaagtgtggatccatcattttggaatccaccgcattggatcccgatatgtatcgcattggacacaccaaggcatataaacgtttcaatccgtttagaattttcatgcattttggacttatttctttcttctgctccttcccacaattagtagatttgaaatatatccctttcacacttgacgaataccacacagctcgtattcgaatccaattctttcaatacaaaacaattgaacttcactcgtatctcaaatgccagtcagaggcgatacgagtcaaaagcatccacaaatgaaatacaaaaccaatacagcatccaacagattttaggcgccctttaggtaaacagcaacataactctactaagggcgctcagttcagcacttctctccccaatcccggaaatgatatgatatgaaatcccactccaacacgcacacacacatgtagacacgaacacctaaacactcttaaaaccccaaagcatgggttcgaaagtattattgtagaagttcctttttgaaagactttcttgttaagatcaactgtaactaacactaaggtataagctagaagtactaaaccataaatcgatacttagaatactgtagtatcatttaatgttgattatcatcatctatatgtgaccatatagctaccaaatcctgaaccccaagggtatcaagggtattgaggatcccaagaaatgcacgaaggttctgatcgagtcgaccgaactgaacgatgatcagtaccgtttgggtaacacaaaggcacgcacaatcaaacattctatatacacttgattacttcaaaaactccttttgtcaatgtctccaaaactgatgtccagacatacatttacactttgcatcaacaaactgaaaacatccatggagtcggaccatgtcgagatggaaactaagcaaaaagcttagactcttgaccggggacactctgttcgcatgtcttttttctctatctctctgtctgtataagttaatagaaggacacacacacatacatcaatccagatccttcccaaacacccaaaaatccttcccaaaagataatcccaaccccacaaccaccaaacccaaaagttcattggtgtatccgtattagtagtaacttacctagacgtaactctactatttcctagtcattagttgattaatctaaccccaccaaaaccaatacaaaattagttagtatgtatgccatcttacactaaccaaatcgtttgaaactaattaatacaataccttcaaactacaaacccccatacagctacaagatcatgtgccccaagctattgcagggcgttgagaaagacaaaaaggccactgaaattatcattaagtttatcgatttgcccgaagatcagtaccgtttgggtaacacaaaggtatatgactgacaatatatcttaaacattcattcacaaactacatcatctgcactctattgtttgaatctggacaatgtttcccagtccgcttaacttgactcaagcaccatcgaatttcacaattcgtcagggtttgattgaggtttaggccaatcggtagatattatcaagactcacttcacacttctgcacacttgcacaagatatataacttccggttctgccattcctagcccaatcatgacttttccagctgctagtacacagctttagtcaatgatttggcaagggattgtttgatctggacttctatattgactttcttggtctcatctgagtgttttcatctgcctgtattctaatcccatttgcatccgtatactaaataaatatatgttttgtttgtatgtgtgagtttatgtacctttctgttctgttcttgtttgtaccatccatccctctatctatcccagttcaacctgtccaaaagtgtttttgaagaaccgcttaagcataagcaaaaaaagaaaaaatgaaaaaatgaatgaacctacgccgtctgaatgagtttccccagaagctcccagaacagtgttggttccgcttagtgcacgcgctcttcagtagatggaaccaacagaaatctaacctattttctttccccccacccaatccaaaatctgaatacggaaaaaaaacaggtgttcttccgcgccggtgtcctgggtcagatggaggagttccgtgatgagcgtctgggcaagatcatgtcctggatgcaggcatgggcccgtggttacctgtcccgtaagggcttcaagaagctccaggaacagcgcgtcgccctcaaggttgtccagcgcaatctgcgcaagtacctgcagctccgtacctggccctggtacaaactgtggcagaaggtcaagcccctcctcaacgtcagccgcatcgaggatgagattgccgtgagtattcccccagaacgaatgagaacgagaccagcctgggtctggggacttagtggtctttggtgattcgatgcggatgaacttggacagtacagttgctggtggcaatcatttggtgaccgcaacacgttgatgtagccatagccctggtgtgtccattccatttggtcactgtctggggtaattggatgagctggggcagctgcaagcagcaatcaaatccccaactcaatcttattttagccaatggtcataaacattgtttcgatgcgaaattcttgcgcttaattaagcacacatcttaagcacctgcagcaggggcgaatgagagggagaaccaccacccacccactaccagctgcccaaacatatcgatacgatctgattccaatcgctgggctagccaaaaatagacgctgtcataatcttttcgcactttcgggccaaatgtggcctctatgtgtgtgccccaggcgaatcatttcgctggaatccaacaactcttcacctctcacattttcatacacccaaaccctcccccccatacgtacaatgtacatatgtatttaggtatgaatatttttcgaaagttatgacttatagtcttgggatctattcttggcactgccatatagctggggattttttaaagagccacaattagtttgccaattagcttgctaattaaataataaaaaatgcccgaggatgcccacgtatagttccgatccccgatgagtaatttaccatgcatatgtacatccatacgcacgatatttctaaccgatctatatatacctaagatggtacacctgctggtcccgccgcacaagtgcgacttgataggccccataccgacgcaatatagcattatagcaatgccagcaattcgtgaattatgatggctacctcctaaccaaggcgattacacacatgccaagtggcagcagctgccatttcgctgctctgctctgctctgctctggtgccgttctgctcgcatcggggcgtttttgctaattttatagccaaagtggcccagtgcatttgcagcagccattccagttgtatttgaccagtcgccgtcgcggtaacgcgtaccacaaaaaatcgaacccctaacgaagaaccaatcgatctgagcaaaagagccacattgggccacagagcatcttgactggcatcaagataacgaattcaaattgaaattgtattgtagttgacaattgtgaaaagccccttttccgagagagtttcacatttaattaggagttattgaaagtgatttatcatcaatatggccgatgaaaagaaagccaagaaaacgaaaaagtccaccgaatcgaccacacccagtgccactgaggaagcagctccagccgaagctgctccaccagcagagactgcagaagctgctcctcagcccgaatcgaccgccgtcgaaccaccaccaaatccccaaccagctgacgagatcggctccggcaacaacccttctaacccatcaaatgcctctaatgacttacagcgtctggaggagaaggccaagaaggctgaggaactgcatgccgctgaagtgaaggtgcgcaaggagctcgaggccctcaacgccaagcttttggctgagaagaccgctctgctggactccctgtccggcgagaagggtgccctgcaggactaccaggagcgcaacgccaagttgaccgcccagaagaacgacctcgagaaccagctgcgcgtaagtatcccattaatcccatacactaaatcccatttatgcgatggcataaatccaagtgccacgaaagcggaaaacgcgaaattgatcagaggcaatcgagcatgaaagttgctcggctatttctgggctctggcgcacttggctaaatttaggagtgacccatcgccaacttactcagccacttaacacgcccacacaattttgttcaattccaataggatatccaagagcgcctgactcaggaggaggatgcccgcaaccagctgttccagcagaagaagaaggccgatcaggagatctctggcctgaagaaggacatcgaggatctggaattgaacgtccagaaggccgagcaggacaaggccaccaaggatcaccagatccgcaacttgaacgacgagatcgcccaccaggatgagctcatcaacaagttgaacaaggagaagaagatgcagggagagaccaaccagaagaccggtgaggagctccaggccgccgaggacaagatcaaccacttgaacaaggttaaggccaagctcgagcagaccctcgatgaactggaggattcgctggagcgcgagaagaaggtgcgcggcgatgttgagaagtccaagcgcaaggttgagggcgacctcaagctcacccaggaggctgttgccgatctggagcgcaacaagaaggagctcgagcagaccatccagcgcaaggacaaggagctgtcctccatcaccgccaagctcgaggacgagcaggtcgttgttctgaagcaccagcgccagatcaaggaactgcaggcccgcatcgaggagctcgaggaagaggtcgaggctgagcgccaggcccgcgccaaggctgagaagcagcgcgccgatctggcccgcgaactcgaggaattgggcgagcgtctggaggaggctggcggtgccacctctgcccagattgagctcaacaagaagcgtgaggctgagttgagcaaactgcgtcgcgatcttgaggaggccaacatccagcacgagtccaccctggctaacctgcgcaagaagcacaacgatgccgtcgccgagatggccgagcaggttgatcagctcaacaagctgaaggctaagtaagtattgcgaatattattagacttctggctagctttttcaggtgccaacgctatcgagatagagagatcttgaaggatctacagtttacagtcttctttcgaagagctttggttgccgaacccaacataatagatattttgctcttttttacccatttgctaatccagggctgaacacgatcgccagacttgccacaacgagctgaatcagactcgtaccgcctgcgatcagctgggtcgcgataaggtaatatgtcgtgataactggcgcccgagcagggacgtccagcgattcatacatatacagatccatacactgaacacagcatgttccaaccaacaaataaaaaaaaaatgctaccacacaactacgtacaaacgaactacgtctgtgtgtccctctatctctctctctctctgtctaatgaaattgaaggttatttggaaaaaaggttcaacgcaaggaaagcaattctctcgcttctcgcctctgtatttgtctctgtctctgtctttatcccccacaaaacatgaactaacccgtgaaatacgaacctctgtgtctctatctatctgtctaaaccagggctgagaaggagaagaacgagtactacggccagttgaacgatctgcgcgccggtgtcgaccacattaccaacgagaaggtattgaatttgatctctacacatattattgctctcatcgcgatgctgtaaatttatatgctgaaagttctagtttagccacgtctactacatctgtgtatagtatcaacgtagttgcaacgcaaccacaccgaaactccaaaagaaaatttgattatgtaaaaactaaaacgacccaccaccactaaagtaatatccaagcttgatctactaaaccccaaatgccttgtacagccacttgacacgaaaccaaaatgccacacttacaatcaattatgaatgttcccaatccccatcgtgaaactaatgaacatccattgcttaaatcactaataggctgcccaggagaagatcgccaagcagctgcagcacaccctcaacgaggtgcagtcgaaactggacgagaccaacaggactctgaacgacttcgatgccagcaagaagaagctgtccattgagaactccgatctgctccgccagctggaggaggccgagtcccaggtgtctcagctgtccaagatcaagatctctctgaccacccagttggaggacaccaagcgtctggccgacgaggagtcgcgcgagcgtgccacccttttgggcaagttccgcaacttggagcacgacctggacaatctgcgcgagcaggttgaggaggaggctgagggcaaggccgatctgcagcgccagctgagcaaggccaacgctgaggcccaggtgtggcgcagcaagtacgagtccgatggcgttgcccgctctgaggagctggaggaagccaagaggaagctgcaggcccgtttggccgaggccgaggagaccatcgagtccctcaaccagaagtgcattggcctggagaagaccaagcagcgtctgtccaccgaggtggaggatctgcagctggaggtcgaccgtgccaacgccattgccaacgctgccgagaagaagcagaaggccttcgacaagatcatcggcgagtggaagctcaaggtcgacgatctggctgctgagctggatgcctcccagaaggagtgccgcaactactccaccgagctgttccgtcttaagggcgcctacgaggagggccaggagcagttggaggctgtgcgtcgtgagaacaagaacctggccgatgaggtcaaggatctgctcgaccagatcggtgagggtggccgcaacatccatgagatcgagaaggcccgcaagcgcctggaagccgagaaggacgagctccaggctgccctcgaggaggctgaggccgctcttgagcaggaggagaacaaggtgctccgcgctcagcttgagctgtcccaggtgcgccaggagatcgaccgccgcatccaggagaaggaggaggagttcgagaacacccgcaagaaccaccagcgtgccctcgactccatgcaggcttccctcgaagccgaggccaagggcaaggctgaggccctgcgcatgaagaagaagctggaggctgacatcaacgagcttgagattgctctggatcacgccaacaaggtaggttcaaccactgatgcctaggcacaccgaaacgactaaccctaattcttatcctttcctttaggctaacgccgaggcccagaagaacatcaagcgttaccagcagcagctgaaggacatccagactgccctcgaggaggagcagcgcgcccgcgacgatgcccgcgaacagctgggtatctccgagcgtcgtgcaaacgccctccagaacgaactggaggagtctcgcactctgctggaacaggccgaccgtggccgtcgccaggccgaacaggagctggccgatgcccacgagcagctgaacgaagtgtccgcccagaacgcctccatctccgctgccaagaggaagctggagtccgagctgcagaccctgcactccgacctggacgaactcctgaacgaagccaagaactccgaggagaaggccaagaaggctatggtcgatgccgcccgcctggccgatgagctccgcgctgagcaggatcatgcccagacccaggagaaattgaggaaggccctcgagcagcagatcaaggagctgcaggtccgtctggacgaggctgaggccaacgccctcaagggaggcaagaaggccattcagaagcttgagcagcgcgtccgcgagctcgagaacgagctggatggtgagcagaggaggcacgccgatgcccagaagaacctgcgcaagtccgagcgtcgcgtcaaggagctgagcttccagtccgaggaggaccgcaagaaccacgagcgcatgcaggatctggtcgacaagctgcaacagaagatcaagacatacaagaggcagatcgaggaggctgaggaaatcgccgccctcaacttggccaaattccgcaaggctcagcaggagcttgaggaggccgaggagcgcgccgatctggccgagcaggccatcagcaaattccgcgccaagggacgtgccggttctgtcggtcgtggtgccagcccagcggtaagttattgaacaatggcatcaaatgccttcatcatcactaccctttagcccttaagaccccacaatgaccttacccactcagagaaaaaagtaaatatgaaagcccatttgaacttctctcaatcgaacacttctgagccttcattttgctgcatcagcgccatctccattcacgttatttctggatcagttattgaataatgtgtatattcttccctttcatattgctcgcgtatgctctgcttccacttacgaaaacagatctaagcctgaggcatcaccatcgaataaaaaatctatatagcgatccaattatggttcatttacgataatgagagaacaaaaaccatgcaaagagaattatagcttataagaattattataaaataaatactaataacaataatatagatgcatcacatgacattcgctagcagacaaaaatgtataaattagaggccaccccaatcaaaaatcaatggatcaattcatcgaataccaaccaagaatgcgttcattttgacagaaaaccagacaaaaagccaaaaaaatattgcaaataaaaaagcaagcaaccaacgcagcaccaggctaaatcaatcgaaatgctttctttaccactatttacaaaaaagagaaaaaacaatactattcttccactatattattataaactgtatttgtacatgtgtactgcagccgacagcgtcaaagggccgcaagagcgcgctgctggagcagtagaaactttcttgaaacatttgtaagtggacgtgttcgtgcacgtcttgacccgttcttgttgtgtcggaactcatccctcccactcccgcacacgcacaccagtcagtcaatcaaccgcagctcatctagttgtctcgctcactcgttcgttgtcgttgctcatagtatccgtatcgtctcgctgtcgtactcgtcaagcgttctcgctccactctcattcgacacaagcaagacactctatctctcgctcgaagagcatttacgtacctcagttaccgttctttcaccgcgccactcgctggcactacaaaacgtgttcagggagtgctagtcgtactcgttatcgttctatcccgtgcagtcgatccaacatggcgacttgtcccatccccggcatgtttaaatatactaattattcttgaactaattttaatcaaccgatttatctctcttccgcagccccgtgcgacgtccgttaggccacaattcgacggattggccttcccaccaagattcgaccttgctcctgaaaacgaattctaaatgccatttcattttttaatttattttaaatgatatttcataatgattatgtttatgattttaatttaatttcttaatttaaaaacaaaataataaaactataacaaaataaatatcgaaaacgacgggaggcaaaccaccaacaacgccagatgcacttaggcaaaaaaataaaatcatataacaacaatcgatcaccatcgattagcatacataatacataagtgatcagtaacaggctattgtgtaagcgcgacatttgccatggggacactgctcgctggacctgtatttgtatttgtatttatatatttttatacaactttcgaaatgcattcaaccaactaactatgaaagaaccatcgactctcaaccgaacaacatgagaataatcgcgaaacgtgagccccgtcaaaatgaaggccccgcggaggtgtccgccggtaaatgtcgcccgcagttcgaatattttgctctatatgtactcccaatattgtttgtcatgcagaccagacaagacttacggacgacacgagctacacactgcgcttatgtttatgtttaactctgactctatctaacaatgatagggagataagatcatcacttgacactaaatgaaaagtatacaaaaaaggaacaaaataaatgtaaatcaatttaacaaatgtgtattattttccgtgatcaaatcattcgactgggacatattcattcatatttactggccatacgtgttaagaaattgtcacaggtcttttgtaaactaataagatgttgtggatatatttatttacttttacttaagccccatacaaattaagtcctactttcccgccccaggagccctgggattgggctcgatgcgcaatagttgcttgtgctggccaatcatgtgctcgatgtggttgcactcgcggagatgacccttgaactcatcgagagtctggtaaagcaccggatagagggcgggcaggaggccatgatccagggtcgggaagagatggtggagcacatggtcaccaaagtgggtgagcaccaggaactgcgaccacttgagatcaccgcggtcgataatcgtgtccacctggaagagaccccagtcacgatcctcacgattggcatcaccctcgtgatagatttccggatcgtgatgcgccgcattcagaccaatcaagcagaagctaaagctggctatcgacgtcatcgcgagccactggcgcacgcagatccaaatgcctaaagatcccccggttcccaggtatatggcaatgggtatagtcagtggcagtaggtcgtgccagtagaggatgttggtgtggcgcagcgaatagaaaatactgcaatatcaatcaatcaaaagatcactgattagactttgtttacgatcaccgcctcgatcacacactcaccgagtgcccatttgtatgaagaaggcgagggcataggccaccggctccgtgacccaggacacataacgcatcaacttgctcttgatgtgcggattgggcacccagcacagcaagggttcgaacatcgagagttccagatcgaaatacgaattcggatagatgtggtgggacagagcatgggacacacgccaggcggcaaagttcatcatgcccagattaaaggcgtacatctgccagttgtcccgacgat

SEQ ID NO: 40166 - DNA, 6968 bp, DROSOPHILA
tacagggaagttttgggctcacgacgcgattaacaaagaaattttgaaaagtcccaatattatttttcgagtttttaagtttctaaacgaaatttaagcaagatgccgaagccagtcgcaaatcaggaggatgaggatcccaccccatacctgttcgtgtctttggagcaaaggcgtatcgatcaatcgaaaccctatgactcgaagaagtcttgctggatccccgacgagaaggagggttatctccttggtgagatcaaggccaccaagggcgatatcgtctccgttggtctgcagggtggagaggtacgagatatcaaatccgagaaggtggaaaaagtcaatccaccaaaattcgaaaaaattgaagatatggccgacatgaccgtgcttaacactccttgcgttttgcacaatctgcgtcagcgttactatgctaagctcatctacacacgagacttaaagaaagatctgctccagcaagtgaaccccccgaaatacgaaaaagccgaggatatgtccaacttgacataccttaacgatgcctctgtgctccataacttgagacagagatactacaacaagctgatctacacctactccggtcttttctgcgttgccatcaatccttacaagcgttaccccgtgtataccaaccgttgcgctaagatgtaccgtggcaagcgccgtaatgaggtgccaccccatattttcgccatctctgacggtgcctacgtcgacatgttgaccaaccacgtgaatcaatctatgttgatcaccggtgagtctggtgccggaaagactgagaacaccaagaaggtcattgcgtacttcgccactgttggtgcctccaagaagaccgatgaggccgccaagagcaagggctccctggaagatcaggttgtgcagaccaaccctgtgcttgaggccttcggtaacgccaagaccgtgcgtaacgataactcctctcgtttcggtaaattcatccgtatccacttcggacccactggtaaactggctggtgctgatattgagacctatctgctggagaaggctcgtgtcatctcccagcagtccctggagcgttcctaccacatcttctaccagatcatgtctggctccgttcccggtgttaaagaatactgtctgctctcgaacaacatttacgactatcgcattgtctcgcaaggcaaaacgaccatacccagcgtcaacgatggcgaggaatgggtcgccgtggatcaagccttcgacatcttgggcttcaccaagcaggagaaggaggacgtgtacaggatcaccgccgctgtcatgcacatgggtggcatgaagttcaagcaacgtggtcgcgaggagcaggctgagcaggacggcgaggaggagggtggccgtgtgtcgaagctgttcggttgcgataccgccgagctgtacaagaacttgctgaagccccgcatcaaggtcggcaacgagttcgtcacccagggccgtaacgtccagcaggtcaccaactcgatcggtgccctctgcaagggtgtgttcgatcgtctgttcaagtggctggtgaagaagtgtaacgagactctggatacccagcagaagcgtcagcacttcattggtgtactggatattgctggttttgagatcttcgagtacaacggtttcgagcaactgtgtattaacttcaccaacgagaagttgcaacaattcttcaaccatcacatgttcgttttggagcaagaagaatacaagagggaaggcattgactgggccttcatcgatttcggtatggacttgttggcctgtatcgatctgattgaaaagtacaacggtttcgaacaattgtgcatcaatttcactaacgaaaaactgcaacaattcttcaatcatcatatgttcgttttggaacaagaagaataccaacgcgagggcatcgaatggaccttcattgatttcggcatggatctgcaattgtgtattgatctgatcgaaaagcccatgggtatcttgtccatcctggaggaagagtctatgttccccaaggccaccgatcagaccttctcggagaagctgaccaacacccatttgggcaagtcggctccattccagaagcccaagcctccaaagcccggtcagcaggctgcccacttcgccattgcccattatgctggttgtgtgtcctacaacatcaccggttggttggagaagaacaaggatcctctgaacgacaccgttgtcgaccagttcaagaagtcgcagaacaagctgctgatcgaaatcttcgccgatcacgccggtcagtcgggtggcggtgaacaggccaagggaggtcgtggcaagaagggcggtggcttcgctaccgtctcgtcggcctacaaggagcagttgaacagcttgatgaccactctgcgttcgacccagcctcacttcgtccgttgcatcattcccaacgaaatgaagcagcctggcgtggttgatgcccacttggtcatgcaccagctgacctgtaacggtgtgcttgaaggtatccgtatttgccgtaagggcttccccaacaggatgatgtaccctgacttcaagatgcgctacaagatcatgtgccccaagctattgcagggcgttgagaaagacaaaaaggccactgaaattatcattaagtttatcgatttgcccgaagatcagtaccgtttgggtaacacaaaggtgttcttccgcgccggtgtcctgggtcagatggaggagttccgtgatgagcgtctgggcaagatcatgtcctggatgcaggcatgggcccgtggttacctgtcccgtaagggcttcaagaagctccaggaacagcgcgtcgccctcaaggttgtccagcgcaatctgcgcaagtacctgcagctccgtacctggccctggtacaaactgtggcagaaggtcaagcccctcctcaacgtcagccgcatcgaggatgagattgcccgtctggaggagaaggccaagaaggctgaggaactgcatgccgctgaagtgaaggtgcgcaaggagctcgaggccctcaacgccaagcttttggctgagaagaccgctctgctggactccctgtccggcgagaagggtgccctgcaggactaccaggagcgcaacgccaagttgaccgcccagaagaacgacctcgagaaccagctgcgcgatatccaagagcgcctgactcaggaggaggatgcccgcaaccagctgttccagcagaagaagaaggccgatcaggagatctctggcctgaagaaggacatcgaggatctggaattgaacgtccagaaggccgagcaggacaaggccaccaaggatcaccagatccgcaacttgaacgacgagatcgcccaccaggatgagctcatcaacaagttgaacaaggagaagaagatgcagggagagaccaaccagaagaccggtgaggagctccaggccgccgaggacaagatcaaccacttgaacaaggttaaggccaagctcgagcagaccctcgatgaactggaggattcgctggagcgcgagaagaaggtgcgcggcgatgttgagaagtccaagcgcaaggttgagggcgacctcaagctcacccaggaggctgttgccgatctggagcgcaacaagaaggagctcgagcagaccatccagcgcaaggacaaggagctgtcctccatcaccgccaagctcgaggacgagcaggtcgttgttctgaagcaccagcgccagatcaaggaactgcaggcccgcatcgaggagctcgaggaagaggtcgaggctgagcgccaggcccgcgccaaggctgagaagcagcgcgccgatctggcccgcgaactcgaggaattgggcgagcgtctggaggaggctggcggtgccacctctgcccagattgagctcaacaagaagcgtgaggctgagttgagcaaactgcgtcgcgatcttgaggaggccaacatccagcacgagtccaccctggctaacctgcgcaagaagcacaacgatgccgtcgccgagatggccgagcaggttgatcagctcaacaagctgaaggctaaggctgaacacgatcgccagacttgccacaacgagctgaatcagactcgtaccgcctgcgatcagctgggtcgcgataaggctgcccaggagaagatcgccaagcagctgcagcacaccctcaacgaggtgcagtcgaaactggacgagaccaacaggactctgaacgacttcgatgccagcaagaagaagctgtccattgagaactccgatctgctccgccagctggaggaggccgagtcccaggtgtctcagctgtccaagatcaagatctctctgaccacccagttggaggacaccaagcgtctggccgacgaggagtcgcgcgagcgtgccacccttttgggcaagttccgcaacttggagcacgacctggacaatctgcgcgagcaggttgaggaggaggctgagggcaaggccgatctgcagcgccagctgagcaaggccaacgctgaggcccaggtgtggcgcagcaagtacgagtccgatggcgttgcccgctctgaggagctggaggaagccaagaggaagctgcaggcccgtttggccgaggccgaggagaccatcgagtccctcaaccagaagtgcattggcctggagaagaccaagcagcgtctgtccaccgaggtggaggatctgcagctggaggtcgaccgtgccaacgccattgccaacgctgccgagaagaagcagaaggccttcgacaagatcatcggcgagtggaagctcaaggtcgacgatctggctgctgagctggatgcctcccagaaggagtgccgcaactactccaccgagctgttccgtcttaagggcgcctacgaggagggccaggagcagttggaggctgtgcgtcgtgagaacaagaacctggccgatgaggtcaaggatctgctcgaccagatcggtgagggtggccgcaacatccatgagatcgagaaggcccgcaagcgcctggaagccgagaaggacgagctccaggctgccctcgaggaggctgaggccgctcttgagcaggaggagaacaaggtgctccgcgctcagcttgagctgtcccaggtgcgccaggagatcgaccgccgcatccaggagaaggaggaggagttcgagaacacccgcaagaaccaccagcgtgccctcgactccatgcaggcttccctcgaagccgaggccaagggcaaggctgaggccctgcgcatgaagaagaagctggaggctgacatcaacgagcttgagattgctctggatcacgccaacaaggctaacgccgaggcccagaagaacatcaagcgttaccagcagcagctgaaggacatccagactgccctcgaggaggagcagcgcgcccgcgacgatgcccgcgaacagctgggtatctccgagcgtcgtgcaaacgccctccagaacgaactggaggagtctcgcactctgctggaacaggccgaccgtggccgtcgccaggccgaacaggagctggccgatgcccacgagcagctgaacgaagtgtccgcccagaacgcctccatctccgctgccaagaggaagctggagtccgagctgcagaccctgcactccgacctggacgaactcctgaacgaagccaagaactccgaggagaaggccaagaaggctatggtcgatgccgcccgcctggccgatgagctccgcgctgagcaggatcatgcccagacccaggagaaattgaggaaggccctcgagcagcagatcaaggagctgcaggtccgtctggacgaggctgaggccaacgccctcaagggaggcaagaaggccattcagaagcttgagcagcgcgtccgcgagctcgagaacgagctggatggtgagcagaggaggcacgccgatgcccagaagaacctgcgcaagtccgagcgtcgcgtcaaggagctgagcttccagtccgaggaggaccgcaagaaccacgagcgcatgcaggatctggtcgacaagctgcaacagaagatcaagacatacaagaggcagatcgaggaggctgaggaaatcgccgccctcaacttggccaaattccgcaaggctcagcaggagcttgaggaggccgaggagcgcgccgatctggccgagcaggccatcagcaaattccgcgccaagggacgtgccggttctgtcggtcgtggtgccagcccagcgccccgtgcgacgtccgttaggccacaattcgacggattggccttcccaccaagattcgaccttgctcctgaaaacgaattctaaatgccatttcattttttaatttattttaaatgatatttcataatgattatgtttatgattttaatttaatttcttaatttaaaaacaaaataataaaactataacaaaataaatatcgaaaacgacgggaggcaaaccaccaacaacgccagatgcacttaggcaaaaaaataaaatcatataacaacaatcgatcaccatcgattagcatacataatacataagtgatcagtaacaggctattgtgtaagcgcgacatttgccatggggacactgctcgctggacctgtatttgtatttgtatttatatatttttatacaactttcgaaatgcattcaaccaactaactatgaaagaaccatcgactctcaaccgaacaacatgagaataatcgcgaaacgtgagccccgtcaaaatgaaggccccgcggaggtgtccgccggtaaatgtcgcccgcagttcgaatattttgctctatatgtactcccaatattgtttgtcatgcagaccagacaagacttacggacgacacgagctacacactgcgcttatgtttatgtttaactctgactctatctaacaatgatagggagataagatcatcacttgacactaaatgaaaagtatacaaaaaaggaacaaaataaatgtaaatcaattt

SEQ ID NO: 40167 - protein, 2067 aa, DROSOPHILA
MPKPVANQEDEDPTPYLFVSLEQRRIDQSKPYDSKKSCWIPDEKEGYLLGEIKATKGDIVSVGLQGGEVRDIKSEKVEKVNPPKFEKIEDMADMTVLNTPCVLHNLRQRYYAKLIYTRDLKKDLLQQVNPPKYEKAEDMSNLTYLNDASVLHNLRQRYYNKLIYTYSGLFCVAINPYKRYPVYTNRCAKMYRGKRRNEVPPHIFAISDGAYVDMLTNHVNQSMLITGESGAGKTENTKKVIAYFATVGASKKTDEAAKSKGSLEDQVVQTNPVLEAFGNAKTVRNDNSSRFGKFIRIHFGPTGKLAGADIETYLLEKARVISQQSLERSYHIFYQIMSGSVPGVKEYCLLSNNIYDYRIVSQGKTTIPSVNDGEEWVAVDQAFDILGFTKQEKEDVYRITAAVMHMGGMKFKQRGREEQAEQDGEEEGGRVSKLFGCDTAELYKNLLKPRIKVGNEFVTQGRNVQQVTNSIGALCKGVFDRLFKWLVKKCNETLDTQQKRQHFIGVLDIAGFEIFEYNGFEQLCINFTNEKLQQFFNHHMFVLEQEEYKREGIDWAFIDFGMDLLACIDLIEKYNGFEQLCINFTNEKLQQFFNHHMFVLEQEEYQREGIEWTFIDFGMDLQLCIDLIEKPMGILSILEEESMFPKATDQTFSEKLTNTHLGKSAPFQKPKPPKPGQQAAHFAIAHYAGCVSYNITGWLEKNKDPLNDTVVDQFKKSQNKLLIEIFADHAGQSGGGEQAKGGRGKKGGGFATVSSAYKEQLNSLMTTLRSTQPHFVRCIIPNEMKQPGVVDAHLVMHQLTCNGVLEGIRICRKGFPNRMMYPDFKMRYKIMCPKLLQGVEKDKKATEIIIKFIDLPEDQYRLGNTKVFFRAGVLGQMEEFRDERLGKIMSWMQAWARGYLSRKGFKKLQEQRVALKVVQRNLRKYLQLRTWPWYKLWQKVKPLLNVSRIEDEIARLEEKAKKAEELHAAEVKVRKELEALNAKLLAEKTALLDSLSGEKGALQDYQERNAKLTAQKNDLENQLRDIQERLTQEEDARNQLFQQKKKADQEISGLKKDIEDLELNVQKAEQDKATKDHQIRNLNDEIAHQDELINKLNKEKKMQGETNQKTGEELQAAEDKINHLNKVKAKLEQTLDELEDSLEREKKVRGDVEKSKRKVEGDLKLTQEAVADLERNKKELEQTIQRKDKELSSITAKLEDEQVVVLKHQRQIKELQARIEELEEEVEAERQARAKAEKQRADLARELEELGERLEEAGGATSAQIELNKKREAELSKLRRDLEEANIQHESTLANLRKKHNDAVAEMAEQVDQLNKLKAKAEHDRQTCHNELNQTRTACDQLGRDKAAQEKIAKQLQHTLNEVQSKLDETNRTLNDFDASKKKLSIENSDLLRQLEEAESQVSQLSKIKISLTTQLEDTKRLADEESRERATLLGKFRNLEHDLDNLREQVEEEAEGKADLQRQLSKANAEAQVWRSKYESDGVARSEELEEAKRKLQARLAEAEETIESLNQKCIGLEKTKQRLSTEVEDLQLEVDRANAIANAAEKKQKAFDKIIGEWKLKVDDLAAELDASQKECRNYSTELFRLKGAYEEGQEQLEAVRRENKNLADEVKDLLDQIGEGGRNIHEIEKARKRLEAEKDELQAALEEAEAALEQEENKVLRAQLELSQVRQEIDRRIQEKEEEFENTRKNHQRALDSMQASLEAEAKGKAEALRMKKKLEADINELEIALDHANKANAEAQKNIKRYQQQLKDIQTALEEEQRARDDAREQLGISERRANALQNELEESRTLLEQADRGRRQAEQELADAHEQLNEVSAQNASISAAKRKLESELQTLHSDLDELLNEAKNSEEKAKKAMVDAARLADELRAEQDHAQTQEKLRKALEQQIKELQVRLDEAEANALKGGKKAIQKLEQRVRELENELDGEQRRHADAQKNLRKSERRVKELSFQSEEDRKNHERMQDLVDKLQQKIKTYKRQIEEAEEIAALNLAKFRKAQQELEEAEERADLAEQAISKFRAKGRAGSVGRGASPAPRATSVRPQFDGLAFPPRFDLAPENEF

SEQ ID NO: 40168 - DNA, 3552 bp, DROSOPHILA
attatataaaccgaaaatcgagatttccaaacaaaacgtttccattttgataaggcgccggtgttatcaggagagcagcgcagctgccgccttttaactattacgtctatttaattctcacatatttttagcagtatgttctaatcgctaattcatttggtgaaatctcaagcagtgggcatgtctaagcaccacatgggcggttcgagcagacttcggcgacaataggtcagtgcggtggccataacaatgttatggtatcgcggcagtttgaggcttcgcttggctggcgtgggtctagccgaaagcaatcagcttttgagattgttgggggtagtcttatctctaagagctccaataaaataaaataatttgataggaataaattcagcgatttactagggtttattagcatggctacacgttgagttcacttttcttttgcttggtaagcataggtaatccttgtacaacttacttaatatgaagctaaggatataagtataagtataagtaagtaatataagtgtaagtatttatacttatacttttcttttaaacaaagttctgacttatgggaaaataatgcaatgcacacactactctagatcgcaatgctggcgcccttcaatgtaagtatgctttgaatctcatttacatactgttactttttcctgataagaagtgagagccactgagaggaaagctttcaatcggcgatactctcagagctttactaattgatcgagcgagtgcgatacgaaaacaaaagccgagcgccgctccaataaaagttcagttggcgctacgtaaacaaactttgcggttagtctgcatctggggtgtccagaacgaccggttctttcgttaggcactaagatgaacttgggaatcaaacggctagttatcagcaacgattaagcactagcgttcaaggtacttctggggttaaaataaactccatttatcagtgtacatcgattaacaaacagtgcacaaaatgacgcccaatgttaaggacgatggtgactggagagtatccggaatatccagaaattacccgagctatcgccagcatcgaccgattaccagtgaaaggtttgcatcgaatatacccataaatttcaaattaattaaataaaactacatatttacattttctcttgctcagctggctggaggggaaaaatgtagatgacgaggccgaaggtctttggcgaattaacgatacgctctacgacttaagcgactttgccgctcgccatccgggtggttcatcttggattgagtgcaccaggggaacggatatcaccgagcccttcgagtcacatcatatcgaggagcgagctcgaggaatgctaagcaaattcgaggtgcgaaaggctgcaaggccaaggaactacaagttcactcttgaagagaatggtttctatatgacactgaagcggagagtgcgtgaaaagctgagaaagatcgattactctcccactaagaaaaccgaggtattgttgcgatcttgacaagttactaaagttccgtcgaacgtaatatgcttgttccctatgatatacttattgttctacaatataatcttgcagtttctccatcttggcatcttggtgtccgtcttcctcttcagttgggcaggcaccgttctggactcattgatcttcaagggtctagctggattggcactttgctgggtggcaacctcaacccacaattattttcatcaacgggacagttggcggatgtacactttcaatctgaccatgatgaacttccgaaactggcgaatttctcacgccctatcacaccatgtttatgctaattctctgcacgacctggagatgtccatgtttgagccgttcctatgctggattccggatagtcattatgccagtaaacctcaacgattgatctcagtggttatcagccccgtggtatatgtggtcttgttccaagggcagtttctcatacggtgagtggccaaaatagttttctctgtattgtactaataggttgcattatattttagcctggtcctttccctgaccaaaagaaacgttctgtgctgggatgatctcattggcttcagtctgcccatttttatatatttatccactggtgttagcctgttgagtgcacttttaagctgggaaataattatatcggttgggagctttatcttcggacttgttggtctcactgctgcccaccatgatccacgtattctacacgatggagatgcccagcgacaggacttcgattggggtctttaccaggtggacacgattatagatcgcggagacatcaagtggtcggatcttctggtgctcacacactttggtgagcatgctttgcatcacctatttcccacactggatcatggagtgctaaagcatctgtatcctgagttaaggaaaaccatgaaagagttcgacgtggaactgcgggagatcaatcactggagtcacataaagggacagaatcagcaattgctaagaacagagaagaatccaattccgccgggtagtaaaaagttgatgtaggtgggttttggaattgtagtgataattggggagggtaatggttattctggaaaaaggttataataaagaataatattgggtaaattatgcaaaaatgtatatattaaatacaatgtgacttaacagacattggttttcttttataaagcattttgtttacctgtctaaacaaaacgtgctcttaacaaaagagctttcttcgattctctttttgtttgcaaaggtttgttaagagcactataatcattgtcgcttttttaagtcgtttgttacgcataattacaattatattttatagttcggcttatgaggtgcttaagcagatcacttaaaactacattaatattttaagaggtgagagtttggtgggtgttacgaaaattggtgaactacacgaaatatattttgatagtgggtttttgctgactcatcttgacaaagcaattgaaaaacgaaaatagattttataattaaattaattataaaactgctgccacggagtaatcaggatatggattgacctttaaagaaaactgttttaaaaggaatacaataaagttgcgtttatgtaaattaaataaatttttttattactttcattttattttttaataacctttatatatttctctgataaaatttatttaatttttattttgaacgtttgaaacgcgttagaaaaaaagttagaaaagagcggagttgtatatcaaagagcaggtaaataagagtatcaagagaatgaaatgttaccgtctctcatcaaggtatttttcggaatcgaggggagttgataagcaaatccaatgactggcaccagttttttcacccataaataggtttccgcttgcccatttctctttagtttctatttcgacagtggccggacaggtcataccaaaaactaatcaaatgatcggagttcacttcgtgtttttgttgcttctcggcgtggttgcctccacccagggagctaacattttggggctcttcagcagtc

SEQ ID NO: 40169 - DNA, 1326 bp, DROSOPHILA
atgacgcccaatgttaaggacgatggtgactggagagtatccggaatatccagaaattacccgagctatcgccagcatcgaccgattaccagtgaaagctggctggaggggaaaaatgtagatgacgaggccgaaggtctttggcgaattaacgatacgctctacgacttaagcgactttgccgctcgccatccgggtggttcatcttggattgagtgcaccaggggaacggatatcaccgagcccttcgagtcacatcatatcgaggagcgagctcgaggaatgctaagcaaattcgaggtgcgaaaggctgcaaggccaaggaactacaagttcactcttgaagagaatggtttctatatgacactgaagcggagagtgcgtgaaaagctgagaaagatcgattactctcccactaagaaaaccgagtttctccatcttggcatcttggtgtccgtcttcctcttcagttgggcaggcaccgttctggactcattgatcttcaagggtctagctggattggcactttgctgggtggcaacctcaacccacaattattttcatcaacgggacagttggcggatgtacactttcaatctgaccatgatgaacttccgaaactggcgaatttctcacgccctatcacaccatgtttatgctaattctctgcacgacctggagatgtccatgtttgagccgttcctatgctggattccggatagtcattatgccagtaaacctcaacgattgatctcagtggttatcagccccgtggtatatgtggtcttgttccaagggcagtttctcatacgcctggtcctttccctgaccaaaagaaacgttctgtgctgggatgatctcattggcttcagtctgcccatttttatatatttatccactggtgttagcctgttgagtgcacttttaagctgggaaataattatatcggttgggagctttatcttcggacttgttggtctcactgctgcccaccatgatccacgtattctacacgatggagatgcccagcgacaggacttcgattggggtctttaccaggtggacacgattatagatcgcggagacatcaagtggtcggatcttctggtgctcacacactttggtgagcatgctttgcatcacctatttcccacactggatcatggagtgctaaagcatctgtatcctgagttaaggaaaaccatgaaagagttcgacgtggaactgcgggagatcaatcactggagtcacataaagggacagaatcagcaattgctaagaacagagaagaatccaattccgccgggtagtaaaaagttgatgtag

SEQ ID NO: 40170 - protein, 441 aa, DROSOPHILA
MTPNVKDDGDWRVSGISRNYPSYRQHRPITSESWLEGKNVDDEAEGLWRINDTLYDLSDFAARHPGGSSWIECTRGTDITEPFESHHIEERARGMLSKFEVRKAARPRNYKFTLEENGFYMTLKRRVREKLRKIDYSPTKKTEFLHLGILVSVFLFSWAGTVLDSLIFKGLAGLALCWVATSTHNYFHQRDSWRMYTFNLTMMNFRNWRISHALSHHVYANSLHDLEMSMFEPFLCWIPDSHYASKPQRLISVVISPVVYVVLFQGQFLIRLVLSLTKRNVLCWDDLIGFSLPIFIYLSTGVSLLSALLSWEIIISVGSFIFGLVGLTAAHHDPRILHDGDAQRQDFDWGLYQVDTIIDRGDIKWSDLLVLTHFGEHALHHLFPTLDHGVLKHLYPELRKTMKEFDVELREINHWSHIKGQNQQLLRTEKNPIPPGSKKLM

SEQ ID NO: 40171 - DNA, 7490 bp, DROSOPHILA
tcagcgtctgctgcaaataaccggccagcagctgtaaatttgcctctgtcacttccattttgagtatattttcttttcgatggtcctatttgctttaatttatatcactcgtggcttgttcctccacactcttgcaacatgaaatgaaatcgcaattcgttttcgcacacaatgctcgccgatctggggatggaactcagggcgagttttcgatatcgattgtttatagttactgttactaggattcgatggttttagattttaaatgttcatatcagaaatatcgcatattgaactttactaatttagtatcatttgatatgatatcaattcctgtttttttttttcaaaaaccaactgaatgaattaaaaattaaaacaaatttgtaattcttttccaggaaataattgcagagggcttgggcttgttcatccagatagtgaacattgttgtcttggtttgcctaccggtggtaacaattcacctaaaaggacatgcttttagtttgagtgagaaattaacttagtttaggtgtattttaaaatatttaattatctgttaatctttagtgggcgcttcaacagtttgcttcttttactctgtgttgttcctaaaactatggtcctatgtgcagacgaatatgtggtgccgtcagacttattatcaaaagaatccgcgggagcgtcgaccaagcataactttggcggaactaagtatgttgagatctctcaacggaatgtcatatattaaaaattcatctttcatccagaaaaaggagttttgaatggaggtgaagaagacgaggacgtttccaagctggtgcaatatcctgataatctcacatacaaggatctcctgtacttcctttgcgcgcccactctctgctatgagttgaatttcccgcgaacttctcgcgtgcgcaaacgctttttgctgaagcgtttattggaggtggtgattggagtgaatgtggttatggccttgtttcaacaatggatcattccatcggttcggaactccctgattccgttctccaatatggacgtggccttagccactgagcgacttcttaaacttgcggttggtagagtgaaaattataaaacgtttgagtattatttaataatttttctttaattagctacccaatcatctttgctggctctgctttttctatctaatgttccactcttttcttaatgcggtcggcgaactgctgaattttgcagatcgcaatttttattgtgattggtggaatgcgaataacattgacaccttctggcgtacatggaacatgccagttcataggtggtgcgtgcgtcatctctacatccctgtggtccaaatgggatattcctcaagacaggcctctactattgtctttcttttcagtgccgtcttccatgaatatttggtatgagggttgatatttagaatttcaaattttgtacaataatataatttatattttcaggtttcagttcctttgcaaatatacaagatctgggcatttatgggcatgatgggtcagattcccctatcggccatatccaaatccattgaaaagaaactgggtccccgaatgggcaatataatcgtgtgggcttccattattcttggtcagcctctgtgcataatggcctattatcacgattatgtcgtccagcatttcaaaaactcgctcaacggcaccgactacagtagttaggtttcaaaaaaggttaacatttaaaaatggagcaacactgaaatatctgcatcggtcgggtccgtgtacttttcgtaatttataagccagaatgcaagttaagaaggaaacttgtgattgccaatttacaaagcatattttgtatgacttttgcacatgcatgtagtactgattaacacaaatagattgttattgaatgcatttgttaatgaatttaagtgtcatgtaaataaatcaaattttaaactaaataaaatgtttttaatttttaaattatatgaaacgaaaaaaatgtaattattaagctctttgttcgatagttccttccctagaatacacgatctatcgattgtttatgcggcatatggtcacacttcatcgctgcccaagccaaaacagacaattttttttcctatatttcaagtaacatttgtcgatcatatgtgagcttaatataagtaatattttcgtgtcagttggctctacaaactcggcgtaactgtggccccacactcgatccggctattgcggtaagatccaatgattcgcaaatttctgcgtcggcttcttcgcaacgcccggctctgcacgcatacatattcgctgtttggccagtgtgtatatatgtgtcgctgtctgattagtttgcgccagtgtgtgtgtgcagctcgtgctgggtctgaaatttttttctacatcgcttctcgcatgaggcaatagttaattctgaaagggaaaccaattttaaagggtgacaaaaatgttattaatttccagaaccctttggagaagtcatcagcgccttcagctgcaacagcaactcgtgcacagtgcatccagtggaggtttcttggcggataggcacattcggcatcgaagcaccccggactcgttgttctcggcgaaagaaccggctgattgcggtcacgtaagttctcgtgaatcacgaactagccattcgtgttgtccatgtccaatccttaatccatatgttcggtttgcagatcatgagtggcagatatcgcggtggaggcggcggtcgatttggtggccgtggtggcggaggctatgcagatggtggcggctacaatgacttcgacaactaccgtggtggcggaggaccaggcttcaatgacaactttggaccaggtcccggaccaaatcctttcaacagtaagtagatagcacttaaaagtagcatctttagtggaattggtccaactggttataaatatcttgcataacgaatagacagtttacaaaaacacttatttatttttttttacttacatagatatattacataaaatattattttcactcttacatttccagtgggtggtcccaacatttctggcaatgagttaatgcagctgatgagtgccatggccagcaacttcaatatgaattcacagcccccgcagccaatgcgccagagttgcggcgagttgcgcaatcaccattgcggattatttgttgagctgtccggcaggctcattaagaagcgggtgaatcggtttgcggagctgcgcgaccgcaatggcggtgcatgccagcttgtggttctggaagacaagcatccgcgagtggcacggcgcatgaacaacatgccagagaacacaacactaactattgtgggcctggtcatgcggcgaccacacaattcgtgcaatcaaacaatgccaacgggcgagatcgaagtggaggtgcaggacatacttaacattcatttcccggcaggcggtaccaaaagagctggtgacaagcgcacatacagcacaatggtgcagcagcagagtaatcttgggattaccagcaccgagtacaagatagccagtaagtgggaaagtgtttaagtactggtttatgagtaacataatatttttattgtcttttacagagaacgagaatatattgaagtattttgaaaaccgtgatctcacctgcaacgatctaaggcgcgacgatgtcggaaagacagtgactttggttggttggattccctctaccaaaaacaacaaattcttgcagctcaaagatggttatggccaaacgcaactaatgatcgaggatcagtcggtaatgaacaaaacgatatgatagtttcatcaaattgactattttcaatgtttattttcagcttagcgacacatttctttcaacacctgagcagacagttatccaaatagtgggcaaagttctggggagaccaaaagctaatgttaatttggtaagaacttataatatccatcgatttgtaaaataaatcaattaaattccctttagaaatatgatactggtgaggtggaagtcagtgtaactagcgtaaaagttctcaatccggacgatccctacgatggtcctattaaggccaaagagaagaaacaaaagttttccattgatgatcttgaggctgaggaggctgccgccgaagcatccgccaatcttaccagcaataatggagaatccacggaagacagcgcggaagcaagtaccactgctaatgcctctttaattgccgagcaacgagccaaggtggccgataccaacaagtttgccgaccgcactcataactgcggggaactaacctccaatgatatcaacgaaaaagtagtcatatgcggctggttggagttccagcgcatgaacaaattcttcatacttcgggatgcttatggacaaactcaggtactgttgtcaccgaaaacatatggtttggaagaatacgcagaaacaggcgtgcccattgagtcaattgttcgagttgagggtacagtgattccccgtccagcggctacaataaaccccaaaatgcaaactggacatgttgaggtagaagcggataaagtggttgttctcaatccggcaaagaaaaatcttccgtttgagatccgaaagtttaatcgtgctggcgaacgcttgcggcttactcatcggtatctggatctacgatttaatgatatgcagcataatctgcgccttcgatcggctgttataatgaaaatgcgagagtatcttataaactatctgggtttcgtcgaagtggagacaccaacactcttcagacgaacgccaggcggagctcaggagtttgtagtacccactcgcaaagcgggccacttttattcgctcgtacagagtccgcagcaattcaagcagatgctgatgtccggtggaattgacagatacttccaggtggcccgttgctacagggatgaagcgacgcgtccagatcgtcagccggagttcacccagttggatattgagctatcatttaccagcagggatgatatcatgcaactgattgaggagactctgcgttattcctggcccaaagattttccgcgtctgcaaacaccgttccgtcgtattacttatgaggaggcaatggaaaagtacggaaatgacaagccggacactcggtttggttttctgttaaacaacgtgtcggaaatcatcgaaaagagcgatgaattcaaggaaaaatacgatgatcttggcgcttatgccattgtagtgcgagccagtgaagccttttggaatggagctgcccgaaagcattacgaaagcctaggcaaggagttcaagggtacgttgttcgtgcgcaaatttggcccaacaaaggatgtgcaggagaaactgggaaagctactaggcgaagatgtagctacagaggtcgccgataagttcgaccttgaggagaacgatctccttttcttgggcattggatcaaaagtggaaactgtaagaaattttgtagtaaattaagtaaaatgtataatatttgttgtcttaatccacctacagcgcgaattgttgggtcgcatccgactggactatcaagactttctggtggaaaatgccaaaataaagaagcctaatgacttccgcttcctttgggtgatcgatttcccgttgttcgagcgaaatcgtgagactaatcagttggagagcgttcaccacccgtttaccctgccacatagtgatgatctagaaaatttcgccactagctgcgaaaacttggagagcatacgctcccaggcttacgatttggtgctgaacggccaggaagtcggaggcggttcaattcgcatccatgatcgagacatgcagcactttatattggaacagattctgaaaatcccgcatgatcatttgtcgcacttactgagcgcattggagtctggatgcccgcctcatggaggcattgctttgggcttggatcgcttgattgccattttatgccgtgcgcgatccatacgcgatgtgattgcattccccaagtcactcaatgggcgtgatcccctttcaaacgcaccagttcccatttccgatgaggagatgaggctgtaccacctttctgtggtagatgaggaagagcccagcacaaataacacgtcacacgaacaggaggacgacgatcccgatcaagaacgtgctcctccatccccgatgtcggcgactagcgaatccgagcagccgcaaattaatgtagatattaagcaggagcccgaaggtctgaatgaggattttgctcctgaatcccccgcaaccaaatcgacagtaaaagctgatcccgatgaaccctcaccatctaaccccctggcatcggaggctgctacgccggccagagcaagaaggactgttaaaaagaaggtatagagcggcgacttagtaacattacggataacgaattagcattttacgtgtaagctctgtggtcaggacggaggatggcagctggcgtggaaattggtcggatattcagataacacgacattcgggtcgggtcaattaactaacgaatcccattttatacacacagttgtataccaaaaaggttaatatatatacccaccatggatcttcacaacggacttcaatacacgaatacatcttgagccggaagtccacattcttaaaatccatttgaaattattatggcaacaaatttattacaatttacaaaatatacaaaactgctattgtattcgcaattgtttaattatacaatgcttgaattacagtttccatttgttttggattttttgctgatattaattgttgtaacagaacagattaaaatgaaattgaagtcaaccaaaaatccttacttaaattcacaaaaaaaataacgttctgtatcacggctgtttaatctgcaaaaattcagcacaggatgtacagacatttgtatcgttttctgattttatgtttgttcagtatagtaagcctttttatgttacaaaaactctatttacctatttatttagctggataaaaaataaaactcataaaaaagttggaataatgctaaacatatagctatccagattttgtaaaatattaggcattaaacataatttatttcgttcgatttgtatttgtaactatgaatattaaactaagtgacttatatattagtaaggaatgggggcaaggaaggattttaagtagcttaaaacatcgaatagggctaatccactgtgggcacagaaaatatgttatcctccatgaatccatatgtaagattccttctgtaatcccaccagctttgcgtgggacgcgcctctgtacttatcatctgtcggtcatctggctcaataaactccactggatcctgctcttcaacagaatcaccatcgctatcgttctctttctgttcaggactgaagctcgtccaatgctcgtagggatcctgctcggtgggccacatctgaaggttgttaaagttggctgccagtttaccaaactgatcgatgtgatgcagtaggggatccac

SEQ ID NO: 40172 - DNA, 3996 bp, DROSOPHILA
attccatcggttcggaactccctgattccgttctccaatatggacgtggccttagccactgagcgacttcttaaacttgcgctacccaatcatctttgctggctctgctttttctatctaatgttccactcttttcttaatgcggtcggcgaactgctgaattttgcagatcgcaatttttattgtgattggtggaatgcgaataacattgacaccttctggcgtacatggaacatgccagttcataggtggtgcgtgcgtcatctctacatccctgtggtccaaatgggatattcctcaagacaggcctctactattgtctttcttttcagtgccgtcttccatgaatatttggtttcagttcctttgcaaatatacaagatctgggcatttatgggcatgatgggtcagattcccctatcggccatatccaaatccattgaaaagaaactgggtccccgaatgggcaatataatcgtgtgggcttccattattcttggtcagcctctttggctctacaaactcggcgtaactgtggccccacactcgatccggctattgcgaaccctttggagaagtcatcagcgccttcagctgcaacagcaactcgtgcacagtgcatccagtggaggtttcttggcggataggcacattcggcatcgaagcaccccggactcgttgttctcggcgaaagaaccggctgattgcggtcacatcatgagtggcagatatcgcggtggaggcggcggtcgatttggtggccgtggtggcggaggctatgcagatggtggcggctacaatgacttcgacaactaccgtggtggcggaggaccaggcttcaatgacaactttggaccaggtcccggaccaaatcctttcaacatgggtggtcccaacatttctggcaatgagttaatgcagctgatgagtgccatggccagcaacttcaatatgaattcacagcccccgcagccaatgcgccagagttgcggcgagttgcgcaatcaccattgcggattatttgttgagctgtccggcaggctcattaagaagcgggtgaatcggtttgcggagctgcgcgaccgcaatggcggtgcatgccagcttgtggttctggaagacaagcatccgcgagtggcacggcgcatgaacaacatgccagagaacacaacactaactattgtgggcctggtcatgcggcgaccacacaattcgtgcaatcaaacaatgccaacgggcgagatcgaagtggaggtgcaggacatacttaacattcatttcccggcaggcggtaccaaaagagctggtgacaagcgcacatacagcacaatggtgcagcagcagagtaatcttgggattaccagcaccgagtacaagatagccaagaacgagaatatattgaagtattttgaaaaccgtgatctcacctgcaacgatctaaggcgcgacgatgtcggaaagacagtgactttggttggttggattccctctaccaaaaacaacaaattcttgcagctcaaagatggttatggccaaacgcaactaatgatcgaggatcagtcgaaatatgatactggtgaggtggaagtcagtgtaactagcgtaaaagttctcaatccggacgatccctacgatggtcctattaaggccaaagagaagaaacaaaagttttccattgatgatcttgaggctgaggaggctgccgccgaagcatccgccaatcttaccagcaataatggagaatccacggaagacagcgcggaagcaagtaccactgctaatgcctctttaattgccgagcaacgagccaaggtggccgataccaacaagtttgccgaccgcactcataactgcggggaactaacctccaatgatatcaacgaaaaagtagtcatatgcggctggttggagttccagcgcatgaacaaattcttcatacttcgggatgcttatggacaaactcaggtactgttgtcaccgaaaacatatggtttggaagaatacgcagaaacaggcgtgcccattgagtcaattgttcgagttgagggtacagtgattccccgtccagcggctacaataaaccccaaaatgcaaactggacatgttgaggtagaagcggataaagtggttgttctcaatccggcaaagaaaaatcttccgtttgagatccgaaagtttaatcgtgctggcgaacgcttgcggcttactcatcggtatctggatctacgatttaatgatatgcagcataatctgcgccttcgatcggctgttataatgaaaatgcgagagtatcttataaactatctgggtttcgtcgaagtggagacaccaacactcttcagacgaacgccaggcggagctcaggagtttgtagtacccactcgcaaagcgggccacttttattcgctcgtacagagtccgcagcaattcaagcagatgctgatgtccggtggaattgacagatacttccaggtggcccgttgctacagggatgaagcgacgcgtccagatcgtcagccggagttcacccagttggatattgagctatcatttaccagcagggatgatatcatgcaactgattgaggagactctgcgttattcctggcccaaagattttccgcgtctgcaaacaccgttccgtcgtattacttatgaggaggcaatggaaaagtacggaaatgacaagccggacactcggtttggttttctgttaaacaacgtgtcggaaatcatcgaaaagagcgatgaattcaaggaaaaatacgatgatcttggcgcttatgccattgtagtgcgagccagtgaagccttttggaatggagctgcccgaaagcattacgaaagcctaggcaaggagttcaagggtacgttgttcgtgcgcaaatttggcccaacaaaggatgtgcaggagaaactgggaaagctactaggcgaagatgtagctacagaggtcgccgataagttcgaccttgaggagaacgatctccttttcttgggcattggatcaaaagtggaaactcgcgaattgttgggtcgcatccgactggactatcaagactttctggtggaaaatgccaaaataaagaagcctaatgacttccgcttcctttgggtgatcgatttcccgttgttcgagcgaaatcgtgagactaatcagttggagagcgttcaccacccgtttaccctgccacatagtgatgatctagaaaatttcgccactagctgcgaaaacttggagagcatacgctcccaggcttacgatttggtgctgaacggccaggaagtcggaggcggttcaattcgcatccatgatcgagacatgcagcactttatattggaacagattctgaaaatcccgcatgatcatttgtcgcacttactgagcgcattggagtctggatgcccgcctcatggaggcattgctttgggcttggatcgcttgattgccattttatgccgtgcgcgatccatacgcgatgtgattgcattccccaagtcactcaatgggcgtgatcccctttcaaacgcaccagttcccatttccgatgaggagatgaggctgtaccacctttctgtggtagatgaggaagagcccagcacaaataacacgtcacacgaacaggaggacgacgatcccgatcaagaacgtgctcctccatccccgatgtcggcgactagcgaatccgagcagccgcaaattaatgtagatattaagcaggagcccgaaggtctgaatgaggattttgctcctgaatcccccgcaaccaaatcgacagtaaaagctgatcccgatgaaccctcaccatctaaccccctggcatcggaggctgctacgccggccagagcaagaaggactgttaaaaagaaggtatagagcggcgacttagtaacattacggataacgaattagcattttacgtgtaagctctgtggtcaggacggaggatggcagctggcgtggaaattggtcggatattcagataacacgacattc

SEQ ID NO: 40173 - protein, 1160 aa, DROSOPHILA
MGMMGQIPLSAISKSIEKKLGPRMGNIIVWASIILGQPLWLYKLGVTVAPHSIRLLRTLWRSHQRLQLQQQLVHSASSGGFLADRHIRHRSTPDSLFSAKEPADCGHIMSGRYRGGGGGRFGGRGGGGYADGGGYNDFDNYRGGGGPGFNDNFGPGPGPNPFNMGGPNISGNELMQLMSAMASNFNMNSQPPQPMRQSCGELRNHHCGLFVELSGRLIKKRVNRFAELRDRNGGACQLVVLEDKHPRVARRMNNMPENTTLTIVGLVMRRPHNSCNQTMPTGEIEVEVQDILNIHFPAGGTKRAGDKRTYSTMVQQQSNLGITSTEYKIAKNENILKYFENRDLTCNDLRRDDVGKTVTLVGWIPSTKNNKFLQLKDGYGQTQLMIEDQSKYDTGEVEVSVTSVKVLNPDDPYDGPIKAKEKKQKFSIDDLEAEEAAAEASANLTSNNGESTEDSAEASTTANASLIAEQRAKVADTNKFADRTHNCGELTSNDINEKVVICGWLEFQRMNKFFILRDAYGQTQVLLSPKTYGLEEYAETGVPIESIVRVEGTVIPRPAATINPKMQTGHVEVEADKVVVLNPAKKNLPFEIRKFNRAGERLRLTHRYLDLRFNDMQHNLRLRSAVIMKMREYLINYLGFVEVETPTLFRRTPGGAQEFVVPTRKAGHFYSLVQSPQQFKQMLMSGGIDRYFQVARCYRDEATRPDRQPEFTQLDIELSFTSRDDIMQLIEETLRYSWPKDFPRLQTPFRRITYEEAMEKYGNDKPDTRFGFLLNNVSEIIEKSDEFKEKYDDLGAYAIVVRASEAFWNGAARKHYESLGKEFKGTLFVRKFGPTKDVQEKLGKLLGEDVATEVADKFDLEENDLLFLGIGSKVETRELLGRIRLDYQDFLVENAKIKKPNDFRFLWVIDFPLFERNRETNQLESVHHPFTLPHSDDLENFATSCENLESIRSQAYDLVLNGQEVGGGSIRIHDRDMQHFILEQILKIPHDHLSHLLSALESGCPPHGGIALGLDRLIAILCRARSIRDVIAFPKSLNGRDPLSNAPVPISDEEMRLYHLSVVDEEEPSTNNTSHEQEDDDPDQERAPPSPMSATSESEQPQINVDIKQEPEGLNEDFAPESPATKSTVKADPDEPSPSNPLASEAATPARARRTVKKKV

SEQ ID NO: 40174 - DNA, 42573 bp, DROSOPHILA
acggcaatgacgttgtatggatctacttatgctgggtcattgatttgtttacattaaataagttagttctatgaaatggaattcataaaagtcaactgtttaaaatactctaagatcaagatacttccataatttattgctgtttaaagtagctgtattaagagaaggcttaaggattgtgatgttagtcaacttaatttgggttaaacatttatggaatttgacgtgcgtatcctagtttttctcaatatctgagctgatgttttgacttctaactcatttcgagtgagctgcagcttggggcattttgctcaaatgtcgtttactttcccacagccgactattattatgcggttgagcttgtcgcctgataagtacacgaatatacctagatacatgtacgatgtgggggcacccttaccctcttgctcccttgaaatggccaacatgcatggcaaaaacatttacatacctcactcactcacacaactgccagttccgactcattgttgttcccaggtttatggaagatgcgattgtagttgttgtcgttggcagtgctaattgcgattatctcacacgaatatacaaaatatatagagaagttgacggcgacgtcaactgcaacggcggcagcgacagcgtacaaatttgaattcattttcgagttgaaaaaaaagtggcaagtaatttcgaaaagtattcttactgtctagtcagtagagttttagacgtgacaccggacgctacgtaggcggtaccagagaaaggaaattgtgtttgttaagtgaaagtgaaaacggaaagatactagttcttttccctgcccaaaaatcttacaaatatataacgaaatatccatagaattctgtgatcgtgtgcgctaaattcactgccagttactggcaattaaattatttaattgcttgtgaaagagttaataactaagctgtcaacggcgaccttggcagtgtggaatatagatcttaagataaacgcaatgcacagtgtttcgcttttgggctgtctttgcctcagccttagcctgactttgagtacgggcagtccccaactgaatctgcccaccccgcagcccgaggtcttctacaatggatacaccccgaatgtggccacaactccggcccagcttcgagcggatcgggatcgcgatcagcgctacggaccaccttactccgatgcaggtggaggtggcaacaccgacgacggactcgacgactttagggtgggtgtggcacatctttcacttttaaaaccgttcaaaaccaggattaaaactggattttctattaaaaaaacactccttgtggaatgaaagtttctcagtgttcaattaccatcataacaatgacttattgaaattccgcttgcagtttggccagacagatgacgaacggatgaggatcggctatggctatcccacgccccgcgtgaactttagtgattcacccttcagtggggctaggttttccaaccacaactatggacccatttccagtaccaccgaacgtaattacggcaacgacgccaatctcaatggacgctattcggatgtgccctactcctcccaaggagagcgtaacttcaatcccaacgatcagtacaactacaataataatccgaatgtggaatttgtgggcattaacaatcgcaatcgcttcgagaatcccttcctttcgaaccaggatcgtttcaatctaaatcagggctacttggaacgtcagcgatatcagcaggatcgtcgctatcagcaggagttggagaagctgcgcatcctgctggtggagtcggatcagaaaggatcactggagtgcaccgccaatgtggctgcccagtggaacttcgagacgaatgtgaatgattttacccaaacggaagcggtgagtgagcggttttggccacatacaaatgccaaaaactagtaaatcgcgtaattgtggttgaacggcacgcgatctttgcttgtgggtgattgtgggtgggttggtagtggtgcagttttcccatggctcgctgtggtggttttcttactcacgcacacccgtgaaaagtcagaaaagtctcattctgaaggtcgaatcgccttgtcagattcccaggcagacatgccaatgtcatgtgttttcccaaccaaactgtttgtggactaatcggtgcttgaaggtagatacatatgtacatacatagtatgactgggctttatgtgttacagcagtgctaatcttaaagatagtttgctttatcagcttaaagtatcttacagtaaaaaggaaggttttctttttatcaacctagtattatataaaaaaaatatatgactatatatctattgaggaggtgtgatatctaatttaaagtttgatcaatttcgtatatttagctaaatgctcaacagcgatatgtggagttccagcgcatcactgccgagcaatccaagcggatcaataaggatctcatcttcgaccgtcgcctctacagacaactgatgctgcagtcggaagtgggacccaatgctctgcccctagatgtattggatagggtgagttacacgtgcatctctatcaaacataaagtatagaatgagaatttcttcagtataatcgcctgctcaatgagatgctgttcctgtacaacagcgccgaaatctgtgcctaccagcagccctttcagtgcgatcttcactacataccccagctgaaggacatcatggccaagagcagggactgggatgagctgcagcacacttgggtggaataccacaggaaggcgggacgcggaatgcgggatagttatgagcagttgatcgatgtgatgcaggaggtggcctacgtaaacagtgagtagagagtccttaaagggcaataactcaaatagttatcttaaaatcccttctatggcagatgtcactaatggcggggagtattggtatttggcctacgagtcgggtaactttcgccaggatatggacattgtttgggaacagataaggcctctttacgaaggattgcatgcctatgtacgtcgcaagctgagggattactatggtccagatcggataaaccgcatagcacccattccctcgcacattctgggcaacatgtacggccagtcgtggtccaatgtgttggacattttgataccctatccaggccggaagctgatcgacgtcacgccgcgaatggtggaacagggctacacaccgcaactgatgttccagttggccgaggagttcttcacctccattaatatgtctgcggtgggtccggagttctatcgcaactccatcttcgaacagcccctggatcggagggtcctgtgtgagccatccgcctgggacttttgcaatcgtcacgatttccgcgttaaaatctgtacggatatcaatcagcgaagtttgattagtgtgcaccatgagatggcgcacattcagtactttctgcagtatcgtcacctgcccaagatcttcagaaatggagcgaatccggcatttcaccaggcggtgggcgatgccattggcctgtccgtatcaactccaaggcatttgcagactctgggactactacaaagatccctcgatgagtccagctatgatattaactatctgttcaccatggccattgacaaggtaatgataattgttgtgaaatatatgccagtgaattctttaagtgatatcgcgacttctaaatatagctcacattaagattctttgttctttattattatattcattttttccctaaagttgattgtgttgaatataatatagaagcgaagacagtttttgataaatggctctggtttgaagaaatatatgtagcacttgttcagcgtggccaacgaaaacatatagatattgtaatcaaattatgcacattacttagcattccttatattccttaatattattattgcataattttacttaagcattatactttttcctttcaggtggcatttttaccttttgcattatctctggacaattggcggtatgatgtctttagtggcaatgcgaataagcgaacaatgaactgtcactactggaatttacggtaagttgtaaggtttatataaatataaatataaatgagataatattacattaatttatatttcagagaaaagtattccggtataaagcccccagttttgcgatcagaaaaggatttcgacccgggagccaaataccatataccagcaaatattccctatatcaagtgagtacccaaaatgttctatattaggagcttgattacataattacttttcggatttaattgtgtgctgcataaccagagcaattaaagcgtctagcagcggctggttattagtttagctatttttgattacaatttacacacaatttcaaacattttccgtcaaattgccggcgattacgcgttgcgatcgcttgggatcgtcgaaccggccataaagttggcccactaacatcacataatggccaacacaagcacaaaatcaagctttgggtttgtggaaaagaaaatgaaatgaaactgaaactgaaaactcacatgtctgcaatgtttcccgcattcactttccacttggctgccgccaacaagccgagcgtgtttagttggccatcatttaaataagcccggttgaaaaactgttacgaaaatccaagaccagacaatttttaactgttcaggctagactgccaaaacttgagacgttgacccagtaatctagacatgttatcgggtttcgaatttccacacgtcaatgccgaatctccttgtcttcgcctaaggtttcataaccctgttttgtctaaggtttcaccatatcttataaaaaagttctatggtttgtgttctctaaatgtggttatgaagtaactccatgtacaataggtctctaatagcactataattaacttgctaaatttttaaataaaatagctagttaggcgccttaactaacttgctcaacttattcagatagagtttggattctactgaactgaattttttcttgaaatgaatgaagtgctagctcagctccacatcagagccattagccaggtttttattgcagccattcttttggcattagccacacattcggtggaaaaaaccatggtatggtggcagaggatggcgaaggagagcattacaacaccagtttcgcaggtcgggcattgtgctggcgattatttattgcataatcaataaactgcaaacgctacagttacataaacaaaagctagagctaccagaaacaactggccaccaagagagttagccccaatatggtaataaaaaagagctgtgccccagcactcggcttaactcgacctgtcttatggctcaaatatcggttagcagcacatgtcctacaaaccgactggaggaaaaacgtgataaatccgtggcccactttatttaacccactctgtaaattgccgcggcttcaatgaagccgaaaatgcaaattgaaacccaatctttgtggtcgctgcaacaggcgggcaggcaaactgcagcaatataaaaaaataggagcacaaaaaactaaagctaaaaccgaaaaccaaaaaccgagaccgataccagaaaaggcaaaaaacccccccttttttttgctggtgctaataaaaagtaatgcccacaccgcaaaataaacgctaggaaatggacacgagtgctccagctcgtggaaagcgaaatgatggtgtggaaaatgtaataaacatgttgaactgtcttggccattttcctttcataccccctcccccttcgccagtcggtatatgtatgtatgtaaatatgcctgtctggctgtctttcagtgggcgagacacttggaatatgcaattatgaatgcaaggcgatgtttacctcatttgaaaattagataagacatttatgggcaatgaaggaacgacttgatttggctcctcgccttccatggctgcctttctgtgggcaaagtgagttggctgaaaagtgaatttggctgcagtctgtgttggccacgttgcggttaagttgagattatcgtaatagagggacttacttcaaaaagggaaccaaaaggatggtaattactgcttaaataagttgttgaatttaattaatatttacaatcattatttattaaataaaagtgcatttggtcaataaaaatagctgcggtgcgtgtaatgcgttatggttaaattgagattgatattaattgggggtattaagtttaaaagggcattaacttaatatgtggttgaaaattatttaattatttgttaaatttctggttaaattgcaacttatgcctttatggcctttcctagtttataagtacagtacttacaagcataataaaaattattttcatgttcatacgcttttcttttaatttgcatgttgcaagtgttgatagttacagtatagagacattagttaatgtcgttaatataacttgaaattttaagcgactggataaatgaccatggttggtggtatattgcaccaacttaaaaaatgaaatgtttataattacgttgcttacagttagtgttcgttgcgttattaccgtcaaaattggcttttgcaatagtactttttttggagtaaaagaaagtagccatataatgacttaaaatgcactgaaaaagaataggatcgaattcaaaaacaattgccatttttttttgttttgatcacttgggttttcatttatttaatggtgtatcattcatcagcttcatttcgtatgagatttttcgtttgtttttatacagagtcagaaaatatttggtaaattaagtactttttataaatccgtttcgtctgcttatgcgaacaagcaacataacatagatgtattacaaactaggtatagcaatgaatattacaaacactaatacaatacgttcgattacaaactgacttaaataggcgtcttcctatctcgaatatcgcacaagcttaaacgctatcagtagtcttatcacacgctcacaacgctgggacgctgcacacaactggatggattgatcgtcgtcctgttgcgcaggacacgaatgtagccatctcacttgggaaccggaacgggtgcacgagtcgggtggaccagagcagaagagggaggagccgcggctggaggacaaaacagcagcagcaaccacatcgatgttgcacccagatggtgtcgcttccgtccatccaaggttcacaaacacaaatcgtagcagtacagggaagcctcgtatcctgggatcctttgctcctggatcaactggcaactgtgtctgtgttcgatcgggtgtgtcttggagggtcgggaagtgggtcggtgttcttgttcatgttttgatgttgttgttcttgttgtgttggctgtgcggcccaaatgtgtcgcttaaaagtcttaaactaaagttcctttacaattcactcattcacagtgctcacgggtttcgtcaacgttttcaaggtatccatttgtgttctattatcggttatggcttaaggctagaagagagttcggtctaaaagctatgttcgtcggttactcgtctggttttcactgaatctctgtcggttatcacgttctgcatagcaaagtgtgtgtggagaaaaggtggtacgagtacgagtatgatacggtatggagtgatgtgtggtgttatggatttgggaatctttcttttcggatttgggaaatagtggaaatggaagtggtttagcttgccatcccagttcattctcaatgctgcaaagaaaagcgaaagaaggggagagaaagagagaagatttcgattcaccaggttagtaaccgtaatatgaatgataatcatgagaggcaaattcatgctccacctcgtgctcatgttccacaatggggtgcgaatggtgatggatgggcgcgtggtgatgatcctcctcgatgtgcttgtggtggaactccggctccttgtaggtgacatgcttctcatggtattccggcacgtgcttctcgatgtgaacatggacgggcttctccacggggatcttgaccgggtacggaacgtgtttctccaccttcactggcacttccttgatcaccgggtagggggcgggcacatggaccttgacctcatagggcactggcttctcgacatgaacgggcacgggacgatcatagggcacatggacgggcactggcaccttcttgatcacgggcactggcactggtttgtccacatagtggggcactggtttgtcgatgtagtggggcactggcttgtcgacgggcaccttcaccgggtagtggacaaccttctccacgggatatggcttgtcgacgtgcacgtgtttctcaacattgtagtggacaatcttttcgactggatagggagccggaacatgaaccttcactggcacatggaccttcttttcgactgggtagggagcgggcacatgaacctgcagacagaaaatccaaagaattagaacaccgattgctgggaatttccgtatcccaacccaccttaacgggcactggtcggtcgtagtgcacatggacgggcacatggacctgcttctcgacgggatagggagctggcacctcgtagggaaccttcacgatctccttcacctcgtagggaatgtgtttgatcaccggatagggctttggcaccttgaccttaacgggcacatggatgtgcttctcgacgggcacatgtacgatcttctcgatgggcacgggcactggcaccttcttaatgacggtcagtgtcttctcctcgtgcaccgggaagtgaggcacgtgatgatggtgatagtcctcgtagtggtgcagtcctctcttcgacttggtcgtatcctcgctagccgctgcctcggcagccttggcctccggctcagccttcttctcctcggcgggagcggcggccttctcgtcctcagctcggacgtagctggtggccaggagcaggaccaaagccagcgatgtcgctgtgcgctatagattaaagaaggtccaggttagaaaacagattttatgtaatttcataactttctgcagctaaatttgcatataactaacgaattccggtttaatgaaaaacatgttgactatattgttttaaattctaacatatttagatcacaaaaagttcatgtcggattgcaaagttagttttgaagaagaattcgtatcgtttaaatgcatttcaaattgtgcatataatgttgatttcactatgttttactattccacgttcttaaggtatttctgcattctatgattattactgagtccttttaagacacttttccactgcacacattcgtcctgccaccgatactcaccatcgacttcatgctgctgcgtttatccttcgatgaacgggaatggaaatccgtattcccaggtcgtgtggcacgcgattcgagaactggacgagaactgatcccgtttttatcgagggggatggtggctattgatcactattccacacgttccgtaccactctaggctgtagactgttcgacggttaacggtttaatgatgccaactacagcgcctgcgcgcacttttatagttggcaatcgaaaggcaggccagccaagtcactacgccgccgaatgaatggatgcacgaagcgaagttaagccgaagagcataagcatacggcggccaaaaaccatcggcaacaccaataataatcgcaatggcccaaaacatacgcggcgcggcgaatggtgagcggtacgctgttgttgtttctgttgttgttgttgtgcggttgcctgtctactttgccttcggcggtccgctggatttcggaggcgcgaagtcaacccagccaagcgccaaatgcagcgccaccgtctccgcaaaaaaaaaaaacaaaaaaaaacaaatacaagaatggaaatcgagcttgaatatactgcaatttgcataccctttaattaaaatgggttcagtgagtttacttaaaacatacttatatacttgaaaaacatataaaaagttgaaatgaggctcagaaatcaaaaaaaaaacttttatcagctttgggctgtgaacccggtgacttgtagttttggttaagaataaaaaaatttaacaaactaattatgtgacatgcgcttaatagaagaaattaattcatttgctggtaaaaccatattacaatttgattccacttaaaattgttaattaagtactagctattgctccttaagcttaagcttattttctatccattaaacagttgcattgccacattatttccaagcggcgtgccaaagtgatcttaaaagtcgtaaaactcttctgcagagttataaaaaccaaaataagattgcaatatcaataggaggcttcgctggcaccgggggattcgcaggggaatcggtggaggagcacacgagggtctatggatgcgtgccattttgctgtttaattcgactaccgtcagctgccgcttatttttgcttgcttcttgtggctgccgcaaggcaatgcacgtaaaaggcttgagaaaccaaagccgcaacggcaactttagcagcaggcaccacaatttctggctggtaattgaataatactcatatggatgagagccgccttcaagccacttcaagtgatgagctgttcgctttgttgtcggttttcatttcaatgttgttttcatgttaatcacacatgattatgtacttgctgctgttggagttttatttgcaagcaccttgtaattgccaattgttgtggggtcctattatttgattgaaatagaaacgaaagatagacctgtgcaaatattttatccaatattttaaaagccatcatgtgtattgtttattgttattaattggttaagatttttaggtattaacatttcccataattagtaaatgcagcttaggcaattagtcgtagactaatagttgtccaaattcacatataaatcatttgtcatgctttgaaaagactaatctacttcagcttttcctttcaccgctttgaacgcttttcctaattgaatgcttaaccaatcctggttagtttttcctcctattaccagtctttacccccgtcgcttttgttagacgaccgcctttttttcttcgtgtcacctgattttccccttcctcagcctgaccacagacaatcctctgtgtgtggctgtcatctgcatccttttactttttccccacttgcattatgccattaccccattcaccggacccaaccccaatgattccagaccagtttccgtgaggttggggacccaatcgcgatttcagctggaaatggagagtgtgtcagtcggtcattccgttgtggttgtgtcactgctccacattcgaatcaccaagcataacctaagacaaagagcaggcacatggagtagaaacagaagctggcgaactgagacgctactccactccactccacgccaaatccaaaccaatccatttcattccatttccattgctgcgtaattaataccgccatcattatggacagtagcgccacccgagtccaagtggaccctggccggggcgggtccagtcttagtccgattaccttcctcgttattatgtcaatgggtcttcagtcagctgtggtttggcacacatatcgagtataaatatatcacacttaaagcatggatacgagtttaaagtgcgcgccataatcgctaattatctttattattatattattattgtatgaaatgcataatattacaatctgcaaacgattttgtagtagctacataactatccaataactatgtctagatacagatatatatttaatttttagaatatttatttgtttggcatttcaaagaccgtaccccaattattccaagagtactggttatagattctaattgatggtattctataaaaagagttatgtagccgactgaaatatgattttatcattagttattctttttttaagcactttgaattgtaaattcctgtgagtcagttgtggctttacactcatgtcctgcaccttctaatccaagacttgttacgatagcaaatattttctcgctttcgttgcatgcatgcaactttcgatttcgtttcgattcgcgtttgttgcatgtcttgaccacattgttcgatgcacatttccacgatcgcgcgaaagagatgccgcatagtcagaagaaagagaggcagagagattggcgtttggaggctgccccagctgatggtgatattatgtcatatgttcgtttgcagtggcgcacgcctggcgtcagagagatgattttatagtacattgtctgagcctcatcaaaatcggctggcgtgcacttacttcctcgacttaattaccatatgctgccatatatatcagcaccatatacagaaaaatatctctactatctctgctccattgtattggcacgtctttgaaaatcatcatcattcggatcggagctcagccccagcttctttgtggcgatattcaggctgcagctcgtttgtttacattgttttgtggcctgaccttgccgcatttggcgataaactaagctttacataaataaactcatctataatatttttttatcgatgcgtctttattcaccgacaaaggtgtcaaagttgaaccagctgtcgattgatcatcgattctgcgatttgcattcgctgcctgatttgtgtaacaatttatttattgtcaccgctcgagcattccattccacttcgttcccatttcgggctgtgatgtctcaaatattggacgacatccagcaaaatatagagctataagccatgtaggcgaaaatgacagttatgacattttatgtgccgtttaccaaactgccattcagctctttgtcaccaacaattgcggctggttgttgtttcgctagtggtttccactttgctaaggtgtatatatagtataactgtttttgggtctcggcggttaagccgattcgcgttttgtttactgccattttttgtttcttgttttttttttttttggcttgggccaccgcagggttcattgcattactggtcaaggtcgaaactgcggcttgttagcctgcccagctgaccgaatagttggctctgaaatggatactcagtttgtgatggtgggtaacctcacgaatcccttggtaaagtctttctaagaaataaaaaactttcattaacttaaaaaacatttttaaatgatttttagcttgcagttcctgcagtaacttttcgacatatgaatatttaatgtacatgaataagaaaagacatttagatagacgggcttataaaaatgctatgattttttttataaaaagtgccagccatccacgtatgtgtaaaaacagaaagtgaaagtccttgaactgcagttagctgaaaggggaaaccccaaaagttcaatgccaaatcgctgtttgcccacccaaaaggtctattaggcaaacaaattatgaacttatccacatgatcggttcactattcaggttaaagaccattccaatgaacttgcaatacgtgttaactgcaatcactgtcctatttacaatcggttggctgagatcagctctctacttttgtactcaagccaaccgctccctcaatgatcgctgcaattagggctcgatcggggtttacgatctcgacttaacgcatctctaagccgatcggcgaaataataataaaaaaaatacaaaactggaaatggggtcaatggcaaaagcatttgaactcttgtttatttctggcgagtgtgtttatgcctccttttattttggcgtgaaaactctttgagtattcactgtccgagaagcaaagtttttggtaaaatttgttcacgttgtcacgcgtttttaaattggttgagcatagctcaattggatcatagaaatacataaatattcaatatagttttatgcatctgcagctaagcgtgacgttcacctcataaaaattgtaggcttgcagcctctctgtttttgaggggagtttactaagctaaactgattaataaggaagttgagcctgcgacccacctgcaagtttatgcagattttcattcgcaaaagccagaaaaaccagtcaaagaaaaactatttattagcataataattccgcctttggcccaacttcgagttggccagctgtgatggggtgtaatagctgacccattgacttagtcaacaaattttgtgtttccagcgaaaagctggcgaaatattatgaggaaaatccgctggctgccgtcacttcttcaacagaaattattttaaataaagactttaatttcgatttcagttttggccacaattcccccgatttgtttctcgtggccataattacaacaacaccccaagttggcaatcaaatgtacagctcgtgttgttgccacaaattgcgtaaattgaataaacattatgctgaagtgtagcccagggtagcaaacgtatatgtacatcggacggactggtccgtttcttgtctgcattttcgttttacatttggtaaatctgtttttgcagctcttgggtttcttgccttctgagccacacgccgcactgaggcgaagccgatgttgttgttaagtgtgaatgtggatgggcaagcgaggggtgctgcagtagttcttggataagagtatcaataattgggcgctttttatatgaatcaacgaattcaatgtgtgaatgaaatgaaatccgctcgcatatcattttacaataaatgtaattaaacacaatttaagatgacagttgtatatatatttataaaatttgataagccagtatgatttttatgcatatatgatagaaaggcactttcattcatttattatcaaacataaaacctttacaacttttcccgccgacctcggttagtctaaaaatatagagcggagcgtaattaggcagcacttaaatgactgtaattaacaaaacaacggcaataaaagaaaaatacgtttgttaagaaataatctcaggcaaaacggggacggactttaaatatccttgcaagtttcataaattaaaaagccaaaaggaaaacctaaaatttttgagaagccttgttaagtggctctatatttataagttacctacatatgaagtcgatgaagttatatgaataatatttctacattgattcaaagcatgtaaacacgcaataagaaacttgattgcgcgaatcgacttccgaacatgaaaataagtaaacagggaaagtaaatactgtacgcattattaatacattcattgttttggctgtgcatatataatatttaaatatagttaaggaattgaaaatgtctataggttgcaaccattttgacatggacaatctaaaattattcattgcagaatttatttgaattttttttaatctgcattgtgaaaattgggctacttttcggccattaaagatctgctttgtgattaatgccaaaaattactcatacaagatttggtcgcggctttcgttcatttggctctgtgtgattgttgaaatgtggcaacacatttgggtttggaaaatttctttgcaaccgaaaagttgcgggcaaaagaaattgcaagtcaattaccgttagacggtttgcatggcgccatgacgcaatcgccacatgtggcagccacacaagaaaccacacagaaaccagccgttagcagccacaataatatcaggcaagccgacgtcatcagcatatcgctaattgattgcgtctgcattggttgttgctgttgttattgttgcattcactttgcttttggctttttaggtcgagccattctccattggcacacacacattcgcaattgaagcggcacgaacaagcggctccgtttctcgggttaggacaagatcaatgttgttggcgttggtcaatccaggcaacaggttctcccaaaacgaaagactcaggcagcgaacttgaaacgcgtattggctctttctggactgcctgtcattgcagttgattgcgccgataaatgttagtgctctaactcacgtgcattaattgttgcatcacttttacccgccttgcttttcatttcgttttttggcaaatattcacaatatttttcgcttaagtgcctgatagattatatgtatgagatgttgtggagtaagggggaagtaatctgtttgaagccgaagggtaggcatttctatgcggagcttattaattattaaggcttaaaaagcgttttaaaatatatttatgaatattgcatacatgaagccgattttccttatacgcacgtagtaaatgttaaaatagagattaaatagagatagacagaaaagcattaatacaatatttgctgcaggtgttggttttaatataatttcaaaaatattaaggtgcagaaaattctataaatatgaaggtgtacaaaataaataaaataatacgacattttaatgagtaatacgattttatgtctttggtcgacttacaaaactattccggtcacgacaatcaaatgctttgcttttatcactccgcaagtacacattataatacaactgaacttactttttattattgtacttgtcgtcctatcaatgtgaaattcacttatgtacatatatggcttttccacttaaatgaaactgataagaacggtgctttacatgaaattgataattcatttttcgtttataatatttaaattctctatttgtgaacatctaacttatgttttataatagagctgtttgcatttctgcattaaattttacttggcggcagttattacctaatgcaagtcgtcgtttttggcgaatacgtagagcaatcacaaaggctaaaacaattattagagcaccagttccaataagaattgacaatatgagagttttgtgcttattatttaattctgtcaacgagctgtgcgtatttccttgaccaaatgaatccgatttcggagatgatgattccgtatattcggttaaatcgatagtttctgtagtcgatgttgttgtgggttggatgggcacacatttttcgtcggtggatttttcgaagcctgcacaacacacttctttttcttctaatttggttaggttctgaagaatttggtaatcttaaatacaacttggtcattgctctttatatggagcttaccagcagcttttttcctgtaggtatacccaattgctggaaatatttggcaaattttccaaagtcctccaagggcctagtaaccattttggtataattaacagtaacaacctgacgacataaatgagaatttacatcgcaactagagattttatatgtcaagatgctgagtgcagcaagcaataatatcttaaacatttttatatattcaatccgctcttggaaacacacaaaaaggaactgatttacaaaatgagaattaagatacatttcttattctgaaaaggtcagtggcgtcgcattgtatttttataaagcaaatgtggtttatatattccattttgtgtagatttaaaatacaaattttttgatatacatatatagtgaatatatataaaatattgttattccctgggtactagaaaatccctctctgatatattttttcgacaactctgtgcgaaaagataggaaagctataggaaagataaaaaaaagctcgacttaaacttagtaatttttttcgatgcatagcgctaggcttttacgatattgggttggcatgaaagccattaggacaacatccatatagatacgtttgtttgtgagatcgtatttgttttctcatttcttttagataaatagatattatgtataatattattattaatattattcattaaaatcgccatataattttgtaagtttaattttggctaagaagttttgttcagagtgtgttcgactttgttatccttttaagtcaatttttaattttatataatatgtaaaattttaagttggtttaattgcttaaaagtataagctctttatttaagccttgattctagctgtattaactaagtaacagttcaaagcttaggaaagcttaaatatataattttttgttgcataaatttaggcctactcactaaatttacagttttaaaaacattgtttgcgaacaattacttgacgcactgtaatgcaattcagaataattcccaaaatttataataaataaataaatcattgcatagttgtgggaatatcctttgactaaaataagctgtattaatccacttaagagtaactccacaccccctcataaaaattaataaatatccataaatatataatatatatatatattatatataaatatataatatgtaaatatataatatgtagtcctttatggctacgttttaacttgacagatatataacttctgtaaaaaaatgtatttattccaaaatagcaatgcagcaatacaaattaagctttcagcttaaacaaaaggctcattaagtgaaaataccctatataccttaaaaatatcctatcgaacttctatcttttttttttttaatggaaagcccagtatttctgaaagtacaagtcttaagttttttttttttaattttcgttttatttacattatttaaatatgtacaaatatttcatagaaaagaaatttacgtgaaaaagtcgaaggagcaactcgtcagcagttatttctctgtgattgtctacaaaagaactgtacactcgatggatttggatgccaggagacaggcacttttcaaacgccccggatgggttttggcaagctttctataatggattgcgtcagttgtgtgattttctcctggttccgatccttccagaatttcggttggtatcacaaactaaaactaaatttgtaagtcgtacgttggcggttgctgggcgtggaaagagagggaggggtgcttgattcttaatgtctgttggatactttcgacttgttggttggttcgctcgccttcacccgacttcacttctcgcttggccctcgacagcattgcgatttcatctactttttgtggaggtagccaccgtgggcggagccgccgtaggaggagctgccgtaggaggagattccgtgtccggaaattccgtatccggagattccgtgtccggagtagccgtggctgatgatggcaggagcagcggcaacggtgtgggtgacggccacggcgggcttgacgtggctctcaacgtggacaggcacgggcacggccaccttgtagggcactggacgctccacatggacgggcaccttgtggatcacacgcttctcgacggtgtatggcacgggcttctccacgggcacggggtatggcttgtcgacatggacggtgtagggacgatcaactgggatcttcacgggcacacggatcaccttctcgacggggtagggctggggcacctcgacgggcaccttcacgatctgcttgacgggcacatggacgatcttctccacggggtagggctggggcacgggcaccttaacgggataggtgacggtcttctcgacggggtagggaacgtgacgctccacctggtagggcacctgcacggtcctcaccacggtgttggtgtgcacctgggtgggcagctcagcgacagcgggagccactggaactccaacaccgatgccggatcccagaatggcgcctcccgccgatggtccgtatccgtagcccagaccgtggccaatgccgcgcttctcctgcttcttctcggcgggctcggcggtctcgacggccttcttgggtgcctcctcactggcgttggccaccagcacgcacatcgccacaaggccgaaaatgagctgcaatgacaagtgggttaaattcgatagaaacccaattggcttggtcgggcggttatgcaactgcagccgcttccggctccacctccgcccgattactccataatttggaatatgacaattatgcaatgttgggtggaaagttggctgggcaaccagccaagttcaattgtggcctaggccccctgacatattgggcatgcggcgtatacttaatgtggcttgatattttcgcaataattcggttaaaatacaaattggaagaaggcaaattcaactctttgtagtttcgcgttcaaagctttttaatacgaatctacatttttgttttcttttttaaatgctaaaaacatattctaggactgcctatccttttcgggttaaaatgatccttaacacttttcgattttagtaattatgaaatgtgatttctttcaataagatttaaatgtagaactggtaatggaaaaattaaatatttcaattagttttctctctaaaaatcctttcttaaaaccatgttcatatttacttgggtaaaccaaaatgccacaaaaaagtaacatatctagagacattttagaatatccgttctatccttgcttttgaaagagctgatgaagtcgtgcaaaaacctttttaaaaatactttaattgcaacaccgatatgtctacattgttccataaatatatatatatatattcttttgcaagtcactttaactgaatccgagtttttgaaacacaattattctaagcagcacttcgaaggagaacacactgagctcagaccgaacataccatggatttcattttgcactaggttagctcctcaacactttgcgatcaagatgggcttgtatgtctcaaccaacccgcaacagttaactgaataatttcgcacagacgcagcgagcttttatatggccgatgctgtggcgggattgtcttcagccgcggctgcgcagtcgacgtgaatcgagatcgcagcagccgtgttgaaaaagctcgctctccatccgttcgacagctcctctctctcttggccaactgtccgtgtgagcccgtggcccaaaggaaatgcgtcagcaagcgagctttttcgaaagagggtgcctcacacggacagtgtccatgttgtccgtgtgatctgcgcctgtatgagtgcgtatctgtgaacactcgagctccaactgtagcgatctttgggaactactgaaagtattcagacaccaagtaactgggggcacagtttagtagaaagaatcgtttcttgccaatagccaacataacaaacatagcaaatgggtaatttcgtttaattttgccttaatctaccaaagagatccaatcaattcttttggagaatcgctcttaattgtacagttcaaacaatatagacttttttaatcatatacgtatgaattttaatcaacgactttagagttttagagtctcagagtttgtttctagaatattcgaaaagtgataaattttgtattgttaaaattttagtaaacagctttaaaagtccttagaaagtttatgtaattttagatcggagcccttcctccgacgtctttttgcgcagttagtattgttatatgtagccattattatattatcattttccctttgtacaaatatatcttattaatatattttttgtaaaaatctcacataaatacatgaagtgttagtgtttgtttcccaggtaaaattacattaatgaacacgacaaataaaataaactacttgtatttcttaccattttacataaatctttggaaatcaacacattcgaaaagaacattaattataaacataataattattcaattaaaaattaaatattaacaaagttaaaaatgaacataaagagtttaaaatttatggaccataaataaatgagtaatttttggctggtaacgaaaccttcataattattaaaaaatatatacattaaaaaagagatcacaaatacttttctaatgcataattttgactagtccttagtgttgggaaatttttgccccaaagccttgagccattaataaataactgaccgcgagcacttcagtcacataatcaaattagacacaacgggcaaagtgttccacagccataagttaaattcacattagccacacatttccgaaaatttcaggttacaaatccagttgcagttgcagttgcatattgaatgtaaattgcttggctgcagaagaaacatgcgccgcatagtctgcttgattctgtgtggcttcgtgactgaacttttgatctcggatttgtgtttggctccgtattcttgtttgcttcggtttttttttctcagctttttggccaggctgagcggcgttttaagccttgatatgggtgcattgattgaatgctgtggcagtgtgggtaatttgacattttaatgctgcagaggaaatactcgccaatggccatgtaaatggaacgtgtgaacaatgagtggaccgcaaaacgcgcacaaaggagaacagatacgggcaccaaatcatgttggttttatgtgcattaatttaattgtggacataacgccgcggacataatggcaaccgagcgtattaggctttgtaatgtgcagttgaaggcgaaggtcgccagacatcatcgccatgatcaacaccacgatcatcagcatcacaattggtggcaaagactgagtcaaagttgaactacataaatgctaggccttgcccggcgtggcgcttcttttgtggccagtattttttttccagtcgtttttgttttttttttactaatgtgaagcagaatcatagcaatgcagccgtgcggatgactaaagcgcttcgaataaaaatatgcaagccaaaaaacacgaaatgaacggcaacaaaagagcccaggccaccgagctcaagttcaagtttatccatcgctcttttggtcattgtggtttcctattcagattcctcggatttgatgaattttctagatcactttcattttgttgttgattcgcgaacatttgaataaatggacagagatagatcgaatatcatagattgcggagctgtttttgatttaaataccgagcacttatgcggatgaacgggtattttgattttaacagtacccattgcatattgctgtaataataattttaaatatatccttacaaagactctagcaaaagatattaaaatttttctgtttacttccttattagaggcttatccattatcttttaaaaccttcttaaaaatgttgaattaattatttaattacctaggcttatttcaaaaatgtgcgaccactaatcaaactaaaatcgatccaaaaatctatatggaaggcacaaaataaattagaaagtagcagtttttcacaagaaacatatgataacactgagaaattaattatgaataattgaatattcaatttccgtttagatatgcaaggtaatgctatattcagttttcaatatacaattctacatttcatttgcatatgattttatccgcgtctatcgaaagaggaggttcatctattagtaaatttgttgtttgacattttgcgttcaccagccgccactttaactaatataattaattaaagctaaactgacgtcaaagctcagctcataagcaaaaagaaattatcacagatgaagtaaacactttaaagtttggatgctcttaaacaagaatacgtttgaattgattagaatatttaaatcttgtaacaaactacaatatttgctttaataataaactctactgatttaattgattagattagtttttaaccgtcttccatgatagaagttattatgcgtctgaatatttaatattattttgcagggtattcacaaccagtatccgaaatcttccactgcttcttttgtataattctgttcttttctaaaagagttgagccgcaatttatggaattttcggggattttttgttgaaaataaagattgtataaccaaacgaattaagcatctttatagcagatttgtttataaactctcagtcagcgatgatgcccagaaatgttcttctcttctatccaattgtgccattaaaaatgatttaaatctaagacacaaacaaaacacctttcgtgttagagggtcataaaatataccacatctaaaaaataaacttattcaatttagttaagcgacttttcgtaagctttatacggctttcagcaataaaagacagaaaaaaacccgaaacaagaagtttgctatataataaaacattatatacagatggtaattaacagttcgaacacaaaagagtgtcattaattatagggcagaagcacttatgaatttcattcaaattcgttcgatttattgggtgctgcttaacatttgtcatttgccatttgttgccaatggattttggcaccttctccaaatcgccaagtcctcaagcattctctcgattcgattgctccagttttgagatgccacacatttgtcaatcgaatgccgaacatgtttcgatgtctgagccgtgcaaaaatgccccaaaatgctaaaatttgctacgattttgtggccaatcaaaattgtggaaccactttttgtgctgttgccaactaattgcgacctaatggagttcgatttgatttctaaaatgtctaaagtgcaactctctgaaacttataacttgatcgaaatacaaacctattggctatacaagctaaatatgttgacaatcagttgattagcacaaggaagctgataccaatccaaactcattatcatccacttcttctgttacctgctcatcagtagatcttaacccggttaatttatcataatcacaagttccgaaaggaaactgcgaaggtaatgccagcaaacaccgaacagtaagtgctttatttaattgagcacaattttttcttcaagttttagtacttgcattcagggtcttttttcggtggtagatcaggcagaaatttatcataattaaagagacgccgccgagcgacataatttgacccaaattttgaaaattgaattcggaatgcgaacgaagtggcaaaagattttctttggatggccataaacgttttcgtgccggagctaaggtcttttggatttcagctagaggttttgtctagatcggcctgggttttgagcccgggcaaataacatttgtcaattgaaatggccagaaaaacagaaacttgtagcaactgcgggtcgaagacaatcgtgcaaaaccttcgacatttaattttgtttcgtttttgtttatctctggtctgcacgtttggttagcaaagaaaattgtctagaaataaaaaaaaaattgtttacatggagcaatttttgttgcctcttttttcttcgcttgataattgcccgcaaaaaggtcataagagagcccgaaaataaatttttgattcgctcgttgatggacacaatttttcgccactgtcttgccaccgttttgacctcaacacccacaaaatgaacaaaaataatgacctttgactcgcagtggttcgcacttaaatctctcgtgctgtaatatttttgggaaaactccagttcggcctacaacaatagctggcgaaggaaatgaccaaaaaaaaaaaaaaaacgaatcttttgatttgacattttccatgtaattggccaaatgcggttaggggcccggccccgcttcgaaccttgaattatcagaccaccgcagcaccgccttcgaccgccgtcgaactcgaattgcacacggaaccagactccaaagcctccaaacagaacccgaggggaaggcccccccatccaccgatccaccgatcttggcggctgactccagtgaggaactggctggtacgccctccggaacgcccacgcaaacacctatagcagccagtttgacggcccaaaagtcgttagcaataatgcaaataataaagatattagttgagctgcgtcgtgagtgcctatataagataattaggaatctagataggaaatactggtatacaatttttaaaaggttccgaatttatttaaattttaaagtgatctttctagttatgtgctgaatttaccatttaagtcaatggaataagcccgaatttatttatctaagatcctgagaatggttaccagatgttttaagagttgttctttcatgccgcttcattgacattcttgttttcgtgtttgctgctagctcgtgtttggcaataaaaataaataaatcattttgaactgtggccattgttcgtttgtacgaaaactgtgcagcaattagtgcaaaaaactttaccaacattaaaaaaaaaaacaacagaacttctaataaaaacgtaacgaataacaatagtttggctggcctgggaattatgtcgtttgctcgacttttgttgctgcattttaagcaatatggcggtgtttgtaacaccgtgtgaggtgatgaaaatttttagatttatgtagcaagcatataaaattcccaggcacataattgtcagcaccgcgaaatgcaaatgaaatatgtcaacagattaatcatcctaaaaagctaatagaaatacttatagttggtttcataaaaaaggttaggcttagtgggcttaaaccgaataagtactttatttacacttacaatttgtatatcaaataaaaaatgaccatttttgtgtaattgagtgatttgcaaaaactgcatattaacttgattcgtttaactaacccaggcattttcaattgctcgattgacatttagccaactacatggaatgccacgcccatttggatcaatgaaaaattaggcaaatgatttgactgcaacaacatgtcatgactcgactcgactttgtgaaataaaaaattaccaatatcaacagcagccatcccacagaagacaatgaatggacagaaaacgaagccagtttgctgcaaatgccacagtgacacactaactgggtgactccaaaagccgccacaacagcaacagcacctaaatgcaaaaacaaaaattatgcaacttctccaaagtatctctttttcgagcagctgtagcagcggcagcaagtcgcagcatggtagttggctggactcctgcagttgcctagtgccccagccagatttgggaatctgccgctggtgcagcttgatttcttttggatatttgggaaagatgttttccaagagattttcctattcaatttgggactacttgcttggtgcttggtccactccaaaggcgttggctggcatttgttgttcgcccgcttgacatagttcgcggctgagataaagaacttgaaggagtgtccatagtcccagtgaaacactttcaatacggaaacgtgccactaaagctgggaataaatcgcagtgaattcgagttcgttgcctgagtcttttgtttcgctggacgttcgctggacgccggtgaaaggattcgcgcggcgcaactttcgtgcgagagaaacacacccgtggtcgagactaggccaggccagaccacaatttacggcaataattcaaaagatggattgcataatactattgaatgcgatgcggtagcatttatgcgcttaattgtttgcaatttgaatgcaccatcagatggggcggagatgagtacggacaggtggttaatcagaagtcaaggaggtcgagtcataagtcgatgtcaagatatgatctggagtgcgctatagatggagtgagcaacatcgttggcagccaaaaaaaaggcactttagttataaatatatttttggggtagttttagatgttttccactaaattacttttcttaaaattttagttttaagctttaaattgaaatggcatatacataaatctttaattaaaccccaaaacgtaaatttagatcttcttttattgcctggtttttatagttttccatcgtcatcgccgtggggtcaacagtcttagcatttagctgaaatgcgatcatgcaccatgtcaattgcattgtggctataacaagtattttatttgccgaatggctggccaaatgaagcggcaagcacaattgcagggcaggcaaaaacagaaggcacatacgatgtagggggagatcttgtgggagggtctttcgagggggctcggattggttaggagacactgagatttccagattgccaaagacgttcgcttcacttgacttgcgcaccggcgacttcgattacgttcgcaatttgagttttcggttttcggtttcggttttgggttttgagttttgtgttcgagaaactggtgcaagttttttttgtcgtgatttctgtgcaaactgctggcgagcagacatgcattttggccaaaggaaaaaacatcacatactttaactaaaccaattcatttcgcaatcggccgacaactgtttgacgttgcagacgcattcggcttggattttggcgatggacaagttggcggtgaccttcaaaacgtcgccgccgactggatagtcgctcattagagcaaaagtttcacatttggcaatatgtggaacgtctttagttggccttttctcagactcaaccgaacgccgagaattgcgaaaaaaaattcgttttcagtttgccatcttttgtcggccgacgttgcgcttgtgtctccatcattttgtggcaattaattaagtctcaacaaatatgcgtacctcccccatcatcaaatcatttccaccgatctccccgccgatcggtgcaagaaatatgggtttaattggccgccgtcggttggctcaatttgttgtcttgtctctcggccggaatggttatcattgcgtaaaagttgcaattcaggcaattccttcacatgtctgggatccaattttttcggagtgtgtgggatctctttttcgattatgggcggaaactgaaccgatgatttattaattggcagtgctccagttatgaggatcgtcgatattgcggatatagactatgcatattcatggaaaaaccttaaacgattcatattattcatattatgaataataaattcgataaaacaaaattaagttgatatatgtactactctccctccctctaccatttctctgccattttaacaattttgtatttttggtatacgaattctatttataataatttaaatattactatgcattactcggcgacctctgaccaagtcctctatataaggttgtgtgccttctatgtaattattaaccattaaaatatatttgtatttaattgctatctggaggtagtggtattgatcaacgtaaaacattcttgtgcaaagtaattcgttgtaattagacccttgatagagagatccgctttataatcgttgcataacccgaaacaataaccaagtcaagaacgaaactaatgcaatatgtgtacaatgtacatacggtgagtgtaagaatgggaatatgggtatttgcacacaacacctacgagtggcaaagtcgagaatataattcgtaacaaattatggttgaaaatacaaaattacgagtgcatgtaagtgcggtgtacccctgccacgcccccaatggatgtgtgcacacgctgtccgcaaagccgccgaccttcaaatgaattctttggcctggaactggttctgaatctgattctaatagcgattctatacggacacaaagatcggctctcttttgtttctaaatggaagttgatggaaattaagtcagaaattaacaagaacgggtgactttttattagaaagttgtttcagttccgtctttgccatgatcaacgtccttgggatctaatcagagtccaaacccgctcagagggctttggccccgatcattaagccaatagataaaaaagaaatacggttcatcccaaaaaatacacgggctgatctttaatatatggtaagcgagcttagaagaactgttttaattggcctcgtttgggtaataagtaagacggaccgaaccggatttttattttatttttgtttgtcgttgaagtaaacaaatgctaaatagccctaaacttaattgattccatccatcaaaaaacaaacatgatcagaagcttttttttgcagtttgaaagttgatattttggtatttgatgaggaaaaacccggcacagttcgttcacttgtcgtaaaaagttgaaaaccagcattaaatatcaagtgactactcctgtttcttacgcatgtggctaaatgttactccgaaatttatgagcgacttttaaatgaactcaactgacgttgacttgaaaatggatggcagtgaagaagtgcacgtcatctttggctacaaacagctccggtcgaccttgtgcgtgtcttgtctcaatctgatcggagatcatcttggtctttaacatcacgtggcccgtaatcaatgggcctatgagcttgtctcctggtggcatccacaactggaaatctttttccgtctcaatgcaaatgcattgccaatttgggtcatgtcatctcagctgactgactggtgagaggattttcgggtttaaggatcaggaaggcgtcaagacatctgtttttattgtgactgagtattattgatttattacaacttaagctgtacttaattacaggtatgcataattcgcatctcttggcttgaaataattactggtatcctacttgttaccttgcaagattaaagggtcttcgtataactttttattaaagtgatcggaacataaagtttttgaaccattccgtctatttaataaatattattagagagctgtaaatattccagaaaatgatcctcaaaaagtctagtaaaaatacattttttaaatattatttatgttgagtagccaccaaatcaaaaacgacagctgtttaataacaacatactctttatttacaaaatatatttacaagatatacaattacaaagaaccctatgacaaactatttccagcagctaaccagtgataaagacagtgaaatttattttatacattttattttatttgtccttaatagattttcacatagatatttctgttcttattatccattcaattcattgtgcgccgaaacctttcactgataaacttggccagctaaactgttcataaatggcgaaatttacaaacagttagctggtatttatcctaaacctggagttcttggcccagcacaatggcttccattggatggctggattggaaataatttacaaaaggcattgcttgtttcatcttgggggttcttatcagctacagagagtgtggcagggcggaagtttgacttccagggggtattttaagagtttgcttctgcgctcggttttggaaaggaaggccgacaggtggagagagtggggaagataattgaaaatgttgctagatatccttcggctcatttccattaagtccgctcgctccaatagattcgcctgcttccggtccattccgtccgcttacttgtggtaaccatggtggtcggagtagacggtggcatcgtggccaatggcgctaacagggtagctgctgacggcaacggtgggtgcgtgcttgaccacggagtgggacaccacgggcaccttcacgtagacggggtagggacgatccacatgcacgggcacctggacattgacggccttctccacgtagacagggtagggcttggccactggcacggggtagggcctgggcacctcaacgggcactgggcgatcgacgggcacatggacgggcaccttctcgtgacggatcacttcgtagggctggggcactggcacgggcaccttgacgtactccttaacggtcacgggcaccttgcggatgacttcgtagggctggggcacgggcaccttaacttcgacgggcacgcgcttctcatggacgacgggataggggcggtccacatgcacgggcactgggattcccttggtgatggtgatggtcttgtgcacatcggcctgcttgctgatcacatagggggcgggagcgtggtggacagcgacggcgggagcagtgtgtccaacggcgatcgcgggaccactgtggcccacggcgacggcagcgggtgcggagtatccggtcagtccgtagccatgtccgtagcttccgtggccggagatggaaccatgtcccaggtagccggtgtccagaccagcatgaccgtagccgtagcccagatcgagcaggccgcgcttgtccagcttcttctccagcggcaccttctcaccctcggttttgctggcgcaggcggaggccaccagcagagcggctaagcagatctgcaaagaattgagttggtgcgattggttatgaaactatgcattttagagacttttaaataataataatatattaattttctagcaaaattctagatatttgtgatttcttaatagtttatttcacaataactaagttagtaagtagaacttgattccttgcaaatatagtttaaatctatttcaaaatgaaatgaaataaaatttagtcatactatcttcgaattctcaactgtgcaaactcatctatcatgaaattcgtatagtctattctttaagtatttgaagcttctctatgataaaacaattcaagatatgcaacctacataaattgcctaacgaaaacgttgacttttatcacccattgcctagtttgatcgattacctaatcgcaatagaaagcgaaggcgataggcgatatgtggcccgattcgcattgtgtcgtccgttgtctcatcgccctctttcgcgattcaaatggtcaagtgaaatttgtgcgtgcctggcataaatgatgcagtgcagtcatcgcccactgccacgcccagtttccgcaatacgcctcaaccgactggcgtcacgttacgcatacgcagtgggcaactcagcgaatgcatttggagctggctttaattgagcacatgaacccagttgattacggcctggtaataaacgtggctggcactccaattatgatcgttcagttaataaacgcttattagccatgtcgttcaagttgaatttggtcgtttgcgagcatttcacctttgattaaggaaatttatcggattgaattgtttcaggaagttgtttgttgttgaagatggccaggtaaacaatgtgaggcatttgcaatgcaaaaggctatattgttccaattagttcatgtcagcattgttctgtatgcaattctttgaattattacttgatttctcacactaaaatatgctaccaacagcgatagttcacatactcgtacccatttacatatcaaactaaattctatatgtctaattactatatgtctgttgtacttacgaatactttcattgtggagtctaatgggacttgccaaggctgtaagtaaacaaagaaaacaataagattatttatacgaaatgcagcatagatatttttttttttataagatcagcactttaattggtattaacaatctgttctttgggaaaatgttccttggaaaattgaagttatttagagcacacggctcgcacagttattagtttataacttttagatcacagcttaaactttatttccgtttcacatagactacacgcattttagaaacaaacaaaaattaacttggcatttggcttcacttacaagcaactcagtaacagcgaaatagactgtggaaggattgtagaatcactagcgattccaaacctttgactggatgctgtctgtggtcagtggcgcgcttttatacccccaaagagtttttgtgtcaaaacgaaactgaaaacaccgccaaaccaagtcgctcagcggtttccaaaagcttttcccaccacaaaccagcctaattgctctcttcaaagctctgagttcggcttggtttgcgcttgtattggttatatttgtgtgtattagtgcggcacggaaagttgcaagcggaagcgctcaccaatacactggcatgccaccaatactcacgcaattgcggcttttctctgtgtgtattggtgactttagccgccaacttgaaagtggcttataaaatatgggtgcaaatgtgatcaaatcaatttgggaacataaaaagcaaataaaataaattaactaaatcttgaattgaaatttatattgggaaaatcccgcagaacgtactagcaatcctttcttgttttttttttgttttatttggataaaaagtcttcgggcttcttagcaagttgttcccaaaaatatagatttcaacgaaaggtcatatgtctatcaaagtcgttatgttttgtttgtcaagtttcagaagtcagcagttttggtcgaacctgattcctaatatcaataattctgagtctacctaatggaaattcaactagattttgttttgattccattaattaaaaaaaaaaaaaaacttgcttattagtatcatatttatacgttcggctcgcattttaaacaaagggtctataaatctggaattgttcaaaggggtaatctggttttaatcttgtataatttcaatataaaatttatttcgaaacattttgtggcccaataaacaaaagtgtaacaaagcaatttctttcatttgagtttaataaatctcaaattcacttagcagatctaatatcgtagaacttgatttaacggtaacttgatttataacttaattaatgtttcttataattttgtatgcatttggcgaaccgaatgttttccggattttagtatttaatttttaaccggattcagatcttttaaaaatggcaattaattacattaaactttgattttgtaattgatattgtagtaagcaacatttatcaaagttcactgtacttgtaaccagttacttgctttatatcagtatacattgttgcaagatagtaatttgagtgtgatgtctcaatttctattgctgtcataattaggctttctggttttcttgccacctttggggtactcgggttaccattttgcacttcctgcaacaaccaggtaaaaacggaagctgcctctctggaatttctcggcatctttgatgtcattgacaatggtttagtgatcaccgggcggaaaaaatagatactatctgcgattgggggtggtgaaaagtgatgcaacagatgcggtgcataaccgtgggctgcgaatctcaagtttcgcactcgaaatcgattatcggaacgctgggtgtgggattgtggagtggaataccaacggggattgcaaatggatctgtgactggaacagtgactggatcgggtgccatgcgtgagatctgcactgtggcgtaaaagtgaaaggcctttatgggtcgccgttgcagtagcggcattagatgcttgtgcatttgcacaaaatcagattatatatcagccaggctgagtccgtgatttggcaattgccagcataattatttgttaatgcgcaaaatgaaacctgttgaatgttggactccgctccaatcggccgactggcagccaaaatgatatgcgtgtaccatgattgactaatcctagtgccattgtcttgctctgacgggcgggaaagatatttgcattttctattgtctatatccgattctacaaaggcaatcaaactaaaacaaacatctacctatcgccatataaagacgctttccaaactctatggtgttttgtcaacacctcagccttttagagctgaacgaataaaaaaagcttgtttaacttttgcctgcaatccgctttttattccttcttgacctgtcaggcaactatcataaatatatctgccgttatttaagctattgtccacattctaaagatctttttaaatatgttaatgggtgtctatttcaggctctacaaactttatatgccacaaaatccttgacgtattttaacttttaatatgcacacgatttttttagacatccccgaatttataaatattcaaacgcaatatttgaaaagctaaaagtccccaatgaaaaagctgggccacttaacaaccgtttaaaatcaacttaaatctgcatataattatgtagtaatcaaaaagagaacgtaagattagatagttctgttaaatatttaaatgtgaccattagataacgcatccaatcaagactaaccgagatacgtaagaggcaaaaccagatttgccttttgaacgacgcccttggccacaaaagaacacgattctgggttgtcttctccattacatgggacttccccaatcccaagccgcagttcgcctgaactttgggtctaaacaacttttactttctacggaaaatatgtcgttcccaatgtttgcccacatggaacagtgccaagtcagctggacctgtgcagctgtttgcccacaacaacgagagttacaattctgtcagacgtatccaccagatactcccacattgggggtggttaaagagagaaagagagggggcgtggcgtgttgcggttgcaacatgaaagccgactggggaaagagaccaccctcgccaagtttgtaggctgctgcagttgcatttcgactttgccatctcagttggcctttttggacgctgtgcggattctcatgttcgaagtcgccataaattgtggtcaaccgatgcggcgttattcattgattataacgacaacaataactgcagttagcccaatgcatgtagccgcctattgatttatggccaattgttttgcactgtgttaatgttcggttgttttgactgccttctgcacgctgttgtggcctgttttctagagttttggccaagcgccttgctctcagactgtgtcaaaggggccccaaattagccaaataataattaggcttatttgggccgcaagtggctggcaatcgtcgcatattcacaatgcatggcatgcggtatttcacacgattgtaagcgtgtacggctgcaggtaagcgacttgaaatccgagttgaaaaacggtatgggaaattccgattcgcataagatgtctaatggcggaaactggagtgttatgaatttgctaattataaatagataccattgtttttttttttaaattttaatactttttccaagctccaatatattcaaagatttttaaataaattttcaaataacttagatatataactacgctgttaattggttttaaatattttttaaaggtattattatgttaattacaagtctttcattatcatatatcatatggaaactcttctcaacatatttagcttgacctcagcatttaagctatccttgcgaatttttcgaacttccatcatcttgaaaattatgagctgccaacgcaaacgatttggtttttaaaccgctttattttgactaccatgccgaactgcaaacgtttttacaacttgttgccagcaagcgagcttaagcaaaataatgtaaaatgataaaaataaaaataatcattgctgcgaacataacaacttgtatggccattcggataggaattggatcaagttcgctgccacgagtctgggttgcctcgattggattgtctggcgattgggttcacaagattattgatttatgcgcacggatctagcgacaatcgaggcacaagcaaaatgaactcaaattaaatgctaattaggttccaaaaagcggatctagaacaataaataatgatacaattaggagtggaattacatagctctgcattttgtcgtatctcgaaaatgagcaatatgctgccgccaacggatcggaattggagttggagtcgaaatcggaatcggaatccgaaactgaaagtgcattgtgcaacgtactgaatcgccatccacgtcgacatcaactcgaactctatttatggcctagacacaaaaccggaccgacttcttgccgagttggagcgactgcatccgcaatgtttctaaacgagaagagaaaaaaaacagtggatgtgaaaaaaataaaataacataaaactaaaccatctgagctgcgatcttttgaaggaagctgttggccattcgctgtcttggtcgcattagtttgtttagaccgcacgcccatggcgcttaaatgatttgctggccgggccaagagagcggcgtggccaacagggcgtatggctaatgcccaggccaatggctcgacaacggcatcggatcgggctggccacgttttctttgcaaagttttggcattttgacatatcaagtgaaaagcctaagcgatttccgacaagtaaccagtttttgcttcggttcattttttgtttacgaaaaactgcacattacaaatgcgcataaattttggtaacatttaaataaatctaaaagttgggaattagttcggtctgtgggtgtggggtaatagattaaacagattgcctaatggaatcaatttgtcatcaaagtaaatttaaggtaatagaatttgacatttgggttttaattgctgttaaaaactggaacgctgatgctaagaataacattcagaaaacgatcacactggtcaaaataatatttaatatttttttactcaaaagcgaaatacttgaatctaattttgatatcgatataaactatatgttcacaatataatgtcctcatgacccaaatcttttatcgcacaaattgagcttggaagtcatgaactcggcatgttaaaattaattgatattgctttcggattcccccactgttccattacaaaacccgacccgtttccacctgatgagcatgcgcatgaaagtcaaggtcggtcttaaaacaaaaggaaggcgaaaaacaaaaaaaaaaatgtgtaactcgcaagtaattttcgcttcgtcaagcgaaacaataagaagtgatatttgccctaagagtaacgacattagcagcaaattacaggccgcagcacaatttcaggcagaccgaaaagcatttcgcgaaacgattgaatgcattcatgggtccgccagtcaatcagtcagtcagtcatggacattgaaccactttaggggcatggctagcaggctactggttagaaaacgccatccaacgaaaccaaaactgatctcagccagtactaacccaaacgtgacctcaacaagtgacattcacatcagttggaagaattgagcttgaattaaattataagctcaaacgagaaatctataagcataccatttatagaaaactagagtacaggctgctagatatatttgagcggtttagtggacacttaaaagccagttaaataatatattttcctcgttgctttccttgagttcccatctggccattgcccgagtcacaaatcctcctttgaaaccggcattgtgcaagaagttcgcggcttaagtcttttgattgtccgctggaccggccgacagaagcagaaatgtcaattgccatcgattggccgaaacccgatggggaaaatagcaatcgatggctcagttcagctggcccattcagcaattggccaaaatgaatggtttgccaacgagacgagaatccgaaaaccgatcattagtggcgatcgcataaacgacatcgttcatacgccccgcggccgttgaataattgtactcgctttgtggtctccgaaaattaaagatttttcgcatatttttcattggtacatgtgttccatgtcccctcaaacgtcgaatagaattttcgcaacatttaattttagcacaatgctgctgaaaaacggctgctgcagtggctgcaacaaaaattggactaattgccgacaatgttggctctgattgactggaccaaagaccgtcaggctggccgagtgtttgattgaatgattgaacgaatgaatggcaagcgttgagacagcaaacggcgaacagcaaaacggcaagaggcaacaccacaccagcaacacgacgaggcagctgcctaatccctgttattgggtcatgtcgcgtctctgggaaaatgtggcgacgatgtggcaatgtggcaaccgctgccaagtgccaaaaacataacacaccaccgaaccaaccactgagccaatgagctagtgagccagtgtgccagtgtaccaagtggttgcagttgcagttgcagttgctctcgtcaatgtggctgaagctgatgcacttaatggtggctgggagttttgcagccgtgatcgaacattgtgaaaagtgaacattaaaaatgccattttttttccaagaccccaacttgcaacattctcactgggaggaatgtttgactgcgatgctggagagtgaacgacccaagacctccaactcaaccatctatctctatgacgtttcagttggggaatccccgagcagaaggccgaaaataaattatcgcctcttccctctcatttagaaagaaaacaaacaaaagaaatccattagttgaacttgttcttggccctcaacgtattactagttttgtatgctaaaaaaatcccaaaaaatccgccaatatgttgcataattattataaatcaatgaacaatgactccgcagataaatagtttctgcgaaaaaatagttagttcctataaaattaaaattttaatttaaaaagcgaaacccagttgcttcggttgaagccacttcgaacttatcttttgaataattgctacccgattgcgcagccgtcgccataacaatacaataaaaatgccataaacataaatgcgattaaatgagcataaagaactggcaattacaagaccacaaaacttgacttttgcatgatttcgaaactgcaagagaacgactttggccggcgacttgcttcagtttaaggcttcaactggagctcgaccttgagccagaatgcgaacgagtggccagcagttgagctgcagctccagctgaatccaacagacaaccgccaacaccatgtacacgaactgtcttacatagccactctcactcgagacaattgacaatgtttaagttggccaagaagcgtgaccgcgaacgttctaagtcgatgtatctttaaagccacgtttccgtcctctttcagatactttttctccacggttctgcagttccagatctatcgaggcctgtgccgcgagtccggccagtatgtgcccggtgatcctaggaagccgctccaccaatgcgacatttatcgccagccagcagcgggaaatattctcaagtaagtaatgtatatagaaaatccaaatgtatcactcataactggttcgttagccgttttcaatagcaccattttatttccacacttctttaacttcacttaatttatgttaaaatatttgttgtttaataaaattaacacatcttatcatgaatacctaaactgttatgccccatcaatcttttttgatttctctatttatttccttgaaaatttatatattttttccctgaaaatatttacagaaagaagtagttgaattattttggtaggaaatattatttgtttaaagattatatcacattttcttataagtttgtatttaatgaatactctgagtgcctctagtttttagtatcaataataatgagacgtgcttcaataatggttttaatttctcctcacagaaccctgatgtccaagggagcctcccagccatggcaagaggtccttgaggaaaccctgagggagggtcgcttggatggaaccgctctgcgggagtactttgctccactggaggaatggctgcgccaggagaatctgcggacgaacgagtatgtgggatggaactacgatggtgactactgcaagaggagcatcgaaactgctggcttgcaggtctttggtggatattacaatggtgcgacgggacaaaagtcagcgccattcctatacccactgatcttgctgatttacctttacttcagcctacgtttattatgaaattctgtcgtttacatgctaacgttaagaatatgtaaacaaaacagtcagacaaattgttgttccacttaatacttccgcttattcaagtcgcacctataactaagttgaacttgaatcaatgccaaaaaatacacacacacaattctaaaattaaataaacaaaaaaaaaaaaaaacaagcaaatgtgacaaattgcccgactggctctgactgcaccctaaaaattgcaacaaaacgaaaagaaactacggatcttgctcgaatgcgctataccccttgatgaactaatatatacaacaaatgaaattatgttaagaaagatgattcatgaagtagattcagacacctactcgaaacattaatttcttgtaaattcctgaagatttcgttgatcctggcatgcagcaatgttctttcgaataccctcttgcaaaaccagtatccaaattggtgaagagctgagtgggatggggggcatttgaggcagcaccgagtgggatggtgtgtgcaacccatgcgggtcattggaactccggcgtcgcacgcacattgctcactcatttggtgggttttgttgttgctgctatggttgttgcttacaatttaatcaaataaaataaataaacgtgctgcaatttcatagttgtgcttttgttttcgctgcagctgctgccccgtctgcggtttctgatggagtcgccaactggttttttgttgtgtataaatttgatttaataaattgcagcagcagcaactttggtgtaaacaagacaatcaacacttgagtgggttggacgggtgtttggggcatattatggggcgttgcacggtcatctcggtggcattgttctaaagtttatcaaagaaatacgacacttaagctaagtaacttgagtggtgcagctcactttccgcatatttctaatcaacttaaatggagatgatttcaatggcaatacgaagaatgtgcaaagcgatttaaatctgttcaagcgag

SEQ ID NO: 40175 - DNA, 2379 bp, DROSOPHILA
atgcacagtgtttcgcttttgggctgtctttgcctcagccttagcctgactttgagtacgggcagtccccaactgaatctgcccaccccgcagcccgaggtcttctacaatggatacaccccgaatgtggccacaactccggcccagcttcgagcggatcgggatcgcgatcagcgctacggaccaccttactccgatgcaggtggaggtggcaacaccgacgacggactcgacgactttaggtttggccagacagatgacgaacggatgaggatcggctatggctatcccacgccccgcgtgaactttagtgattcacccttcagtggggctaggttttccaaccacaactatggacccatttccagtaccaccgaacgtaattacggcaacgacgccaatctcaatggacgctattcggatgtgccctactcctcccaaggagagcgtaacttcaatcccaacgatcagtacaactacaataataatccgaatgtggaatttgtgggcattaacaatcgcaatcgcttcgagaatcccttcctttcgaaccaggatcgtttcaatctaaatcagggctacttggaacgtcagcgatatcagcaggatcgtcgctatcagcaggagttggagaagctgcgcatcctgctggtggagtcggatcagaaaggatcactggagtgcaccgccaatctaaatgctcaacagcgatatgtggagttccagcgcatcactgccgagcaatccaagcggatcaataaggatctcatcttcgaccgtcgcctctacagacaactgatgctgcagtcggaagtgggacccaatgctctgcccctagatgtattggataggtataatcgcctgctcaatgagatgctgttcctgtacaacagcgccgaaatctgtgcctaccagcagccctttcagtgcgatcttcactacataccccagctgaaggacatcatggccaagagcagggactgggatgagctgcagcacacttgggtggaataccacaggaaggcgggacgcggaatgcgggatagttatgagcagttgatcgatgtgatgcaggaggtggcctacgtaaacaatgtcactaatggcggggagtattggtatttggcctacgagtcgggtaactttcgccaggatatggacattgtttgggaacagataaggcctctttacgaaggattgcatgcctatgtacgtcgcaagctgagggattactatggtccagatcggataaaccgcatagcacccattccctcgcacattctgggcaacatgtacggccagtcgtggtccaatgtgttggacattttgataccctatccaggccggaagctgatcgacgtcacgccgcgaatggtggaacagggctacacaccgcaactgatgttccagttggccgaggagttcttcacctccattaatatgtctgcggtgggtccggagttctatcgcaactccatcttcgaacagcccctggatcggagggtcctgtgtgagccatccgcctgggacttttgcaatcgtcacgatttccgcgttaaaatctgtacggatatcaatcagcgaagtttgattagtgtgcaccatgagatggcgcacattcagtactttctgcagtatcgtcacctgcccaagatcttcagaaatggagcgaatccggcatttcaccaggcggtgggcgatgccattggcctgtccgtatcaactccaaggcatttgcagactctgggactactacaaagatccctcgatgagtccagctatgatattaactatctgttcaccatggccattgacaaggtggcatttttaccttttgcattatctctggacaattggcggtatgatgtctttagtggcaatgcgaataagcgaacaatgaactgtcactactggaatttacgatactttttctccacggttctgcagttccagatctatcgaggcctgtgccgcgagtccggccagtatgtgcccggtgatcctaggaagccgctccaccaatgcgacatttatcgccagccagcagcgggaaatattctcaaaaccctgatgtccaagggagcctcccagccatggcaagaggtccttgaggaaaccctgagggagggtcgcttggatggaaccgctctgcgggagtactttgctccactggaggaatggctgcgccaggagaatctgcggacgaacgagtatgtgggatggaactacgatggtgactactgcaagaggagcatcgaaactgctggcttgcaggtctttggtggatattacaatggtgcgacgggacaaaagtcagcgccattcctatacccactgatcttgctgatttacctttacttcagcctacgtttattatga

SEQ ID NO: 40176 - protein, 792 aa, DROSOPHILA
MHSVSLLGCLCLSLSLTLSTGSPQLNLPTPQPEVFYNGYTPNVATTPAQLRADRDRDQRYGPPYSDAGGGGNTDDGLDDFRFGQTDDERMRIGYGYPTPRVNFSDSPFSGARFSNHNYGPISSTTERNYGNDANLNGRYSDVPYSSQGERNFNPNDQYNYNNNPNVEFVGINNRNRFENPFLSNQDRFNLNQGYLERQRYQQDRRYQQELEKLRILLVESDQKGSLECTANLNAQQRYVEFQRITAEQSKRINKDLIFDRRLYRQLMLQSEVGPNALPLDVLDRYNRLLNEMLFLYNSAEICAYQQPFQCDLHYIPQLKDIMAKSRDWDELQHTWVEYHRKAGRGMRDSYEQLIDVMQEVAYVNNVTNGGEYWYLAYESGNFRQDMDIVWEQIRPLYEGLHAYVRRKLRDYYGPDRINRIAPIPSHILGNMYGQSWSNVLDILIPYPGRKLIDVTPRMVEQGYTPQLMFQLAEEFFTSINMSAVGPEFYRNSIFEQPLDRRVLCEPSAWDFCNRHDFRVKICTDINQRSLISVHHEMAHIQYFLQYRHLPKIFRNGANPAFHQAVGDAIGLSVSTPRHLQTLGLLQRSLDESSYDINYLFTMAIDKVAFLPFALSLDNWRYDVFSGNANKRTMNCHYWNLRYFFSTVLQFQIYRGLCRESGQYVPGDPRKPLHQCDIYRQPAAGNILKTLMSKGASQPWQEVLEETLREGRLDGTALREYFAPLEEWLRQENLRTNEYVGWNYDGDYCKRSIETAGLQVFGGYYNGATGQKSAPFLYPLILLIYLYFSLRLL

SEQ ID NO: 40177 - DNA, 10514 bp, DROSOPHILA
aatttgtcatgtccattgaagtctcacatttttcaaatgcattttttggcgctaaaatcttataaatttcaacatttttccattcgcatctgatcccccgcaattagcactccacttcgaacacaaatttatataatttttgccattttttaccacaatttttagtaatttctacacaccgatatatacgtacgcgctacgatttttcgacaaacgcgcgagtttcttctgagtcgccatcaaatatacaaaattttttttcgaaattactgaaaatgcgaatacacacgcacacatggacagccgacgggcacgaggcgcacgcgcttggtacatgcggctatgccgctctaacgcactgcttttattgataaatcgagagcgggacagctagagctaccggccgagagagagcatgtgagaagagcgttctgtgcgagtgtgtgtgatagagagagccagagagcaaagtagtcacacatactctcgcaaactcatagtggctttcgttctctccttttctcaaccatttgcacgtacttttagctttttcatatggctatttgggaaattcaccagcagtttacacttatgctgttgttagttttaatccatttatactggtagaacgtagattcgtcggctactttacattaatttcgtaacgtaagcgcaacaaaaacaaggctgtcatcgatataagcaggcgtttttgtctgaaactatcgtgcaataagtgactccgataaccagagttcctttacgtgtttctcgattacttatcggattgtgtttgcgagcacaaatgtctcttttagcggagacacagtcctccaaaactgtgcaacactgttcctaggctcggtgtgaccagagctatttaacaacactggcgaacatcggatggcaaatatcgaaagaacattgactgttgttccaccccctgctgacaccatctggtaacactgaacaacagaccagatccgcggacaaagcaaagcagtaaatattaatttaatccaaatccaattcccgacaccaattggcggccttcagctgctgcttctgcagtcgaattgtatttttttttttggtttttcgtgtcacccgataagagttaaattcgctgatctagcgaataacggtggcaagtaattgtaataactgcgtgtgtgcacagtgctagtgtttagtgtgcgagtgtgtgcgtgtgagtgggaactccacaagtgtgcgagaaggcaaatcaaaataagaaaagtgccgccctgatggaaattaatatcgcgaattatcagcgaaaacgcagcgaaagttaagccaaagtgctgcgattaatcagatagcgggtgaaatagtgggtattacgtaagaaatcaatggattccgggctgcatttgcccaaaaaaagaggaagcaatatcgaagcgctacttttatctcctcttttttcgatgatttcattcgcagtgacgacacacaggcacgcacacaccgaacgccgtatctgtgtgtgggttgtttgttgagctaaaaaaaataatgaatcctcacgatacattcactcgtttcattttttttgttattattattcatcatatttatttatttctttgagtgtgcatatcggcgacttcgcgacgccaattgctgattacgccccctcccttttcagtgcaacttccccaccccggagatcttgcactcgaactaaaaatcgagtagagtacgtaggcagaagcgaaaagagcgtacaaaaatcaagagctcagtggcagcagcaggaatttgtgtttgtcaggggattgcccagattttcggggtaattgtccactttataaacagccaaccgaatttgaaaccaactgtaactggaagtaaaaaccaattttaccaaagctatcaaaaaaaaaacaataaaaaaaatgaaatcctctgcgcgccgctggtttaaccagtacgcccacatgtgggcggcccagatgtgcctcgtttttggcccaatggctgtgggcgtccatccgtggttgaaactatgcgctgcagatgctgtttactcaggcggtttatagtattacgaatttgctagctaaaaaactgattaaaactactactaagtgcacaactcataactttgatatgctgtgactgggtgtataaatgataatcgaatgaaattattcaatccaagggtatataaacatgggcttagtcgtttttagtttgttttcctttcggcacacgatctgctgcaaatcaagctctgtggtgtgttagtgttcgttgtgttgtgtgtgcgtgggcgtttaaaaatagccgaccaacacaacacccatacgtatacgtaatctgcagcccttttttttccgttccgtgcatatggaattttgatttgagtcttgagtggcttggagtgagtgattcatgtggctttaggcggaaaggaaacccagcgaagctgactcaatgaccactcattgttcgttcggcctttgtttacattttgccaggagccaagagagcgagagagcgtgctaacggaacgtgctcgaatgagtaattcgcattgcatttgacgtttatcgaaagctctcttccttccgcttttttccttttcttttcggaggccaacaaaaaaaaacaacaaaagcacgcaggcacgcacacccacacacaagttcgtacatcaatcgcttggtgtgtgtgtgtgtttgtgagatgagtcatctggccaagttgatgagaaaataaaattaaacattaaggtagagcgaaagaaacaacaaaaaaaggggacagatgtgcggccatttgctgttgtttgttgttgcaataaagaaaaaagcagggcacgcggagaaagcagtgctcgacaagcagtgcagtcagcagctggacttttacgtacaccggcgttcgtaaaaattgcagcgaaatcgaagaaatcaaattgtgtcttaaaaataaatgaaagattaaggcatataaaaaaaaataatataaaatatgtagcattagaaatataagtgaaccaggaatggcttttataataatttctgccccttacttaacatctagtgctaaatccaacaattttaattcacttaccattgcagccggcgcacagaagcgacagagacagagcacacacagcacctggcacatccaaggatatccgatcctcctgcatcccgaatcatccacaacctgcaccaaccgctaaccgccaaagccatgatcctcgagagaaaccggaggtgccagctggccctcctcatgatcgcaatactggccgccatcgctggacaaacggatgcccagaaggcggccaaactgacggcagtgagcacatgtgcatcgaaggaaaagtgtcacacctgcatccagacagagggttgcgcctggtgcatgcagccggactttaagggccagtcgcggtgctaccaaaacaccagctcactgtgtccggaggagttcgcctacagtccgataacagttgagcagattctagtgaacaacaaactaacgaatcaatacaaagctgaactggcggctggtggcggcggctccgccatgtccggcagcagctcaagctcctactcgtcgagttcgagctcgtcgagcttctactcgcagagctcctcgggatccagttccgccagcggatacgaagagtactctgccggcgaaattgtccaaatccaaccgcagtccatgcgactcgcattgcgcgtcagtgagtagcaaacgattgcatcatccatgtgacctacaaactaatcccttacttgcttatcaatacaccttagatgagaaacacaacatcaagattagctattcccaggcggagggatatccggtggatctctactacttgatggatctctccaaatctatggaggacgacaaggccaaattgtctacgctgggcgacaagttgtccgagaccatgaaacgcatcaccaacaatttccatcttggtttcggttcgtttgtggacaaggtgctcatgccctatgtctcgaccattcccaaaaagtgagtatgacctacataaatgtgaaggaaaaccatgaattggaaatagttctacaaattttgctgattgaagatgatgccagatgccgtcagttgatggtgcatttctttaaggcctattaaattattgtatttatatattatattatacagcgtatttgacttgttaaaattatgatttgtctattgtagcgtacaatagcccctctagtcatgacaatgtgcttatgattcaaatagcgaatcaaattaagtttatttttaagtgatgctactttccagaaactctgcaatagtcatatcctatttgtcagcgcttttgcaggcagcactgccgcttgactttcgaaaaaaaaaaaaaaaaaaactcaaattgataatgattgataaaattgataacaccatcaccttatcaatatagaattccaaaacaatttcctcttgctaactgtagaacgaaatacataaattcctaacccattggctctataaaattgaaagtgcagctcaacattctgtgtatcccaatgctgctctatatgtttaattttgagctaattttatctaatttaacataccacatacagccgctaactttgtttaatatttatatacttacaaccaaaccatgaacgaacaccaacaaaacaacatcaacgctcgacggaatcgaatcgaatccatagactcgagcatccatgcgaaaactgcaaggctccctatggttaccaaaatcacatgccactcaacaataacaccgaaagcttctctgtaagagacgattaatgtatactgcacccgtataaacccatccacctaattgtgcctgctcccatatcgatatcaaatatcaaatagatcaagatccgtaggatttacatatgtgcatgtttccccattatcccatttgctggccctatcccatccattgcaccttctagtttaagtactatacctaagtgtttgtctatagttttttgtgttgtacgctgccggatcgggttatcgctgatcagcacattttgacatttttatcctccactctctatatagcgtatagcatatagcccatagcatatagcatatagcatttagcatttacatatatattggtatcgtatctatatcgtaaactatctgcactactcgatgttgtcatttatttatatactcttttgttgtttctctatttctttatttcattgtgtactcatcactatcttcatatataaatctggcctatataaattgtacatgtgcatttgaatatgacccgttatttggctcgaaatttgaacaaattgtaacgatactatggaatctaaaccaaaattagcctggtggagccgtgcgctaattgcacagcaacctatggctttcaccaccaaatggtcttagataagaatataacccaatttactgtaagtggtccagatcagcatcccaaaaagaatcggattcggaattatcgcaaccgcatccgaagcatttagcctcaaaattaatgacctaacattgttcatatttcaagttttgcactttgcacatttgttattgcacgaaaaatgattattattattatttgtttggacgccgcctgctccttaactctgtgatgtattgtagcaaacaccacatagtcatctatctaatctagcatttatgttggttatggataatggttacatcttttttgcatgcatgctttggcttttctgcttggctggttgtatatgtttgtagtttggactcttatctgctgacacactctgaaaaaatgtattcaaattcttaattggagaagaaccatggcaggctgaactgaaaatgtgaaaaaatattaaaccatagaaaacgactgcctaattgacgattagttagcataacatgactaataatacatattgtgccattggatcaatgtgatatgtgattcactttctatcttgtaatgatctagttgatcttgacatataaaacgatcgtttttcattcgaggtttccaaatatggaattcaatgcccttagctacctgagacatttgctattaatcacacttgactgtatatacatatatatatcttatcgtagtatggaaacatttgctatctttaactaatattaatagactgctcaaggtttaaaaaaaagttggctaggagagaattcctggtcgaaataatccggcatttccgtcagagtgtgtcagcttgcattttaatacgaatccattgcactaaccaaaatcgcacagaaaatacacaaaactaattgttgaaatttttctgtctgtacggcagaacgaggtgaagaatgccacagtgtcgggcaacttggatgctcccgaaggaggtttcgatgccatcatgcaggccattgcctgccgatcgcagatcggttggcgggaacaggctcgtcggctgttggtcttctcgacggacgcaggcttccattatgctggcgatggcaaattgggcggtgtgattgctccaaacgatggcgagtgtcacttgagtcccaagggcgagtacacgcattcgacgctgcaggattatcccagtatttcgcagatcaaccagaaggtcaaggacaatgccatcaatattatcttcgccgtcactgccagtcagctgtctgtctacgaaaagttggtggagcacatccagggctcttcggcggccaagctcgataacgattcatccaatgtggttgaattggtcaaggaagaatatcgcgtaagtgattcatcgagatatcagcaatgaacagaacgttaaattaatactttatgcatgcagaaaatctcctcttcggtggagatgaaggacaacgccactggagatgtgaagatcacctatttctcgtcatgcctgagcaacggacccgaagtgcagacctctaagtgcgacaatctgaaggagggccagcaggtgagcttcacagctcagattcagttgctcaagtgtcccgaggatccgcgcgactggacacagacgatccacatctcgcccgtcggcatcaacgaggtcatgcaaatccagctgaccatgctctgctcgtgtccctgcgagaatcccggttcaattggatatcaggtgcaggcgaacagctgcagcggccacggcacctcaatgtgcggcatctgcaattgcgatgatagctatttcggcaacaaatgcgagtgctcggcaacggatctaacatcgaaattcgcgaacgacactagctgtcgagcggatagcacatcgacgacggactgctctggtcggggccattgcgtttgcggcgcctgcgaatgccacaagcgaccaaatcccattgagatcatatccggtaaacactgcgagtgcgacaacttcagctgcgaacggaacaggaaccagttgtgctcgggtcccgatcacggtacatgcgagtgcggccgttgcaaatgcaagccaggctggacgggctccaattgcggctgccaggagtccaacgatacatgtatgccacctggaggcggcgagatctgctccggtcatggtacctgcgaatgcggtgtctgcaagtgtacggttaacgatcagggacgcttctcgggccgacattgcgagaagtgtccaacttgctcgggcaggtgccaggagctgaaggattgtgtccagtgccagatgtacaagacgggcgagctgaagaacggtgatgattgcgccaggaactgcactcaatttgtgcccgtgggcgtggaaaaggtggagatcgatgagaccaaggacgagcagatgtgcaaattcttcgacgaggacgactgcaagtttatgttcaagtacagcgaacagggtgagctgcatgtgtatgcccaggagaataaggagtgtccggccaaggttttcatgttgggcatcgttatgggcgtaattgccgccattgtcctggtcggtctggccattctcctgctgtggaagctgctcactacgatccacgatcggcgggagttcgctcgcttcgagaaggagcgcatgaacgccaagtgggatacggtaagtttagctagcccgcatatacatacctcttttccaacctcgttctcaaacgataatcgtttttttttctttctgactcacagggcgagaatcccatctacaagcaggccacgtccaccttcaagaaccccatgtatgcgggcaaatagattcgctaactaactaaacattagggaattataactagtgtcgttccacgaccactgtctgtgcttgaaccggaaatcagaaggaaccccaaccagtcaaacttaaacaccagcaacaaatccgcaccaccaaccaaccaaccaaccaaccaatcaatcttcagtaccgactccgactccgaaccactgaatacatcgacgaagctgctttgcccgggtgcaaaaccactgaagtcaactgccattgaaacgcgttctaaactaagtcagccctatatatacatatatatgcatatttatatatacatttacacaagaaaccccgccatggggcagcctttatacattgcgtatacttaacgagcaaacgatttgtgccttgcgacatattttagactaaatctatacgtatgtatatgtgtatacaaacaagtaagcagacaacgcacagcaacaacgcggagcgaagaatcggaaaaaaaattggaaaaacaaaaaaattaaaccagccaagaaatgaactacgaacgatagttaagattaatgatttttgtattctttttttcgtaccaatagtatccaagccagcgccagaatttgtattttattttactcctaatatgtaattgctgttttgtgttttttatcgacctaattctaattattttcattgagccccatttattattaacgagaagagccactgcaatatagctgtatgtattcaaaagtcagaattgggatacttaactaatctgctaccctcccaaaacggtcgtccttcgcaatgccaaaccccccaacgtcttaatgtttttctattgtttttttaaagctaactttacaattaatatttaagcaattaacatttaagcttgtaattgttaatttcaaaatgcaagagtgccccgggtacgtttttgtttttctatgaaatcttttcatttttatttttgtatgttttatttatggaaaacgaaagcgtggcaacaggggaaattgtcccttgtgtgtgtgttttatttaactgaatttcgatcattaatagtaaattaatactactatataaatatatattttttgccatttgtactgattactgattaacatttaaagtaatacaaaaccaaaacgaaatgaaatgaaacttttgtataaaaaaaaaagaaaacattttgagtaattttattgaatgataaaacaatacaaaaataaggtggaaacactgtggcaatatgaaaaagatgtggaaattaaattgtttgacgctaattttagtaaaataaataaaaagagaaatacatatttcgtgtatcttatttattcatcggatggaaataatgcgaaatttgagtacagaaatttggatcaattgtttacaagttattatttcttatacaacatgagataaagtacctagcatcaatgcaaaagggcatccgagaattattcaattaaaactccaatacacaagcgagctaagttcgagacttgctggactcactgcatccccagaagaaactcagtggcgggggatctttccatttgctcatccaaacagctttcccaatggagacgaattcacttccgactgcattctgcatttgattcaaaaatgtgaatggatcatcggatggcattatcgaatgcgtgtgtgtgtgtgtgtgtgtgtgtgtatgtaacattatataacaatctgtatatatcgttgtatatatgctttgttattcaattgggttgtgttttcgaaacaagtctaggcatttttacgtactaagtagtgttaaaatatacgtttacggatcgggatcgtagcagcacttctacatatatacacgataatatcgaggacgaggtcccagggtccatttggatgggcttcagctgccacgactgcgattgagtggcttggtatgttagtatgttggcatgttggcctgttgttgtatattggttggcttggattggtttggattgagtggctggcttaacatgttggcctgttgttttgtgaattgtttgacttaagtacagcttgaggttggtgtgtctcttgtgtttgggatcgcgcaatttccggagcttcttccgttggcggagagtcgttggctcttggagcgttactctccgcatcgtattatttcgcttccgtggtatcgcaatcgcagtctttaggccttacagcagctgcagctgcagcagcagcagcaacagcaacagcacagtggtattaatacgacggccagaaggaggctgggaaacgcacaagtggctgtcacctaaaaaaccagcgagctaccgc

SEQ ID NO: 40178 - DNA, 4102 bp, DROSOPHILA
cagtaaatattaatttaatccaaatccaattcccgacaccaattggcggccttcagctgctgcttctgcagtcgaattgtatttttttttttggtttttcgtgtcacccgataagagttaaattcgctgatctagcgaataacgccggcgcacagaagcgacagagacagagcacacacagcacctggcacatccaaggatatccgatcctcctgcatcccgaatcatccacaacctgcaccaaccgctaaccgccaaagccatgatcctcgagagaaaccggaggtgccagctggccctcctcatgatcgcaatactggccgccatcgctggacaaacggatgcccagaaggcggccaaactgacggcagtgagcacatgtgcatcgaaggaaaagtgtcacacctgcatccagacagagggttgcgcctggtgcatgcagccggactttaagggccagtcgcggtgctaccaaaacaccagctcactgtgtccggaggagttcgcctacagtccgataacagttgagcagattctagtgaacaacaaactaacgaatcaatacaaagctgaactggcggctggtggcggcggctccgccatgtccggcagcagctcaagctcctactcgtcgagttcgagctcgtcgagcttctactcgcagagctcctcgggatccagttccgccagcggatacgaagagtactctgccggcgaaattgtccaaatccaaccgcagtccatgcgactcgcattgcgcgtcaatgagaaacacaacatcaagattagctattcccaggcggagggatatccggtggatctctactacttgatggatctctccaaatctatggaggacgacaaggccaaattgtctacgctgggcgacaagttgtccgagaccatgaaacgcatcaccaacaatttccatcttggtttcggttcgtttgtggacaaggtgctcatgccctatgtctcgaccattcccaaaaaactcgagcatccatgcgaaaactgcaaggctccctatggttaccaaaatcacatgccactcaacaataacaccgaaagcttctctaacgaggtgaagaatgccacagtgtcgggcaacttggatgctcccgaaggaggtttcgatgccatcatgcaggccattgcctgccgatcgcagatcggttggcgggaacaggctcgtcggctgttggtcttctcgacggacgcaggcttccattatgctggcgatggcaaattgggcggtgtgattgctccaaacgatggcgagtgtcacttgagtcccaagggcgagtacacgcattcgacgctgcaggattatcccagtatttcgcagatcaaccagaaggtcaaggacaatgccatcaatattatcttcgccgtcactgccagtcagctgtctgtctacgaaaagttggtggagcacatccagggctcttcggcggccaagctcgataacgattcatccaatgtggttgaattggtcaaggaagaatatcgcaaaatctcctcttcggtggagatgaaggacaacgccactggagatgtgaagatcacctatttctcgtcatgcctgagcaacggacccgaagtgcagacctctaagtgcgacaatctgaaggagggccagcaggtgagcttcacagctcagattcagttgctcaagtgtcccgaggatccgcgcgactggacacagacgatccacatctcgcccgtcggcatcaacgaggtcatgcaaatccagctgaccatgctctgctcgtgtccctgcgagaatcccggttcaattggatatcaggtgcaggcgaacagctgcagcggccacggcacctcaatgtgcggcatctgcaattgcgatgatagctatttcggcaacaaatgcgagtgctcggcaacggatctaacatcgaaattcgcgaacgacactagctgtcgagcggatagcacatcgacgacggactgctctggtcggggccattgcgtttgcggcgcctgcgaatgccacaagcgaccaaatcccattgagatcatatccggtaaacactgcgagtgcgacaacttcagctgcgaacggaacaggaaccagttgtgctcgggtcccgatcacggtacatgcgagtgcggccgttgcaaatgcaagccaggctggacgggctccaattgcggctgccaggagtccaacgatacatgtatgccacctggaggcggcgagatctgctccggtcatggtacctgcgaatgcggtgtctgcaagtgtacggttaacgatcagggacgcttctcgggccgacattgcgagaagtgtccaacttgctcgggcaggtgccaggagctgaaggattgtgtccagtgccagatgtacaagacgggcgagctgaagaacggtgatgattgcgccaggaactgcactcaatttgtgcccgtgggcgtggaaaaggtggagatcgatgagaccaaggacgagcagatgtgcaaattcttcgacgaggacgactgcaagtttatgttcaagtacagcgaacagggtgagctgcatgtgtatgcccaggagaataaggagtgtccggccaaggttttcatgttgggcatcgttatgggcgtaattgccgccattgtcctggtcggtctggccattctcctgctgtggaagctgctcactacgatccacgatcggcgggagttcgctcgcttcgagaaggagcgcatgaacgccaagtgggatacggagaatcccatctacaagcaggccacgtccaccttcaagaaccccatgtatgcgggcaaatagattcgctaactaactaaacattagggaattataactagtgtcgttccacgaccactgtctgtgcttgaaccggaaatcagaaggaaccccaaccagtcaaacttaaacaccagcaacaaatccgcaccaccaaccaaccaaccaaccaaccaatcaatcttcagtaccgactccgactccgaaccactgaatacatcgacgaagctgctttgcccgggtgcaaaaccactgaagtcaactgccattgaaacgcgttctaaactaagtcagccctatatatacatatatatgcatatttatatatacatttacacaagaaaccccgccatggggcagcctttatacattgcgtatacttaacgagcaaacgatttgtgccttgcgacatattttagactaaatctatacgtatgtatatgtgtatacaaacaagtaagcagacaacgcacagcaacaacgcggagcgaagaatcggaaaaaaaattggaaaaacaaaaaaattaaaccagccaagaaatgaactacgaacgatagttaagattaatgatttttgtattctttttttcgtaccaatagtatccaagccagcgccagaatttgtattttattttactcctaatatgtaattgctgttttgtgttttttatcgacctaattctaattattttcattgagccccatttattattaacgagaagagccactgcaatatagctgtatgtattcaaaagtcagaattgggatacttaactaatctgctaccctcccaaaacggtcgtccttcgcaatgccaaaccccccaacgtcttaatgtttttctattgtttttttaaagctaactttacaattaatatttaagcaattaacatttaagcttgtaattgttaatttcaaaatgcaagagtgccccgggtacgtttttgtttttctatgaaatcttttcatttttatttttgtatgttttatttatggaaaacgaaagcgtggcaacaggggaaattgtcccttgtgtgtgtgttttatttaactgaatttcgatcattaatagtaaattaatactactatataaatatatattttttgccatttgtactgattactgattaacatttaaagtaatacaaaaccaaaacgaaatgaaatgaaacttttgtataaaaaaaaaagaaaacattttgagtaattttattgaatgataaaacaatacaaaaataaggtggaaacactgtggcaatatgaaaaagatgtggaaattaaattgtttgacgctaattttagtaaaataaataaaaagagaaatac

SEQ ID NO: 40179 - protein, 845 aa, DROSOPHILA
MILERNRRCQLALLMIAILAAIAGQTDAQKAAKLTAVSTCASKEKCHTCIQTEGCAWCMQPDFKGQSRCYQNTSSLCPEEFAYSPITVEQILVNNKLTNQYKAELAAGGGGSAMSGSSSSSYSSSSSSSSFYSQSSSGSSSASGYEEYSAGEIVQIQPQSMRLALRVNEKHNIKISYSQAEGYPVDLYYLMDLSKSMEDDKAKLSTLGDKLSETMKRITNNFHLGFGSFVDKVLMPYVSTIPKKLEHPCENCKAPYGYQNHMPLNNNTESFSNEVKNATVSGNLDAPEGGFDAIMQAIACRSQIGWREQARRLLVFSTDAGFHYAGDGKLGGVIAPNDGECHLSPKGEYTHSTLQDYPSISQINQKVKDNAINIIFAVTASQLSVYEKLVEHIQGSSAAKLDNDSSNVVELVKEEYRKISSSVEMKDNATGDVKITYFSSCLSNGPEVQTSKCDNLKEGQQVSFTAQIQLLKCPEDPRDWTQTIHISPVGINEVMQIQLTMLCSCPCENPGSIGYQVQANSCSGHGTSMCGICNCDDSYFGNKCECSATDLTSKFANDTSCRADSTSTTDCSGRGHCVCGACECHKRPNPIEIISGKHCECDNFSCERNRNQLCSGPDHGTCECGRCKCKPGWTGSNCGCQESNDTCMPPGGGEICSGHGTCECGVCKCTVNDQGRFSGRHCEKCPTCSGRCQELKDCVQCQMYKTGELKNGDDCARNCTQFVPVGVEKVEIDETKDEQMCKFFDEDDCKFMFKYSEQGELHVYAQENKECPAKVFMLGIVMGVIAAIVLVGLAILLLWKLLTTIHDRREFARFEKERMNAKWDTENPIYKQATSTFKNPMYAGK

SEQ ID NO: 40180 - DNA, 3561 bp, DROSOPHILA
ccagccagagacgaaggcaatcgatccaggcgggggatttgtcttggccaatggaatgggctgaacttggtttgtgaactcaagtggcttacttagccgcacgatggcgatgtcgtttcctaatccctcatgcgtccttatagcggccacatcgacaacacttccattggagttcttcaaggcggatcctgcccgaacttgatatccctggccctggacgcaatgggccgcagtaatgatgatatctgcgctgtaaatggagccaccgcataaatgtttgccatcacgttgtatggacacctgccatggtgcctcctcgattccaatgggttgtccaccgataatgcgttcttccggccggattactggtcctgcggacagggaattgagcgccaatagcaacaggaagctttggatgaacatcttgaccagtttgtatgatactttgaattgcagtggcttcacgtccaaagtaaccagtcttttatacacaactcagttagcaatattctatttgaacctcagtaatagtttatgtatctagatatagaatattctctattcttgtaaagcaatcaaaatattgaaaaatacttcattcgctaaatataaacatcataaataatttagctgccttttgctttcaagaaatttttatcgctaacggtgaaaatgtggaggggcaataacatttctggaattttctaattaactaagtttgcaatttggtttgttctgcgtttataaatgttgaaagaaaatttccaactgattaagccatccgaagtggtagaatgactgcagagagtcgtccaaactaaacaaactaaactttctgtccgcaggacgagtaatccgactggtggttaaaaaacctattgaaatcgaaaaggttccctgattggtttccttacaatattatggaaaccttacttgttaagggtcctttaaaaatgaagataccatcataacagcggtcccctggtcgtaattaataacgttttttgaatattggcttttaatcgtgttcaatttcgtggcaaaacttttgaaaaaagtatcttaactttacaacaactttttaagctttcacggtgatggcatcaggtcattcgtcagttcatcatccttctgatacactttgcggatttctttcatggcttatccagttctgcaaaaacttatcgtactccctccggctgcggcaaagaattacaagagaggagggtcgacaaccgtgcgatttcagttcttccatgcgctcctttgtggttttcaggctgtggcatagaattcgaggattttgagcgacctcaaatctggtaaactgggcctcatcgagtaggtagtctagcacctctttgatctgaaggcaaaattgtatagcttatgattgtttgagttaacccattgtgacttaccttggtaactcgcacggtgtgcacctgcggatgtttgtccatgattgccttggcttcactggtgctgaaaccaagacgatgcgctaagtattccaccacggaggagaactctcccaaaaccttcagttcgtcgagagaaagcttcagggagcgctgcagtattggctccgggcagcgcaccatccacggcatgatcttgtcctttttcgcccgcttggcgcgctccaaacgcaactgaacagactttggagtatagcgaaaggcccatagatccttgagtacgtttattggcgacacattgtagtcgatcatgtgctgcaggttcttttcgaacatctcgaacggcatttccaggataaacagcctcttcgatagatatttgctcacaatatcggggctgacatccagcttttcgctgatatagtagacacgatttcgctgtggcattgcatccctctcagagttcagagcacccaccagttttcgaagacgtggaacagtgaggcgcaggaaaggcacaaaatgattgatgtccttaaagtccattgacttgagtagctgcatctttagctccaagcgttctgaatagataaacaaataaccgatgatttaatcacataaaggatataaagcaaatgagcttactattgtccagcgacagtagccaaggatactccacgaagctgcgcctgctaacgccctctagctgcagtgtgtccatgaccagagtcagtgatctaccgcggtagcagcggtgcaccagctcgtcgctgattatcttttggagctcagcgtccgtgaagcgaaaacgttcccgcagagcttcgaggagcacccgcgtcttggttccagtctcccgatcctggcgataaggcacataatcgttttccgcctcgttgctacctaaagtgccactggaggtcagtctgctcggactggcgcggttttcgtactgcgagaagagtaggcgcctgctgcagtgcattgggtgcatatttaagccggcatgcagcttgagtgccgtctcaaagctgcgcagaaggcttctaatcatcccgaatttgcttaatttacagaatcaagacagaaaataaagttcttcaacttataaaacaagcggaaaacagctgatatgttgcggcgataaacagctgaccaagtgggccaactgaaagctggagtatacgacactcaaacaattatcgttatcggttttgaaaataatgaccgttattcggaacagcaatttaataaatttagcatttgttttctaggaaaatataataacttttctaggtgcaattgatttcataatatgtttaggaagtgtgctggttcatacacaataacatacacatacactttttaaatataagtgtgaaacacttccaatatttattttcaaatctactaagcattcttagacagagagtcccacaattgaaatcactcccattttatcaacgaactttttgattttattttcaaaaatactacgctccaaagctaatcggaacattaacgctaaacaaagacttgtaggattttgaacaaatcatgaaaacatctatcacaagcactactccacatcgatgtcttttgtgacgcgacccacccagtaaacgaatccggtctgcaccacggtggccatgaacttgacgttgcccttgtagcctgctggcggaatccagtcgaaggtgatgccggtcagcggcttgcccttttgcgcactcagatgggtgatggtgtcgtccttgccggagcagtccaaggtctgcgagtgcacggagtccaccacctggaactggccgacgacgcggttctggccatcgcgtgcctggatcatgaagccaaggaactcatcgccgcccagcgtcagggtcagcttttgatccgagcgcacatgggagggtccggagatgctgtacggcggcttggtcacctgcagcttggctccgtgctggggcgtcaggtcacgacaggcggcctttgggataatgaagatgggaatataaggaatctatccgtcatgtatttcgatggggcaggttcatacctttggagcaccatcggagtaggcgtggacactgatggccaggcaggccgcaagaaccaacaaacggaacatatctgtttaagg

SEQ ID NO: 40181 - DNA, 1442 bp, DROSOPHILA
cgcaacatatcagctgttttccgcttgttttataagttgaagaactttattttctgtcttgattctgtaaattaagcaaattcgggatgattagaagccttctgcgcagctttgagacggcactcaagctgcatgccggcttaaatatgcacccaatgcactgcagcaggcgcctactcttctcgcagtacgaaaaccgcgccagtccgagcagactgacctccagtggcactttaggtagcaacgaggcggaaaacgattatgtgccttatcgccaggatcgggagactggaaccaagacgcgggtgctcctcgaagctctgcgggaacgttttcgcttcacggacgctgagctccaaaagataatcagcgacgagctggtgcaccgctgctaccgcggtagatcactgactctggtcatggacacactgcagctagagggcgttagcaggcgcagcttcgtggagtatccttggctactgtcgctggacaataaacgcttggagctaaagatgcagctactcaagtcaatggactttaaggacatcaatcattttgtgcctttcctgcgcctcactgttccacgtcttcgaaaactggtgggtgctctgaactctgagagggatgcaatgccacagcgaaatcgtgtctactatatcagcgaaaagctggatgtcagccccgatattgtgagcaaatatctatcgaagaggctgtttatcctggaaatgccgttcgagatgttcgaaaagaacctgcagcacatgatcgactacaatgtgtcgccaataaacgtactcaaggatctatgggcctttcgctatactccaaagtctgttcagttgcgtttggagcgcgccaagcgggcgaaaaaggacaagatcatgccgtggatggtgcgctgcccggagccaatactgcagcgctccctgaagctttctctcgacgaactgaaggttttgggagagttctcctccgtggtggaatacttagcgcatcgtcttggtttcagcaccagtgaagccaaggcaatcatggacaaacatccgcaggtgcacaccgtgcgagttaccaagatcaaagaggtgctagactacctactcgatgaggcccagtttaccagatttgaggtcgctcaaaatcctcgaattctatgccacagcctgaaaaccacaaaggagcgcatggaagaactgaaatcgcacggttgtcgaccctcctctcttgtaattctttgccgcagccggagggagtacgataagtttttgcagaactggataagccatgaaagaaatccgcaaagtgtatcagaaggatgatgaactgacgaatgacctgatgccatcaccgtgaaagcttaaaaagttgttgtaaagttaagatacttttttcaaaagttttgccacgaaattgaacacgattaaaagccaatattcaaaaaa

SEQ ID NO: 40182 - protein, 410 aa, DROSOPHILA
MIRSLLRSFETALKLHAGLNMHPMHCSRRLLFSQYENRASPSRLTSSGTLGSNEAENDYVPYRQDRETGTKTRVLLEALRERFRFTDAELQKIISDELVHRCYRGRSLTLVMDTLQLEGVSRRSFVEYPWLLSLDNKRLELKMQLLKSMDFKDINHFVPFLRLTVPRLRKLVGALNSERDAMPQRNRVYYISEKLDVSPDIVSKYLSKRLFILEMPFEMFEKNLQHMIDYNVSPINVLKDLWAFRYTPKSVQLRLERAKRAKKDKIMPWMVRCPEPILQRSLKLSLDELKVLGEFSSVVEYLAHRLGFSTSEAKAIMDKHPQVHTVRVTKIKEVLDYLLDEAQFTRFEVAQNPRILCHSLKTTKERMEELKSHGCRPSSLVILCRSRREYDKFLQNWISHERNPQSVSEG

SEQ ID NO: 40183 - DNA, 3596 bp, DROSOPHILA
tattcgtactatcactagttctccatagtttggcagaaaatttttgcaggcaggatctctgtaccaaaggaaccacccacatagcgtgtgtaagtgatcattcgaaaacttagcgacaaatttcaatatgtgttatgtgagcagcagaatgtaaacggatcctttggtagctcttgtcccaaagatgcaaccgtgattaaactcaatcttggggataaaaatgctctgatcaaggcccacaacttggtgagacaaaaatgggctagtggcaaagcaaaaattaagtggaccgcctgtaaaatggccaaaatggaatggaataaggacctggaaaagctggcaatcttaaatgccaaaacctgtcttatgggacatgatgagtgtcacaatacggaaaagtttcggctatctggacagaatctatttgccatgggattttctcatgctaggataacgaaaactaaaatgaatatgacgttaagcatgctcttcgagatggcagttcaaaagtgggcaggcgaggaaaaggatattaccgccgaggacttaaagaaaacgacacctaatccaccagagtttgtcacttactttttttcccatttattagtttcagtttccttttacgcttttgttttttttttttagagttattggccacttgaccgttttgatcaatgagaaaagtaatgctgttggttgtggcttagttgcatataatctgggtgaaatccggcgatacaatctggcctgtaactacgcttatacaaatgttattggcgaacgtgtttatgaagaatgcgccaaggcaggcatagagtgcgcaaagggaattgaccaaaagtatccaccgctatgtgctaaaatataatgattttaaagcgatttagtagcactattgctgaagcttaaatgatattattattattatttttatttctattatcataacagtcagtaatcacttaaatttgcagctatgggcttaggggtcgtcttatatctacttggaaacgagggtcttgaaaacggtagggcatttgtgggctggtaggtggcgatagcagtatgtcttgatcgcatccaaatcaatatccgcatccggggatacaatgcatatgacaccaagacgatggccccacattttattgggaatacctaagacagccacatcgttgatattcggatgtgagatcaatacctttttgatttccgatccgtataccttataaccgccgacggtgaagatatcgctgcttttacttaaaaaataaaagtttccgttacgataggcgcaaatgtctccggttttaaagaaaccatcttggttgttctcctgctcctcattgtttgtggttcctttgtgttccatttcctgattgttgttagccaatgtattggacaccaaattggaaccagcaatttgaagttcaccaattatggttcccgccaaggatgcatcgccgccgatatcctccaccggtattaggccactatccacggatccaccgagttcgtttttgcaggttattagctcgtcacccttattactgatcaatcgggccgtgactcccttcaacggcgaacccaacgtacccggtcgataatcgttgggggcggtattattggccatagcaaccgctgttggaccattatgtggagagtcacgttgtcgtttatttaacggatgacccaaaaccaatcccgtttccatcattccatagtattcgtatatattttgacccgttatctcgcgccatctgtaaaacaccgaatccggtagcaaggcaaaagctgtcgccatcaatcgtatcttttgccggcaatgattcacaatgtactcaaccattctcgaatccttggcaaacattttctcatactcgacaatcagacgcttgtagacaattggcatggccaaaaagagggtgacccgttgcttggatgggctatttatgcccaatagagcactccacgcattgtgaccatcgaatttttgctgcaacaccacattaccgcccacactgagaactgctgccaaggcggcatgcattcgattcatggatagtattggcagcatacagtctgtaggtcccaaatgccaagttccgatcaaacatcgcatctgagcttcgatattccgatgggtcaacaacactggcttgggactattgaccgcattgggcgtatagatcagcatggctggtgccttggaatagaaatcgtttggaaacgtattttccgttacgataacaccctggatcgccaccagctgtttggcatacatcgatgtcgaggatacactctccgccgtcgggagaaatgagtgatccaatatgatggtagctgatttcacaccctgcgacaattcctgggcaagtgactcaaattccttagtggctatcagtagcttggtcttgcagttcgatgcctgccgttgcaattgatctatcgcctggccggattccagtggaactgccacttgtccggaaatccaacagctccattgtatagctatccacagggcgttgttcgagcacaagtatgttacattcgaaagcgcggcgccgcctgaaaaaagagaagaatttgcaaactttttgaaattgaaccgtaaataaattgaacgtccggaaaaatggtttgtcacttaccacatatatttgagatctgaatgcccagacgtttggcggccatatacaattgaaaataagtgtactccccattgatgtctttcacggcgatctcatccggatagagcatagcctttttgaacgtgggcaccaccacattactacgctcctcttcatcgaaactatggcgcagcttctcgatgaagccatcctgcaaacattaaatagaaattgtggaattgcaattacataaatattatatatatatatatatctacctatatatattaccttatgtatcaattcggcggagcaaagacgggccaatggacgcaactttaacttgtggcaacggcgaagtagcagcatcttactgttttttttttgttttttttttttttttatggattatttgatggtgtgtgcgcgaatgcagctattttaaataatagtacaaagagcaaaatttaactcagattttcagttgctatcgcttgaaaagccaaaacgattctgagattcgtaacatgacatacttgagtggacacaaatgaaagtcgttcaattcgatttgtttgattttttgttggtctttatttacacaataatagtttgcagacacaaaaattaataactacaatagtcataatcgtaaacgtaaggtaagtaaaaaaaaaaagatgatatatttcaagtaaaatgaacgtcactatttttcttttggtatttttcttatttgtgttcgccttcgtttgttcgttttaatttatataaattttttttttttttttttgtgacctttgcataatactcaaaactgtcgtttacaacaatcctggcttgagaactcgaacgtgcatggggtaacgatggggcgggtttcttatttgggttattgagaggaggtgcaatcgaaaacaacacttaagaaacctattgtatatttacagtctaagattgagcaaaaaa

SEQ ID NO: 40184 - DNA, 1596 bp, DROSOPHILA
aaaaagtttgcaaattcttctcttttttcaggcggcgccgcgctttcgaatgtaacatacttgtgctcgaacaacgccctgtggatagctatacaatggagctgttggatttccggacaagtggcagttccactggaatccggccaggcgatagatcaattgcaacggcaggcatcgaactgcaagaccaagctactgatagccactaaggaatttgagtcacttgcccaggaattgtcgcagggtgtgaaatcagctaccatcatattggatcactcatttctcccgacggcggagagtgtatcctcgacatcgatgtatgccaaacagctggtggcgatccagggtgttatcgtaacggaaaatacgtttccaaacgatttctattccaaggcaccagccatgctgatctatacgcccaatgcggtcaatagtcccaagccagtgttgttgacccatcggaatatcgaagctcagatgcgatgtttgatcggaacttggcatttgggacctacagactgtatgctgccaatactatccatgaatcgaatgcatgccgccttggcagcagttctcagtgtgggcggtaatgtggtgttgcagcaaaaattcgatggtcacaatgcgtggagtgctctattgggcataaatagcccatccaagcaacgggtcaccctctttttggccatgccaattgtctacaagcgtctgattgtcgagtatgagaaaatgtttgccaaggattcgagaatggttgagtacattgtgaatcattgccggcaaaagatacgattgatggcgacagcttttgccttgctaccggattcggtgttttacagatggcgcgagataacgggtcaaaatatatacgaatactatggaatgatggaaacgggattggttttgggtcatccgttaaataaacgacaacgtgactctccacataatggtccaacagcggttgctatggccaataataccgcccccaacgattatcgaccgggtacgttgggttcgccgttgaagggagtcacggcccgattgatcagtaataagggtgacgagctaataacctgcaaaaacgaactcggtggatccgtggatagtggcctaataccggtggaggatatcggcggcgatgcatccttggcgggaaccataattggtgaacttcaaattgctggttccaatttggtgtccaatacattggctaacaacaatcaggaaatggaacacaaaggaaccacaaacaatgaggagcaggagaacaaccaagatggtttctttaaaaccggagacatttgcgcctatcgtaacggaaacttttattttttaagtaaaagcagcgatatcttcaccgtcggcggttataaggtatacggatcggaaatcaaaaaggtattgatctcacatccgaatatcaacgatgtggctgtcttaggtattcccaataaaatgtggggccatcgtcttggtgtcatatgcattgtatccccggatgcggatattgatttggatgcgatcaagacatactgctatcgccacctaccagcccacaaatgccctaccgttttcaagaccctcgtttccaagtag

SEQ ID NO: 40185 - protein, 426 aa, DROSOPHILA
MYAKQLVAIQGVIVTENTFPNDFYSKAPAMLIYTPNAVNSPKPVLLTHRNIEAQMRCLIGTWHLGPTDCMLPILSMNRMHAALAAVLSVGGNVVLQQKFDGHNAWSALLGINSPSKQRVTLFLAMPIVYKRLIVEYEKMFAKDSRMVEYIVNHCRQKIRLMATAFALLPDSVFYRWREITGQNIYEYYGMMETGLVLGHPLNKRQRDSPHNGPTAVAMANNTAPNDYRPGTLGSPLKGVTARLISNKGDELITCKNELGGSVDSGLIPVEDIGGDASLAGTIIGELQIAGSNLVSNTLANNNQEMEHKGTTNNEEQENNQDGFFKTGDICAYRNGNFYFLSKSSDIFTVGGYKVYGSEIKKVLISHPNINDVAVLGIPNKMWGHRLGVICIVSPDADIDLDAIKTYCYRHLPAHKCPTVFKTLVSK

SEQ ID NO: 40186 - DNA, 2861 bp, DROSOPHILA
actcccgtgagtatatcctgaccagttccgattcgaagtagaaacataatacctccaatcccttagaacttatcttcgtgtccgattggtatgccggcagcaagatgactgtctacatggacaaggaggacttcgagaagcatgccggcaaggaacacgtccttctgatcatgaaccataaatacgagatcgattggctcaacggctggatgatctgcgaaaagttgggcgtgctgggcaactgcaaggcctatgcgaagaaggcaatccgctacgtgcccatcatcggctggggctggtggctggccgagttcgtcttcctcaatcgaaacttcgaccaggacaagaccatcatcaccgaacagctcaaggtggtcttctcctatcccgatcccacctggcttttgctcaacgccgagggcactcgcttcactcccgccaagcacgaggcatccgtaaaattcgcccaggagaggggcatgacggtgctgaagcaccatttgatcccgcgcaccaagggattcaccgccagcttggcacccatccgcggtctctgtccggtaatctacgacattaatctagcgtacaggcccacagataaggtaattataacggcaaacttcaagcacttcatttaagtgctttagttatataatactgtattttattgtgccatacatttaatgcagaattctgcatggcaaagcttctcatgtatatttttgataaggctaatcagcctgttcgacaatacctgtctgattgctttggtctaatcaaatttcttttcgtttaatccgattattttgctcatttacttcactgcctcttttaagagtcacgatttcttaagatcgatgctcttaaagataccgattagaatgagcaaacatttcaaggttaatcaagtggtaatttttataacttattttccttattttggtttattttccttacctttgacgtgtcatcagtattattagcactttagccagcatagcaaccttaattttttaactgagtaatttggcgttctaatgataagtgcatagaatttagcaaattgcaaatttattatggttttaaattaaactcgcagaagtgagttataaaagatgcttataaagatactacagttttagctactaaaaggctatttaccggacttaattaacttgcaattgaactttcagacccccgccacaatgctgagtttgctgcatggaaagagcgtggaaccgcacctgctgatgaggcgtattccactggaacaggttccggaggatgagaaggaggcggccgcctggctgcagaacctgttcgtggagaaggacaagatcatcgatagcttcctggagacgggcagcttctttaagacgtccggcataaaggaggttccggcatatgtgaataaacgccggctgtgctcactcgtgaactttgtctgctgggcggtattctctctgtcctgcattttctactacgtgatcacatccctgctggcggccaactggacggcctttatcaccgcactttccgtcctgggactttgtaagtttggggttcgatctttaaggaggatggcactttagacggcattagccgttcattctttaagttttaagaactttttggagtgttaaatgctaaagttcatatataatgacgtctgcatggttataacaataatataagccgcgttctaatgtgttcctactccctccaaaaccttaacttttgtaaatcttattaatattctttttttcttgttacagtttactggctcatgggtcaggccatcaacaagacgcagatcagcaaggcatctaattatggatcctccaagtcggtcgcaaagtaactttcgaattcgcatttagtttcgattgtcgtcgaactcaattatctacaaatgactttgtaaaaggcagtcctctcacaaatctctctgctaaatggatcaattcgtgattcctatccggacgatttaaagtgttttgcatgtttttcttgtctaagtttatagttacgaagtaactcccgcacactggagccatcaatttgcgtacgtagttggtagttgtacacctaagtggaaatttaattgtttgatcaattgtattttggcgagcattgcaataattaaattaaacagaacgtgagagcgtgagtttgttgttgttgttttttgataaggcgtaaggtaagcagtgcgctgataagggctgctgataagtgtggacatgcaagcagtgcacctaaagagtgaccttaacacaaaataccaacagtatttctaaactggatacttgaaaattacacacatacgtgtgtaaaataaatgtaaaatttcgaatacattgtttttgagattcccagaaatgctttcaaaagttaccttttgaacaggaaggaaatgagcaataagcaaagcatattatccaaatatttgtgtttatcagcattcttcctacacgttcgtttctttatcagttgtaacgatcagaagcagcacacgttccgttagttcgactgcttgcccttggctatatgatcaatacaaccacacgccaagcataaaatcgcctttattcgccgataagcagtgtcgcccattccaattgactgataacaggtgattaaaagtgttagttgtgggtttctgggttgtactatcgacgagatccatatcactaggggctcgggccgcctagaagagtcactttcattcagtcgaattctactggttggtagaacaagttgcaacttcctggtctctaattgttaagattccgcttagataggtgagtgagtgtgtgtgtaaatgagaaagtggactgtcgcaaagtgaaactgaaacg

SEQ ID NO: 40187 - DNA, 545 bp, DROSOPHILA
caaccttaattttttaactgagtaatttggcgttctaatgataagtgcatagaatttagcaaattgcaaatttattatggttttaaattaaactcgcagaaacccccgccacaatgctgagtttgctgcatggaaagagcgtggaaccgcacctgctgatgaggcgtattccactggaacaggttccggaggatgagaaggaggcggccgcctggctgcagaacctgttcgtggagaaggacaagatcatcgatagcttcctggagacgggcagcttctttaagacgtccggcataaaggaggttccggcatatgtgaataaacgccggctgtgctcactcgtgaactttgtctgctgggcggtattctctctgtcctgcattttctactacgtgatcacatccctgctggcggccaactggacggcctttatcaccgcactttccgtcctgggacttttttactggctcatgggtcaggccatcaacaagacgcagatcagcaaggcatctaattatggatcctccaagtcggtcgcaaagtaa

SEQ ID NO: 40188 - protein, 143 aa, DROSOPHILA
MLSLLHGKSVEPHLLMRRIPLEQVPEDEKEAAAWLQNLFVEKDKIIDSFLETGSFFKTSGIKEVPAYVNKRRLCSLVNFVCWAVFSLSCIFYYVITSLLAANWTAFITALSVLGLFYWLMGQAINKTQISKASNYGSSKSVAK

SEQ ID NO: 40189 - DNA, 18877 bp, DROSOPHILA
ctcggcggggaacagtccctgccgcagggcttccttcgggatcagggccaaggtgtgtccagcagtgtgcccttcgtgttcatccttgacgattcgaaatcttcgaagagtattcagcagatctaccatcgagcgccagcctttctgggagtaccagcgaatcaacgaaactaaaactgagcttactgtagcaatcgcaatcggataacattgtaaataaagttaggtttattaacacaaggctagtgtgacaaattgtgacgtcctttgaggatccggttcatcagcactcgtcgtccctcaggcgtcgacatcctagcattccagccgtggacattaattctcttcacctccatgggtttcggaaaatggcagcgtactttcggtttcagcaccgcccggttgaaagcgtgcttatcccgcacgattagagtttgtgcggtgctgacaaccgccaggcaggtcctgcaatgccaatgtatgttattataccactcaaaataaatggtatattcattatttactcgcctttggagcattccttgcagcatgttaagtaatttccagttagtatgaccgcatgaagtccgaataataccgcctgaacagccggtaagccgctttggcgttgccagaccattgggttcgaaatttcgaacttagctgcatgctattttacgttagcatgtaaaatgcattacatatagatggaatcatacaattaatctaaaaaatcgtcataatattggtcaaatggaaaaccaccatatggggacaaattagataaaccgcttttaattgaatggatctgaaagtaaccgaaaactttttaaatatggaatgaatatgtttggttgtacatatatcgaattggtattgtgccatctctagctacccacgatggttgtggcagcgcagctgttgcaaatgaatccacaagatacatttcggtatattttccgcaacggattcttttccaccctcagttgcggtcacactgcctagccaacaacaaccacaactcggtgccgttagggctgcgtttgttttctgctcccattcagctgcatagaaaagaaagaaaagtgaaaagtgttcggaaaacaggcagcatgtgaagcataattactccacggaattactatctcaaacgaaatagttgtcgccgaaaagaagtgcgtaaaatcgcgagtgagctcgtgaaaatagaataaaaaagcgctctgcaattgaagagaaacattgctgcagtcgtgtgtacgtgcgtgtgtttgtgcgtgcgagtgtgagtgtcgctctctggacgcaatttctttggccaaaagagtggggaagtggggcaggagagtcccgaatcgaatccccgaaacaggcaatccgaatccgaatccggtgcattaaaaatagcgcaacgaggtgagtaaagatgcaaactgcagcattcagttcacgagctgatgccaacaaaaagaactccaattagccatgtctgcagccagccaaaaaaataatgaagaacggcagaaaaaatacaacaagaaaatcgattttcctgaacttacaattttctccgcctcactgggcaaaagggggggcgaaatggagcttggggagccggctacggctccataaagtatacataaattgaatttcgaaacacggaagcgaaatggatgcactggacgaaataatgaataaattattttgatatcgaaaagttattctcgttagaaaaagtttcgctgagggtctcgaacgcagtctgtttttataaaagcatattatttagccttatcaagcaagaggatgaataaaattgcattaaaatgtatttcgactaaatttcgacttgctatactttatttctctgcgtgtaaaagggggcaggaggctgcacacggctgttgttcttgttttgtttgctggtgtggatgatgatggaaatacttgcatatgtgtgtgcgttctgcacagagggagatgtaaaaattgaaaaatctgaccagaagcaggaccctccgacttttggtccagttgtcatggccaccgcacttaacaaatgattttagcggccactttttcccggatgcgaatggggcagctgtcactccgtttgcctcctcctccttttctcctttttctgatttcatctgtctgcccctttctatcttgctctctccccgtgttctccaacgtgtgtgtgtgtgtgtgcgtattttgatgacggcactcagtttccgcccgcactgtgatttttggccatacacggcaccaatgtttcagtacagtggaacctggtgcgcaggaaccaaatgaagttaagtttaaaactgcatttactgcgaccatttatgaaattttttaaatgagttacatttcaggttcttctagatttgttttaatgtgagtaaacaatttctgctttaaaacgtaaaactcacatgtacataatatacaattgttggcaaagcaataaaaacttattactaccataaaaataaataggtcgacattttcagacgcaagaacgcatagaatgtgtgaacaatacgtacaatagcttattgacacaatatttagcattcagcggattaactcatcaacgttggtttttgattgaatgtgttatattatctatttatgtacatattatattatataatatttcggcataggctttaactaactttatgcttgccactgtttaaactggcttggtttatcatacgtttttcccaattcgcgagtgcctactgtagaaaatccccggcattaccactcagttttcggcactcttttgcggatgctgcgtacgcaaaaaggggacgtcggctgttctaagaggactagatgtttccttttcacttccgccagcacccctaaattacgtgtctctgtgtgagtgtctctgcacgtgtgtgtgttgcgtgcaagtgtgtttgtgtgtgtgggccaacaaaattacttttacgagcatttagcataggttgttgtcccttcgcccatttccccggtttcccttcgccaccagttagttttattttgatgcgtttttaatcagattgcgtcaatttgttgctggcccaacgatgagggcggtcccggtggagggggggggcgttgggattgtcctattagcgcttgtgtgggagtgagcgaccatttcccgggttgcgtgtcaagtgcagacccttttttcgcccgcttttttcactaattataagaatgtctgttttggcctcgcatctggatgatggctcgtcattgggcttacattctcgcttttgatgactcaaaacttaacttttcacttttgcagttctctttgtggcacccacgcaattaattggattgatagattgaaagccttttgtttttaattttagcaaattaaatgcaagaataatacttaaatgattatatagatataaactttgaaatttgattatgataatatgataatatgaaaacaacttgtgctgaaggagagacagccgaagtttaggcaccaatttgccagcaaaagataacaagaattcattgaattatgtttgttttaaccagttaggttatgcattcttatgtaaagtttaccttttctataaactgtaactgatgttaaatttcattttttgtattcgttagttagttagtaaggggatcaacacttcgttgttcagtcgccttgtttttcttagtaccaattctttttgctttgcgcttctccgtggcccgttaaagtacagaaatacttggccaggccggccggagtgcgagtatcgtatctatcatggcggcagctgtccaattctccaaccagccggcactggatcgctgtttgttgttgttgctcttgtatctgctgtctgtcgtcttcatcaacgccttagtatctgtgttcgcttgcttatttatttgtgtgcgagagtgagtaagtggcgctgtgtgtgttgttggcttgaactttatggcattgcgttgttttatgtttgtttttagcattggcctgtgttgctgttgttttctgttattgttgctgtgcttactgcaagcacacatagacaatttaacgaaacatcggcgacagcgagcagatatacaacagacggcatcattatgcatgcaacagatcttggagctcatttgatcgccaactgcgcgcatggctcccaacgcagcagcagcagcagcaacaacaactgttgcaactccaacgccgccaccatttggccaaaatggcggatgccctgcctgtccgtcgcgccccgtatcccctttttggcggatgccctgcccaagacctcaagtccccaagcatcaagtattagttgcagacatcggccccacgcaaaaatatttttgctcttactccgcaactcagtgcactgcgagaaaagtgtgcacttttgaatttgcatatctcgaagctccatctatcattagaaaagttaacttcgactgcagttcatgtaaagtagtttgtattggtcataaaagagtttcaatttcaattttttggccagtgtggtgcaaagtactggggagtggagcaatgcccccaacctgtaggtgctcccctggcaccactccaccaccaccaccaccaccaccaccaccattccttgggccacggacttctgggaacttctccagtttcgctgaagcgataattgccgcgtgatttctaatcaaattacatttagactacaattacttcgactttgtgcgcatttagatgttatccaatttagccatcgttttgtcatggtttgtttgtcttaattggaaatcggattgcaattgccccttcttcttctgttgccgtaacccacttcaattatgcatatcaccaaattggtcttcatcatcgtcatagcctaattacactcaatttaactctatgaattaccgatatacatatgtacacgtacatatatatatgggcgcatctgtgtcagcgacaactgcaaccacggcaacgcctccatttaactgccccccagtgcatcacgtatgtatgtggcggggattttgaatcggcttaacacctttttgggcccgctttccacggatcattgggctcttgggcaatgcgccggaaattgggttacaccttgatggttttctcaattttttattcgttagcccccttatcggatatgcatatcagcctactttactaaccactcttatcatatcatatcttttggttttcggggcagagaagcgctatctgtgaaagccatgctaatgctcaccatgtgtcgcgcttccagttgattcttcggattgtttttatttacgcagaagaaacgcgtgaagcggactggagaataaagtcataagatccacgcatgacatcatagggtattctgagttgggaaatcgaatggactgggttttcggaattcgggagactctgctgtcatcagatattcatatttatgtacatgtgatagaagatcagcgaaagcatttttcgaaattacaagttaaagataagcaattctttgataaatcaaataggactgctttagatactttttagcagctggaaatatcggatactaaaagatcatatactaagaaatgctctttaagtgctgaaaatccagctggttttgtgtatcgttaaatacgataaaacaacaaacatctctttggaaagtattttcaaaattttcaaagttgtagcaaatactaggctctttccactaacgaaatttgtttttcaaaatgcaaagacttacgaatttttaaaaaataaagacatacataaaattcgtacataaatgaaaattttattagatcgaaaatgccttacactatagctatgaacatttttgtttatcattaaaatgaaggaaacaaccaacgaggcatggaaatttttttttgacgtatcgctttgtttttcatttgagtttccctcgtttgggttacaatttttttgctgaagtcattataaagtatttttttcttgcctttcgttttgtgtactgggcttttaatttttttgtttttatttttttttgtaaaaaaccagaatgcgacacgcctttcgtgaccagcccagatatcccattgcattggattccaatgggcgggaaccgaaaaaaaaaactcatagccaatgcgtggcgatgattgagtggagtcaagagactttggtctatttttggtaattgcatggcctgctttccactgtatagagctggggatttccaacgctccccagccaaatttttgagtttccagttcactggcgatgcgtgcaacaaagcatattttcaataagactatttccaacgacaagattgtgggtcaaacgccgggcaaacgagcatgtgtacacaaatttcgtactcgtgtgcgttttcctgtgtataacaatttttcaatcggccagcatcgtaaacaatatacaagcgaccaacaatccattagtccaatgctggccatctctatgccatccccccaaagaattcatcgtgctcatcgtcggaattgttcgcccagtgcggcgaatcaaattaattaagtcggccctgccctacccgttgtccagatcgaaggggtaaggaaacaaaattgctggcaacgaaaagaaagcatggaaagttggaacaattgtggtttattatttcacaagaaatccaaccgaattaatacgggaaagatgaaaccacacagaagacaacattgaaagctaattgaagatgaaacactcttattgttcgaaaagggaaaaaatacgattatagagtattggttgaaatgggcctagcttcttgtatgagtcagcaaaggtcagttctaaatgctgtacaatcttatcagtcagttgtctaacattgtgaataatggtttatattctgtagaatgatttcataatgaaaactcaataggaagttaaagtttgggaataccatattacatatattcattcagtgccaaaaaaatgccataaaaaagtttgggccaccaagtgaatgcgaccaaaaaccatgggctcggatgagtaatgcgtctgggtgcacggaaaatgaaaataaatttgtttatgcggtcgctgcattctgtgatgaaagaatttctttgttgcactgccactgccgctgcagaatcaacatcttttgtgtcacgtagttgcaagaagatgatgatgcagtggaagccaccttgtgtgtgtgtgtgttaaccaaggctaattgaactgaactgcactgggcgcaacctctggagacgattaattgcccgcgggaagagctgaaacgagtggcagcgatagcatagagtgaaggggcaaccatcgcaaagtgccggctctaaatgtttggccctcttttctaatcacattaatgccacaacaacaatgatggcgatgtataaaagtcggcccacttgaaaggctcgcgttgcgtgggcggtggcaccacactggaaaaaagggttctatggccaaagaactggttttggaaattagatattttaaaatcatgcataaaaggtatcgctttaagattgattgcttccttaaaacgtgtgtaaaacgaacccaaaaatccaatcgatatgcattaataacgtatgttatctaaatcatgaaatatcgtgtcttggagtggatttattctcttgcaactaaagctatacgttgtcaactataatttatgtgtatcttatgaataaatccatctatctgtttgatttttcccagtgcactagcatcaaccacatcttcatcctcgccatcattatggctcttttttctatattgttcttgtacctttattagtttgcctttgtgtcggctcaatttatgtgctgaccctcgaactccactggcggcaccagtgaaccagtgaaccagcatggatgtggccatcatccgtccactggacatgcagacgccacatgaagctaccatctaaagcgttgcattcagcaggctgaaacaacggaaaaacttgttttgtaataccgcctgttaagttatgttctctcattgctccggcacccactacgtatgtatgtatgtacgttgccctgcccccatgctcctccggtgattctttggtttttgcatttggcgcaatgctaattcatttgcatacccagcaaatacactacacactcggcccaaagtctcattctcattcatgccaaagagcagggagcatggaaggggtgatccggggcacggagctggagaggagcgtagtggagtggagtgttcatggggtataacgaacgactgatggccccggcatgcttggctgcattttaagttcatatatggtggcatatatatggtgtttggcagggagaggacaagaggtctgtatcggtggcatattgccgccgcttgacacttgggccagctcctccagctcctcctcctcctcctcctccttttcccatttctcatttctcatttgctattccagctgggtctccacggacggaggtcttcaattaaatttaactagaaagcaggcagcacaacacacaaatacgaatcgatgcaatgcgatgcgatggaaaaacaaatgatattttagttgcgcatgcataagcaattataatttccattatttatggcattcaataactcaatagtagtcgatgcttcttgaagaaggcattcctttgatatcgattgcaagtgacgaaccctatgcagtatatagttagtgctttgtagcatcgcacatttaatgccgcaattaaggcattcccatgcacttcactccacttccctatgcatttttatgacaagtcacaaacattaaccccattcagccggaatgctgcaaattgtgcaatgttgccccaatttgtgtcgtctccccgcaactgcaacacatggtcgcctcatttgaacccgcagcgaaaaatggtatggggttttgtacggcgataatgcctgcgttgaatgattatcgaagagttatttggggagtggttggtcgaatgggtctataaatagaagtcgatgataagcagacaagcttgagccaaatgaaaatcgtagatgggggggggatgcgtgttcaatgaggggattaacaaatttatggcgagtactccatgaagtggactggagcaacatgaaagggttgtactgattcgaattggatgctcactttggagcagagtgtcattgggatgccaattgaatgggtagcttctattagtatgacgtaaataattcagtgaattattcataatcaaacagcaatagtcttcgcccgactttgccccttcacccatagttgtcataagtggtggcttaattaaatgcccctttcgagtcgaactttccattttcttttcttcaattatcgaaaaagatcatgtgcatcacgttaatcaagcgttaattttccccacaaataccggaaaaacaacaacatctgacggttgtttatgttaattacttgtcggaggaaaagttgcagcaacatagacacaaatgctcgaagcacaaattgggtttgggtcaccgaacccagtcgacaattaattagcatagaccatgttggatggcacccacctcctgctcctactccaactcctccctcaaagaccttgcgccataaaatatgtctaataataataataattccccataaattccacttgcagatggtgaaggcgctgctaacgaagatgataatgtaaatgccgcatcgacgcatcccctttctcttctctctccaaacgaaagcgaaatcccagctgggaaactgtagctccagctaaaaccgaaccagcaaaacaaaaccgaaatcgaaactgcattctttggactcatatttatatcacataacgacacatatcgccgacggaaccgaacatgagattccagtggttcttatcggccagtgcgagcttgtcgctgttccttctcctggacttcgtcgtatggattcacggcgagcgggacttcaatgtcaacgactcccaggtgagttatttcccatgtgggtcacaagtaatcaaattggtttggaaattgcaagaattttgattaatgaagagtgggtttttttttttttggaaactacttataagctagccattttagagattagattgctgtcgggttttcggctgtgcaatctataatgctaactttcaccttatcttgcaactgaaacaacaaattcattaataaaaacacagatgaataatctttatacattagttatctttatatatttttcacatccctctcaatttccattcaaggtccctgtaattgagccaaaggatgtgcccgcctacaaacaggatccgtatgttacggaattgatgagttgccaaaatactccgagtgaaattgtgctttcacttttgttgaagaagcacgactggagtgagctgacggccacgaaacgagctcatgtccaggccaagttggccaagttctttgccatacccaaggttagttgtgccaaaaatgcttgaaaaggattagttaaagtatttccttgtaggaattcatttccctggattcggtgtctaaacgcgaactgagatccatgcacaagttggccatgagaaaaggaggcaagggcaacaagaatatcgagaccctgaatcgtcgcctgggacgcgccagtttcatggtttgtattatatttgaatgaataaaaacattttctttttatgataatctaatctgctactcattgcattcctttcttcagatcggctgtggtccaagctactttgtgatgggcgaaccgatagccaagcagattgcccaccaaatgaaggatggcaccattggcgctttgacggaggagaacttcgggctgtggttcatttggcgaaaggaattgaaatcaaggtgagtaagaagtcatcaggcttattagagaggaagttgttttgaaacgtaaagttctaaatatagaacttactgataacaaagtcgataaccgcatatctgatttcctgttaatgtggcacactaatctcggtccttcaactccagatcaaaccgcaagcgacgtcaatccgagggctctggtgccgatgaagatgactacgactatggggatgacgatgaggaagttgcgtgagtatcaccctttcacctgagtgtggcatagaactgataatttcgcatttatttcgtatgccatcgatggataatgggtgcagtgagcccagtacggaagtgccaccagtgaccacacatgcccatcgacatcatcacggagcggtgagtgttggggccaattgttttgaagacaattcgccatatttgtttcggtttctctgggtgttttctttaactgatacatacgtttaaatgagaatacccgcggttcatacttgttggttaaccacacatgctgacatatgtatgtattacgtgtatctgtatggatatgtatggatcgcgttggacttactgtctagatacgtttttgatttccggaagctatttggttctgtttgttttcactgcactttgttaataaccgcaatttggaataatatccaaaaaaccacactgcacacacacccacacatgcatctaaatggaacacacacaaaaaaaaaaaaaacacacccacatgcgtacactgaaaataactataattcatcatacggtgtttatgttctttcttctctttttgctatcttcctctcgttctctcactatgtgtatatcgatctaattgtgtgttaatgttatcaaccaatccaaccaaatatattgtaaaatatgtaaaccatttcgaaatcgcctcaacaactaaccaactcgactcattcgctgtgactaacccaaaagttggaggtgtcggagaagatagtgtcgcccgaatccgtctcttcgtcggctgttcccctggttccggacgtggaggaggagatcgaagagagcgtctccaagctggagtccgtcatcagcaagacgattgagaatacgaagaatattaaggagctgcccgttctgggcgaagccgacgatggtgaagatgaagaggaagtggaactacagcaattgggagttccattggccgcggagattgtgccagacgaaaccaccagtgcggcggccacacgtgccacggaaatggtaaagcccgttgatttggatgagcaagaaatttcggtggactccggcgctgtgccggctatcgatgtggaggcctcggccacgcccacgccctcgatgtccgctcgcgaaacacagaagcccttttcaccctatgacgccacctcttcggtgtcgtcctcgttctcgcccgtcgcatcgattgcatctggcagcgaagctggtgaagattcaacttcggtgtcgacccctcacctgtccccagctaactcacccacggtcatgcccacagagctagacagaaatggcctagccaccacatcatcctcatcatcttcatccgcctcacctcctccatcgtcatccgttccaacacaagccactcaaccaaccacatctgcatcatcattctcatcatcatcatcaacaacaacaacaagcacaacagcaacagtctcaacaacaacaacagcatcatcaacagcaacaacaactacaacaacaacaacactgtctgaatcgccaaaggtaatgatgtcgcttctgtgtgtgtgtatattacgaacgagtgtcctttttgcctcgccgttgtacgtgtgcgtgcctcatgtccgtatgtccttattgtcccctgttgttgtcacttgtaaaacgttctcttccacctctctccaccggcgctttgtgtcagaagttagtttagctcacgactctctttttacatacatacatatattgatattgtgttttattgcctttgtgctgtgtaaacgtagcgtcccataaaaaaaagccaaactccacaaaatgacaggacatttacgtaactgccgtacaagattttagtggagttggcaagtacgagagcataaatgttagactgactagatagcaaatagttataaagataagtgtacatactttttgtgtagctgcagttagttttttttctgtagtgaaggatagcaggatgtataaataactatatatagattaagcgtatttgtatgatagtcctaaaaaacgtacatagtacataaagtaagatggtatgcagggtttgagttgctcaggaacttcgtagataaccgcccactttccgccccttggagaaaaaacctactcatatttgttaccaattaaacacaaaaaaaaatatatgcagccaaatactgtgcttaatgagctcgagctgagcacccagctgcccatcgacgattttgaaggcactgctactgcaacacagccaactggcactgcaactgcaactgccattgcaagcacagcagcagcagcagcagcaacagcagcagcagcaaccgcaacagccacaactgccaatgcatctgcaacaacagcaggcgaaagcgaatttcatatagagtccacaacgcaccgcacgattagctctaaggtgaaatctcgcaatcgcaatcgcaatttagatgttaagccatagatttgcacctccacccgctcttgaaagtacaataccaccattccggctctcaacaaaacccctcttcacccgattgtctcaccgtttatcccgtatccaattaggggaaattgcttccagccaaatgcacttagcatgtaagggcagtaggcaattagctaaccagagctcctgcatgaggtccttggtaattgcatgtccactatggagcacttacttgtatccgtaccgtatccgtattggttatactaacactaacactcgctaacacactcactctgcctgcctccttagccgatgactttgcagcatgacacttagccagccatctgtcgccaattagccatctcactgttaataatttccctgtaattcccaggaaggaggagaacccgatgccatcagcagcggcaacaatagcctggccaataatgaggtaacatcagacatattcccttggcaacgcttgaatctctactaataacattaaactcacttcattgccaacagctgtcgacgcccgccacgcccacatcttcggtggccacgaccacggcatctactccggagtcgagcagcatcagcagcaactttgtctccaccgactacatggaaccgcagccggaagagaatagtccgcccatcatcaagacacgcctgcagaagctggctgtcacatcgggcaaggccttcaccttccatgtgctaccggaaacgttttacgatgccgaggatcagggtaatctccgcctggcgctcaccgacaaggatggccacgagctaaaggcgaactcttggctgcagtttaacgccgacaagagggagctttatggcctgtgagtagttggttcactaaaatgtcttaacaaggattgtgatttatgaatctcatttcatttgtagacctctggacgacacggtatcccgctggcaatatcgcctgtcggccacggattcgggcaacgccagtgtcacggaaaccgtggagataagtgtgcagcagcatcgagcggttaggaccattaaccacgagatcagtgtttttgtacggatcaacgagaagccgggtcacaacattgattggcagttgaagctcattaatgcggtggccagaaccttggatgactccaccaattcggcagtggtggtgcgtgagatccgacagacaccacacgatccacacagtgccaccttcgtgtattttaatgaaacgctgcccaccagcgagtgtcccgaaaaggaactaaaggatattattgcacgactggatgccaatagactgagtgatttggttcagccacagctgggaatcaaatctataacaggacagttaatcggatcctgtcagaaggatttaactcaggtgaagcccacgcaacacatgaccaagaatgtgcctccaatgccacgcaaccaggtggatcgcgttaacgctagcttgggccagctgctggtctacaaagtgccggcggataccttctatgatgcgaacgacaatcaattgactcttacgttgaaaaccagggatcaccttgagcttagcccacgccactggctgcagttcgactccaagaacgaagagttctatggcattccgaaaagcggtgacattggttccgaggaatatctgttggtcgccgaagacagtggtggcctgagtgcccatgatgccctggttgtagtggttagcccagcgccaaagcgtgactttgggttcttcttcaaagcgtatctgtctatcaaacacgagcgattcaatgccgatctgcagcggaagtttgtagagcgtgtagcgaagctgaatggagatcctactactggccagatccagatccgttcgataaccacgcaccacgactccgatggcaccatagtgaacttctacaatacgacgctgtacaggaagcacaacagttgtcgggagaaggaagtggccatgactaggagtgtctacctaaacagtgacctcagcctgagggaggcagccaaacgggctctgggacccgagctcaatttgaccaacttttcggtggtgcccttcagtatttgtcatcgtaaggattgcatagttagtttaccatatgattatttttaaaattaaaaaatatcattatagatactgagaacatagacaccaaccaacttgattatatacctagtcgccccgaagagcctacacataagtcctctttcggcgaggattacatgatcacgttcgtatggcccatcgtgatcattgtggcgatgcttgtggctgcctcaatcattgcctgttgcctgcactggtgtcgccaaaggagcggcaaaatggagctaggtaggccggcgaaactgactcaattcaaattacactgctttacaaaatggatctatcgatttgctttctaggcgacgaagaggagcgcaagtccttccgtgccaagggtattcccgtcatctttcaggacgagtacgaggagaagcccgagatcggcaacaagagtcctgtcatactcaaggacgagaagccgccgctgctgccaccatcctacaatacctcaaacatgaatggtgcgcccacatcgatccgttatatttataatatgctaatcgtgtactccttgcaggtgacaacgacgtggacgattatgtgccaccaccatcggtggttgtgggcggccgggaagtgcgtggcaagtcgccagccacgccctcctaccgcaaaccaccgccatatgtgtcgccataaatcagtgtcaagagcagcaggaaagcagcaaaccagattggaagcaactgcaacaataataacaatcgcatcgtattaaccacacaatctacatagatatatacatatatatatttaaccgatttggcacaagttatatgcaactaagcaaactcttttgtatatatccaagtgcaaattggtttctttggacactgtattcgaattgagggaaactgcatcccagccgagaagtattcgccaagtcgatggagtttttttatggataacgttttgtattagccgagaatggagaaacaatcatgtgctaaattactggcaaacataaagtctacaccgttggactatcgagtatcactaacacaaaacacaaatcgatgaactatgctgcatattatttatttagtatgtactctaatttatatgtaaaccacgcgaaccacaaggacacaaatggtgtttgttaggacacaagcatcggagcttgaaaaacacacagacacatgcacacgagcccattttaagcatagcatttaaaactctttgtactaaaattaagttaaacgcgagaaagaaggcacacatgtccatcgtcccacgtccctgggcagctattagactttcagcttgatttgctcaagctgaattgcttgcatgttttttttttttgaattatcggaccactatgctgcatatttccatcaaaggatcaggggaaccaccgaggcaggctgcgtacttgccgctgtttggtgcccaattgagtttagtactttagttgttttaccattggcttaacttactgggacgtacggcgaaggacgtgtccgaaaggagcttgattattttacattctaagaagcaatcgaacccacaatagtgctgccaataatccaggtactcggatcgaactagccgtttgaataccaaacgattcctaattacccacaagtgcttcccacagacagacaaaccaacagaccatatccaccagacacacaacatacaacatacaacacacacacacacaaatatttatacgaaaattgattacttaaagtagaatctagttttaaatgattttcacaagctcccctttggataattctatgtgaaatggttagattagtttatatgtagctgctagttgggcagtacttactacactactacctactactatctactacctaatccaaccgtcccttatccctgaatcgaactaacatgtagtgagtaaagcattgattttatatgaacttatagtggaagtccagagcctaagttagagcaatagttgcatgaaggatgggaaatgaaattgaaatggaaattgaacttgaatatgaaattgaattactttacgagaggacactgattttgtcgtcgtgaaaatgtgcacgaaagtgctacgcaattgcctattaaactaagtacgattaactaatttgtgtatttgcataagctcaaccgctgaattatttacattatgtaatttgtaatcgagcaaacagcggtcgcattagcaacaacaacaacaacagcaacagcagcaataacaacaaacggtatcaatttattttgaataaaaaaaatgccaaagatacgattttagttgcattattatttgccaatatttgcgaatatttttttagacaaacaaaaacacacacacacgagaaaacacatagacaagagtaagtacagagctggaaaattgtaatttttctccaaatcaaataaataattgtgcatatttgtgaaaaattgaccgaatggccatggtcgagttgcacgtttaattaatagatatatatatagatatatatattcagtaaaaatcagagaaactattgtatatttaatgcaatctgtttgccattcgattggcttcaattgagcgagctgtaccctccacaaatacacaggcaaatcaataaacacatgcaataattataataattattgagaataactaactgcgtgaatataaaggtacatacatacatacgtacgtatgtacatacatatgtccgtataggatatacgtatgcatatatacatggattctaataaacatttatatattttgatacaaaagaagccagtgttttatttcctaattgctgccgtctcaacttccacgttccattagtaatataatttaagaaaaattcaatttatggaaattccataacgaattatggaatcaaagtgagcaggaaatcgggtgtgggtggtgtatgggttttttgtataggcaaaaaagtcaaatcaaaagcattgacataatgaagtaatacaaatttgtttttcttgtcgcttttgccgcctaataaagacatccttccccgcccacttttccaccaccctccactcctcctcgcaagctattgattcccgttactttggcaaccaatacgcgccggatgctgccacacacacacacacacacacacacttaaactcgcacatatttgcttggcttcgttgacgccagcggggaatattgtctatcgcgtgtgtgtttgtgtggctgcaccgcgagaaaattcgacacgaaagtgataccacaaagtagcctatatatgtagatggtatattg

SEQ ID NO: 40190 - DNA, 4777 bp, DROSOPHILA
cctagccaacaacaaccacaactcggtgccgttagggctgcgtttgttttctgctcccattcagctgcatagaaaagaaagaaaagtgaaaagtgttcggaaaacaggcagcatgtgaagcataattactccacggaattactatctcaaacgaaatagttgtcgccgaaaagaagtgcgtaaaatcgcgagtgagctcgtgaaaatagaataaaaaagcgctctgcaattgaagagaaacattgctgcagtcgtgtgtacgtgcgtgtgtttgtgcgtgcgagtgtgagtgtcgctctctggacgcaatttctttggccaaaagagtggggaagtggggcaggagagtcccgaatcgaatccccgaaacaggcaatccgaatccgaatccggtgcattaaaaatagcgcaacgagatgagattccagtggttcttatcggccagtgcgagcttgtcgctgttccttctcctggacttcgtcgtatggattcacggcgagcgggacttcaatgtcaacgactcccaggtccctgtaattgagccaaaggatgtgcccgcctacaaacaggatccgtatgttacggaattgatgagttgccaaaatactccgagtgaaattgtgctttcacttttgttgaagaagcacgactggagtgagctgacggccacgaaacgagctcatgtccaggccaagttggccaagttctttgccatacccaaggaattcatttccctggattcggtgtctaaacgcgaactgagatccatgcacaagttggccatgagaaaaggaggcaagggcaacaagaatatcgagaccctgaatcgtcgcctgggacgcgccagtttcatgatcggctgtggtccaagctactttgtgatgggcgaaccgatagccaagcagattgcccaccaaatgaaggatggcaccattggcgctttgacggaggagaacttcgggctgtggttcatttggcgaaaggaattgaaatcaagatcaaaccgcaagcgacgtcaatccgagggctctggtgccgatgaagatgactacgactatggggatgacgatgaggaagttgctgagcccagtacggaagtgccaccagtgaccacacatgcccatcgacatcatcacggagcgttggaggtgtcggagaagatagtgtcgcccgaatccgtctcttcgtcggctgttcccctggttccggacgtggaggaggagatcgaagagagcgtctccaagctggagtccgtcatcagcaagacgattgagaatacgaagaatattaaggagctgcccgttctgggcgaagccgacgatggtgaagatgaagaggaagtggaactacagcaattgggagttccattggccgcggagattgtgccagacgaaaccaccagtgcggcggccacacgtgccacggaaatggtaaagcccgttgatttggatgagcaagaaatttcggtggactccggcgctgtgccggctatcgatgtggaggcctcggccacgcccacgccctcgatgtccgctcgcgaaacacagaagcccttttcaccctatgacgccacctcttcggtgtcgtcctcgttctcgcccgtcgcatcgattgcatctggcagcgaagctggtgaagattcaacttcggtgtcgacccctcacctgtccccagctaactcacccacggtcatgcccacagagctagacagaaatggcctagccaccacatcatcctcatcatcttcatccgcctcacctcctccatcgtcatccgttccaacacaagccactcaaccaaccacatctgcatcatcattctcatcatcatcatcaacaacaacaacaagcacaacagcaacagtctcaacaacaacaacagcatcatcaacagcaacaacaactacaacaacaacaacactgtctgaatcgccaaagccaaatactgtgcttaatgagctcgagctgagcacccagctgcccatcgacgattttgaaggcactgctactgcaacacagccaactggcactgcaactgcaactgccattgcaagcacagcagcagcagcagcagcaacagcagcagcagcaaccgcaacagccacaactgccaatgcatctgcaacaacagcaggcgaaagcgaatttcatatagagtccacaacgcaccgcacgattagctctaaggaaggaggagaacccgatgccatcagcagcggcaacaatagcctggccaataatgagctgtcgacgcccgccacgcccacatcttcggtggccacgaccacggcatctactccggagtcgagcagcatcagcagcaactttgtctccaccgactacatggaaccgcagccggaagagaatagtccgcccatcatcaagacacgcctgcagaagctggctgtcacatcgggcaaggccttcaccttccatgtgctaccggaaacgttttacgatgccgaggatcagggtaatctccgcctggcgctcaccgacaaggatggccacgagctaaaggcgaactcttggctgcagtttaacgccgacaagagggagctttatggcctacctctggacgacacggtatcccgctggcaatatcgcctgtcggccacggattcgggcaacgccagtgtcacggaaaccgtggagataagtgtgcagcagcatcgagcggttaggaccattaaccacgagatcagtgtttttgtacggatcaacgagaagccgggtcacaacattgattggcagttgaagctcattaatgcggtggccagaaccttggatgactccaccaattcggcagtggtggtgcgtgagatccgacagacaccacacgatccacacagtgccaccttcgtgtattttaatgaaacgctgcccaccagcgagtgtcccgaaaaggaactaaaggatattattgcacgactggatgccaatagactgagtgatttggttcagccacagctgggaatcaaatctataacaggacagttaatcggatcctgtcagaaggatttaactcaggtgaagcccacgcaacacatgaccaagaatgtgcctccaatgccacgcaaccaggtggatcgcgttaacgctagcttgggccagctgctggtctacaaagtgccggcggataccttctatgatgcgaacgacaatcaattgactcttacgttgaaaaccagggatcaccttgagcttagcccacgccactggctgcagttcgactccaagaacgaagagttctatggcattccgaaaagcggtgacattggttccgaggaatatctgttggtcgccgaagacagtggtggcctgagtgcccatgatgccctggttgtagtggttagcccagcgccaaagcgtgactttgggttcttcttcaaagcgtatctgtctatcaaacacgagcgattcaatgccgatctgcagcggaagtttgtagagcgtgtagcgaagctgaatggagatcctactactggccagatccagatccgttcgataaccacgcaccacgactccgatggcaccatagtgaacttctacaatacgacgctgtacaggaagcacaacagttgtcgggagaaggaagtggccatgactaggagtgtctacctaaacagtgacctcagcctgagggaggcagccaaacgggctctgggacccgagctcaatttgaccaacttttcggtggtgcccttcagtatttgtcatcatactgagaacatagacaccaaccaacttgattatatacctagtcgccccgaagagcctacacataagtcctctttcggcgaggattacatgatcacgttcgtatggcccatcgtgatcattgtggcgatgcttgtggctgcctcaatcattgcctgttgcctgcactggtgtcgccaaaggagcggcaaaatggagctaggcgacgaagaggagcgcaagtccttccgtgccaagggtattcccgtcatctttcaggacgagtacgaggagaagcccgagatcggcaacaagagtcctgtcatactcaaggacgagaagccgccgctgctgccaccatcctacaatacctcaaacatgaatggtgacaacgacgtggacgattatgtgccaccaccatcggtggttgtgggcggccgggaagtgcgtggcaagtcgccagccacgccctcctaccgcaaaccaccgccatatgatcaggggaaccaccgaggcaggctgcgtacttgccgctgtttggtgcccaattgagattttcacaagctcccctttggataattctatgtgaaatggttagattagtttatatgtagctgctagttgggcagtacttactacactactacctactactatctactacctaatccaaccgtcccttatccctgaatcgaactaacatgtagtgagtaaagcattgattttatatgaacttatagtggaagtccagagcctaagttagagcaatagttgcatgaaggatgggaaatgaaattgaaatggaaattgaacttgaatatgaaattgaattactttacgagaggacactgattttgtcgtcgtgaaaatgtgcacgaaagtgctacgcaattgcctattaaactaagtacgattaactaatttgtgtatttgcataagctcaaccgctgaattatttacattatgtaatttgtaatcgagcaaacagcggtcgcattagcaacaacaacaacaacagcaacagcagcaataacaacaaacggtatcaatttattttgaataaaaaaaatgccaaagat

SEQ ID NO: 40191 - protein, 1277 aa, DROSOPHILA
MRFQWFLSASASLSLFLLLDFVVWIHGERDFNVNDSQVPVIEPKDVPAYKQDPYVTELMSCQNTPSEIVLSLLLKKHDWSELTATKRAHVQAKLAKFFAIPKEFISLDSVSKRELRSMHKLAMRKGGKGNKNIETLNRRLGRASFMIGCGPSYFVMGEPIAKQIAHQMKDGTIGALTEENFGLWFIWRKELKSRSNRKRRQSEGSGADEDDYDYGDDDEEVAEPSTEVPPVTTHAHRHHHGALEVSEKIVSPESVSSSAVPLVPDVEEEIEESVSKLESVISKTIENTKNIKELPVLGEADDGEDEEEVELQQLGVPLAAEIVPDETTSAAATRATEMVKPVDLDEQEISVDSGAVPAIDVEASATPTPSMSARETQKPFSPYDATSSVSSSFSPVASIASGSEAGEDSTSVSTPHLSPANSPTVMPTELDRNGLATTSSSSSSSASPPPSSSVPTQATQPTTSASSFSSSSSTTTTSTTATVSTTTTASSTATTTTTTTTLSESPKPNTVLNELELSTQLPIDDFEGTATATQPTGTATATAIASTAAAAAATAAAATATATTANASATTAGESEFHIESTTHRTISSKEGGEPDAISSGNNSLANNELSTPATPTSSVATTTASTPESSSISSNFVSTDYMEPQPEENSPPIIKTRLQKLAVTSGKAFTFHVLPETFYDAEDQGNLRLALTDKDGHELKANSWLQFNADKRELYGLPLDDTVSRWQYRLSATDSGNASVTETVEISVQQHRAVRTINHEISVFVRINEKPGHNIDWQLKLINAVARTLDDSTNSAVVVREIRQTPHDPHSATFVYFNETLPTSECPEKELKDIIARLDANRLSDLVQPQLGIKSITGQLIGSCQKDLTQVKPTQHMTKNVPPMPRNQVDRVNASLGQLLVYKVPADTFYDANDNQLTLTLKTRDHLELSPRHWLQFDSKNEEFYGIPKSGDIGSEEYLLVAEDSGGLSAHDALVVVVSPAPKRDFGFFFKAYLSIKHERFNADLQRKFVERVAKLNGDPTTGQIQIRSITTHHDSDGTIVNFYNTTLYRKHNSCREKEVAMTRSVYLNSDLSLREAAKRALGPELNLTNFSVVPFSICHHTENIDTNQLDYIPSRPEEPTHKSSFGEDYMITFVWPIVIIVAMLVAASIIACCLHWCRQRSGKMELGDEEERKSFRAKGIPVIFQDEYEEKPEIGNKSPVILKDEKPPLLPPSYNTSNMNGDNDVDDYVPPPSVVVGGREVRGKSPATPSYRKPPPYDQGNHRGRLRTCRCLVPN

SEQ ID NO: 40192 - DNA, 7412 bp, DROSOPHILA
aaagtgtcattttttttatttgctccaaagaagagctgtcttcttcgcttgcttccgttgccggcagcgacaactgaaattagtaattagtgctgccaatttgagggtacggaattctttcgattagcaagctcttcgatgacgcactcagcatatcggcaatatagtctatatatctatatctatatatctattgctatacccattccatttgcgactgcgtgatgggattgcaaacagagccgcgattcgaattcgaggatcgtcgtcggcgattctctgcgattttagcgaatctgtcgttaattttgttcgattattattgggttgtccaacaagccagattactatctgtatctatatctgctggccacttctccagcctgtgaagtggcttgataagattctagggatccaaaaaatccaacaaaaaattcagagaatattgcgacatgacattgctggagtttccaacttcattctcatgaatttccgccgcattaaaaggctttgggtgtaagccacgacattgagataaccccctttttattttttttttttggtatctcgaccatttcgtttatttttttacattttccacttacgtgtggtatttgtgaaatgatcataaatcgctcgctggaagttgtatgtattacatttaatttttgttgcgctggtcagcaactcggggagatccagaatcgtttcccacatcgcgagatatgcaaaagttcggcggccactaattgtttatgaccaatcacctttcgtttgcccacgtccagtgaactcttatttgttgtgttttgtgtttataaacaaatgaacagtgtgcatgcgagccaagtgctttgcaattgggcgaggttaatgcttcgcggaaaatcccgcgcaggaaccggttgcattagctccccgccgataacaatttgttattaataattaataacgcatcattactcaccgcaaaaagcagcagaagcaatgaggccctaagatggaagccacaaattggaagcaatcgcatcgaaggattcacgcactaatccttatcctttggatcgctggggtgcaaggacaaaccgttggttccctggtggcagtgagtgagagccaggaactggcggagagtaagtattactctttgaaaaataagcatatggatgtcactgataatatgatattaatataagatacactgatataagatacttttcaaatcctaagtgcatccagttttgttttagcctataaaaagctatatgtattaccaatattccagaggtggaggtgactgtggtttctacggtctacacactcggctttagcatctccaacgaggcggactactccatcgataaggtgatctgtcgcaatggatccggatcggaaaccgaggccaacgcagcgcacgtttggttcgtagaatgttttgagtgaaatgatatcgcggactaacataatgcctatgatttccagtgaaaaccttaatccttgcaccttctacacatcggtggtttcattccgttcgaatgtctccggcaaaccaccgccttctgaccaaaccatctatgcctacactgaatataagcgtatgtttatataaaaatgctaactatgaaaaccataaaccatatcatctttaatcgcagagcccaagaccacagtgacctcagtggtggccacagcgaacaccatcaaagtgacctggcagacgaacgaccgcgcctgtgtggagtcctttggcatcacggcaaaggcgacggactacaccaaatcctttcagctgctaaacgataaaagttctcagactttcgtgaatttaagcgcctgcctaacgcacacgatcaccctggacacgcgaaacaacgctagcgttgtggtggacacggatgccaccgatgtggacacacagtacgcggagcccggcgatctcgtcatgaacgtaacgaacctagccagtggcatcacgatgatcacgtggggagatccctccgagaagaactgcatcagtaactatgtcttcaagtggcaacgcaacgattgcggaacggatcaaaatcaggataccaccacggatgtgcccagtacggaaactacgaacgagattgactacgttaccaccacaccaatggagaccacacccgatacgcccagtgatgaaggtagactctaggttcctcttataacctcttttgaaatacatatgtgttttattcttcccatcagttaagtgcgagtggaccgatgtctcctccgatggcaagctgagggagtacctcctgaccgatcttcaaggatgtgatttgtacacctttcaggttttcatcaacgagaacagcacggccaaggcttctcagacttttacttcggcagaaaagtgtgagtgcaactagatagaccagctatccaagtaaaccataaatcaccataattcaaatgtttagtggtcagtgccgtctatgaacccagtcccaccgcctatcccacccagttgcattggacttggttctctccacaaaatcatcccaaatgtgtggctaactatagtgtaacgctgaccggacccattcaacgatcggaaaacaaaactatgaatgtgatcacagaggagacattcgctatcttcgacgaccttgatccgtgtggaatatatttggtggagattgtgcccaatcagctaaatggaagcgctggcaccaagtaccaggagcagagcaccgtgggcgaggatcgtgagtgcaagtgcgcttcaactcatccaacatctatctatctactatgattatcttcttgtagagccatctgtgattcaagatcccgtcgtggaagcagaagcctactcgatggaggtgagctggaagacgcccgagtacgccgatctctgcatcgatggctaccgattgtccggctggatggaggacgataagctggttgaggttgaagcacttagtattaccacccagaatacgacggttgttttcgacaagaatctgctggcctgtcaggtgtacatcattcagataatcccatacaccaaggagaacctcgatggtcagctgagacaggttggtgtggagaccaaagcagctatagttgattacactaaggtactaaggactattttacgtatatttcgtatccatttgaccatttcttactgactgcaagcattttattgaaggtcaagctggaaatgaagaatgctggctccgaatttattgatttaatcgccttcaatgcggactacaacaattcctgtccgacgatctttgcgctcttcacgtgcaatgccaccacccaggtgcgaaatccatacgcggagcgttatgtggagggacatagcaaacaaggtgggtgtactggtcatccagtcattcggtatccagatggctattctaattcatattccattctcaggttttaatgccagtctaagtccactttccccctacgccacctacgtttgcaaagtaatactctacaatgtggcaggaccttccgaaccagttgtcgatgctgatatgcacaccacaacctactgtaagacctacattatatacatatgtatatatgaagttcatatgtaagttgatctgtgttttcagttcccgagcagccggagagtgtgatgctggagaagagcactgtcagcagcctgctgttcaactggcaaccgcccacctacacaaacggacccatcaagtactaccaggcattcctgatgcgtcacgaggccagctactttgtgcccgcggattgcgcgatagtcgagcaggacaccaagtcggagaccaagggtgatcctagtgtaaacttcacgggtctggctccagctgtgcgatacatgatgcaagttgcggcacaaaatgacttcggaatgggcgtctatacagaacccgtaattggtatcactttgccagcaggtgagttaagatgaatagatggaatatctttatatgagtaatatgagtaatgtaaatatttcgtatcttgtagtatccgatagcgtgacccagttgaccgtactaacccagggtccggtgaacaataacgccgtgtacgaagcgaacgtgactatcacgtggaaggtgccctgcaagtccaatggcgatatcgagtatttccagctggctttcaatggcacacgaaataacttcgctccagtttcatttgaacggcgggtggaactggacacggggaataagcagggacggatgtcctacacggaaacggaaatgcagccacagttcgactatacggttgaggtgtccgtaaagaatcgcgatgtggaacagttgagcagcagtgtaccgggtagctggcaatcgccagcgggacgtaagtatcgaaataacggaaaagtaatccgtaatccattgattcccattcgtgtatcttctctttcagtgcccaccattccgagtgatgagcttatcaagcaaatgcgcgccaatgtcgaggagacatctaatccaacgaaaacggccattgttcgccttccagccgacatcatgacatccgcatccggcgacatcaagtggatggcactgatgatctcgcaaaagaactgtgctggagttccacacctcaaatacgatgtcagcagcgattggccaaaggttctatcctatcaagaggccggcgcagatggcacaggtgactgcagtctggagtaccaaaccaccgaggagcgctggcatcccgaacccgttcaacgtcagcgaagggatggagaggtgacatccgatgaggaaattgtttttaccatcggattggacaagtgttcggaggttcagaaaacgtattgcaatggacctttgttaccagacacggattacaatgttgtggtgagactgttcaccgcatctggttatagcgatgccgccgtactcaactttaagaccaaggcggccatcaaggtgaccctgatcctggtgagcgtttgcagttgcctgctgctggccttcgtacttggtttgacggttctctgggtgcgcaagcgattggcctggtaagtcaacgatggcaatcttcacgagagaaaaaagaacttaacttcgtttggtgcaggaaacgtgattctggtcagggtatcgaggatccatttggcaatgtcattgccaagaactttgccatcttttataccgaagttgccaagccggagaaactggccagggagttcaaggagatcaccgttgtggccttggagctcagctattccgcctccgaattgggttgccacaagaatcgctatgcggacatatttccttgtgagtaacttcaatgtagcaataaccattatgggaaaccacattttttcccatttaatagatgacaagaatcgcgtgattctggacatcgatgcggagggatcggactacatcaatgcctccttcatagatgtaagtagttgttatagctaatccttaaggaagatcatcttaagtgcatccacttcacagggtcacacgcgtaagaaggagtacatagccacccagggaccaaaaccagagagtgtgatggacttttggcgcatgatcctgcagtacaacgtgcgggttattgttcaagttacccagtttcgcgagggcaatacggtaggtacatgattaggtccttgagatggaagctaagccttctttgtcttgtcaacagatcaagtgtcacgagtactatccgtataatgtgcgtggattgactgtgactatcaagtccaaggaggttctggagctgtacgatcgaactgagttgactgttgtgcacgacaagtacggactgaaggagaaggtgatccactactatttcaaaaagtggcccgatcacggcgtgcccgaggatcccatgcatttgattatgtttgtgaagaaggtgaaggcggagaagcgacccagttactcgcccattgtcgtccattgcagtgcgggagtgggcaggacgggcacgtttattggcctggatctgatcatgcagcgattgaagagcgagtcgaaaatcaacattttcgaaacggtcaaaaagctgcgattccaggtgggtttttttttcagtgccattgtggatttatctcattacttctccactacttcagcgcatgaaaatggtgcaaacgcagcagcagtacacattcctctacgcctgcacctatgagctggtcaagcataagatacccagagctgcgttgaaaatggatgggcgtcccaagtccgtgaccgtgcccgccattccctctcccaaaaaggtgagctttccggacgtggatgtgggcagtgagtatgtgtcatccgcaccgatcaccgatttggatgacggtaggcccatcgtgcagctgccttctaggttctccggactgcggaggaatagtccaccgggcgaaaacgataacccaactagcagcagcaatatgtgagatgagctgtgttcttgtaacttttgtattaacgatgtgttgacaacgcagcagcaataatagccaaagaaatatgtatctaaattgtatattaagtggaaagtgtggatataaatttggtaattgcatttgaaaaactgtttttgtacataaatgttatttataaagaagcgcatgtatagcagaaaactataagttattgaacttatttattaaattgggcaatgagcaaagaatttacaaaaagaggtatcgtgtataacagtttataagagtttttattaaattcaaatttggcggtaaatgcaattacaaaaaaaggtaggagcgagacaactatattttcacaacggcggattacgcctttgagcactgtttactgcacacattttacagcactgttaggcagataaataaattgtatttattttagtaagaaataaatcgtagtcttcaaaatgtccgagcgaaaggtcttaaacgtaagtaaatacatcttaagctaatagatcgccacctgaccgactcctctgcagaaatactatcccccggacttcgatccatcgaagattccgcgcatgaaactggccaaaaaccggcagtacaccgtgagattgatggctccatttaatatgcgctgcaaaacgtgtggggaatacatatacaagggcaagaaattcaacgctcgcaaggaggacgtggagaacgaaacgtacctgggcatcaggatctatcggttctacatcaagtgcacgcgctgcctgcaggagatctccttcaagacagatccacagaacacggactacgagattgaggcgggggccaccaggaatttcatggcactcaagttggccgaggaacaggcacgtcgcgaggagcaggaattgcgcgatgaggaggccaacaatccgatgaagctgctcgagaatcgcacccaacagtcgcgcaacgagatcgaaacgatcgagagcctggaggagttgcgtgatctcaaccggcg

SEQ ID NO: 40193 - DNA, 4260 bp, DROSOPHILA
atggaagccacaaattggaagcaatcgcatcgaaggattcacgcactaatccttatcctttggatcgctggggtgcaaggacaaaccgttggttccctggtggcagtgagtgagagccaggaactggcggagaaggtggaggtgactgtggtttctacggtctacacactcggctttagcatctccaacgaggcggactactccatcgataaggtgatctgtcgcaatggatccggatcggaaaccgaggccaacgcagcgcacgtttgtgaaaaccttaatccttgcaccttctacacatcggtggtttcattccgttcgaatgtctccggcaaaccaccgccttctgaccaaaccatctatgcctacactgaatataagcagcccaagaccacagtgacctcagtggtggccacagcgaacaccatcaaagtgacctggcagacgaacgaccgcgcctgtgtggagtcctttggcatcacggcaaaggcgacggactacaccaaatcctttcagctgctaaacgataaaagttctcagactttcgtgaatttaagcgcctgcctaacgcacacgatcaccctggacacgcgaaacaacgctagcgttgtggtggacacggatgccaccgatgtggacacacagtacgcggagcccggcgatctcgtcatgaacgtaacgaacctagccagtggcatcacgatgatcacgtggggagatccctccgagaagaactgcatcagtaactatgtcttcaagtggcaacgcaacgattgcggaacggatcaaaatcaggataccaccacggatgtgcccagtacggaaactacgaacgagattgactacgttaccaccacaccaatggagaccacacccgatacgcccagtgatgaagttaagtgcgagtggaccgatgtctcctccgatggcaagctgagggagtacctcctgaccgatcttcaaggatgtgatttgtacacctttcaggttttcatcaacgagaacagcacggccaaggcttctcagacttttacttcggcagaaaagttggtcagtgccgtctatgaacccagtcccaccgcctatcccacccagttgcattggacttggttctctccacaaaatcatcccaaatgtgtggctaactatagtgtaacgctgaccggacccattcaacgatcggaaaacaaaactatgaatgtgatcacagaggagacattcgctatcttcgacgaccttgatccgtgtggaatatatttggtggagattgtgcccaatcagctaaatggaagcgctggcaccaagtaccaggagcagagcaccgtgggcgaggatcagccatctgtgattcaagatcccgtcgtggaagcagaagcctactcgatggaggtgagctggaagacgcccgagtacgccgatctctgcatcgatggctaccgattgtccggctggatggaggacgataagctggttgaggttgaagcacttagtattaccacccagaatacgacggttgttttcgacaagaatctgctggcctgtcaggtgtacatcattcagataatcccatacaccaaggagaacctcgatggtcagctgagacaggtcaagctggaaatgaagaatgctggctccgaatttattgatttaatcgccttcaatgcggactacaacaattcctgtccgacgatctttgcgctcttcacgtgcaatgccaccacccaggtgcgaaatccatacgcggagcgttatgtggagggacatagcaaacaaggttttaatgccagtctaagtccactttccccctacgccacctacgtttgcaaagtaatactctacaatgtggcaggaccttccgaaccagttgtcgatgctgatatgcacaccacaacctactttcccgagcagccggagagtgtgatgctggagaagagcactgtcagcagcctgctgttcaactggcaaccgcccacctacacaaacggacccatcaagtactaccaggcattcctgatgcgtcacgaggccagctactttgtgcccgcggattgcgcgatagtcgagcaggacaccaagtcggagaccaagggtgatcctagtgtaaacttcacgggtctggctccagctgtgcgatacatgatgcaagttgcggcacaaaatgacttcggaatgggcgtctatacagaacccgtaattggtatcactttgccagcagtatccgatagcgtgacccagttgaccgtactaacccagggtccggtgaacaataacgccgtgtacgaagcgaacgtgactatcacgtggaaggtgccctgcaagtccaatggcgatatcgagtatttccagctggctttcaatggcacacgaaataacttcgctccagtttcatttgaacggcgggtggaactggacacggggaataagcagggacggatgtcctacacggaaacggaaatgcagccacagttcgactatacggttgaggtgtccgtaaagaatcgcgatgtggaacagttgagcagcagtgtaccgggtagctggcaatcgccagcgggactgcccaccattccgagtgatgagcttatcaagcaaatgcgcgccaatgtcgaggagacatctaatccaacgaaaacggccattgttcgccttccagccgacatcatgacatccgcatccggcgacatcaagtggatggcactgatgatctcgcaaaagaactgtgctggagttccacacctcaaatacgatgtcagcagcgattggccaaaggttctatcctatcaagaggccggcgcagatggcacaggtgactgcagtctggagtaccaaaccaccgaggagcgctggcatcccgaacccgttcaacgtcagcgaagggatggagaggtgacatccgatgaggaaattgtttttaccatcggattggacaagtgttcggaggttcagaaaacgtattgcaatggacctttgttaccagacacggattacaatgttgtggtgagactgttcaccgcatctggttatagcgatgccgccgtactcaactttaagaccaaggcggccatcaaggtgaccctgatcctggtgagcgtttgcagttgcctgctgctggccttcgtacttggtttgacggttctctgggtgcgcaagcgattggcctggaaacgtgattctggtcagggtatcgaggatccatttggcaatgtcattgccaagaactttgccatcttttataccgaagttgccaagccggagaaactggccagggagttcaaggagatcaccgttgtggccttggagctcagctattccgcctccgaattgggttgccacaagaatcgctatgcggacatatttccttatgacaagaatcgcgtgattctggacatcgatgcggagggatcggactacatcaatgcctccttcatagatggtcacacgcgtaagaaggagtacatagccacccagggaccaaaaccagagagtgtgatggacttttggcgcatgatcctgcagtacaacgtgcgggttattgttcaagttacccagtttcgcgagggcaatacgatcaagtgtcacgagtactatccgtataatgtgcgtggattgactgtgactatcaagtccaaggaggttctggagctgtacgatcgaactgagttgactgttgtgcacgacaagtacggactgaaggagaaggtgatccactactatttcaaaaagtggcccgatcacggcgtgcccgaggatcccatgcatttgattatgtttgtgaagaaggtgaaggcggagaagcgacccagttactcgcccattgtcgtccattgcagtgcgggagtgggcaggacgggcacgtttattggcctggatctgatcatgcagcgattgaagagcgagtcgaaaatcaacattttcgaaacggtcaaaaagctgcgattccagcgcatgaaaatggtgcaaacgcagcagcagtacacattcctctacgcctgcacctatgagctggtcaagcataagatacccagagctgcgttgaaaatggatgggcgtcccaagtccgtgaccgtgcccgccattccctctcccaaaaaggtgagctttccggacgtggatgtgggcagtgagtatgtgtcatccgcaccgatcaccgatttggatgacggtaggcccatcgtgcagctgccttctaggttctccggactgcggaggaatagtccaccgggcgaaaacgataacccaactagcagcagcaatatgtga

SEQ ID NO: 40194 - protein, 1419 aa, DROSOPHILA
MEATNWKQSHRRIHALILILWIAGVQGQTVGSLVAVSESQELAEKVEVTVVSTVYTLGFSISNEADYSIDKVICRNGSGSETEANAAHVCENLNPCTFYTSVVSFRSNVSGKPPPSDQTIYAYTEYKQPKTTVTSVVATANTIKVTWQTNDRACVESFGITAKATDYTKSFQLLNDKSSQTFVNLSACLTHTITLDTRNNASVVVDTDATDVDTQYAEPGDLVMNVTNLASGITMITWGDPSEKNCISNYVFKWQRNDCGTDQNQDTTTDVPSTETTNEIDYVTTTPMETTPDTPSDEVKCEWTDVSSDGKLREYLLTDLQGCDLYTFQVFINENSTAKASQTFTSAEKLVSAVYEPSPTAYPTQLHWTWFSPQNHPKCVANYSVTLTGPIQRSENKTMNVITEETFAIFDDLDPCGIYLVEIVPNQLNGSAGTKYQEQSTVGEDQPSVIQDPVVEAEAYSMEVSWKTPEYADLCIDGYRLSGWMEDDKLVEVEALSITTQNTTVVFDKNLLACQVYIIQIIPYTKENLDGQLRQVKLEMKNAGSEFIDLIAFNADYNNSCPTIFALFTCNATTQVRNPYAERYVEGHSKQGFNASLSPLSPYATYVCKVILYNVAGPSEPVVDADMHTTTYFPEQPESVMLEKSTVSSLLFNWQPPTYTNGPIKYYQAFLMRHEASYFVPADCAIVEQDTKSETKGDPSVNFTGLAPAVRYMMQVAAQNDFGMGVYTEPVIGITLPAVSDSVTQLTVLTQGPVNNNAVYEANVTITWKVPCKSNGDIEYFQLAFNGTRNNFAPVSFERRVELDTGNKQGRMSYTETEMQPQFDYTVEVSVKNRDVEQLSSSVPGSWQSPAGLPTIPSDELIKQMRANVEETSNPTKTAIVRLPADIMTSASGDIKWMALMISQKNCAGVPHLKYDVSSDWPKVLSYQEAGADGTGDCSLEYQTTEERWHPEPVQRQRRDGEVTSDEEIVFTIGLDKCSEVQKTYCNGPLLPDTDYNVVVRLFTASGYSDAAVLNFKTKAAIKVTLILVSVCSCLLLAFVLGLTVLWVRKRLAWKRDSGQGIEDPFGNVIAKNFAIFYTEVAKPEKLAREFKEITVVALELSYSASELGCHKNRYADIFPYDKNRVILDIDAEGSDYINASFIDGHTRKKEYIATQGPKPESVMDFWRMILQYNVRVIVQVTQFREGNTIKCHEYYPYNVRGLTVTIKSKEVLELYDRTELTVVHDKYGLKEKVIHYYFKKWPDHGVPEDPMHLIMFVKKVKAEKRPSYSPIVVHCSAGVGRTGTFIGLDLIMQRLKSESKINIFETVKKLRFQRMKMVQTQQQYTFLYACTYELVKHKIPRAALKMDGRPKSVTVPAIPSPKKVSFPDVDVGSEYVSSAPITDLDDGRPIVQLPSRFSGLRRNSPPGENDNPTSSSNM

SEQ ID NO: 40195 - DNA, 5460 bp, DROSOPHILA
ggtggaataaagccaacaccatcgagcaccacgagaattaatggaaaaaccatactgaaaatttagccaataagttttaggggccagattttaaatatgctgttcggagcgagtgtgtttgggtgtatatctttttgggggggataattatgtattcttcgtgtatgtatcgttagtcacttaagttgccacaatacttactaggaaatcgaaagcggagaaattcaatctaagcaatgaatcggaactaaaataggctttgcgttaatttttctttacattgtaagggatatgaatatgaatattctaaacgatgacatttaatttttataaatatttcataacctagatttctttattaatttcgatgctgtatgctagcgtatagtcgttttttaaatgcttaagactattctcacataacctgcagagcgaaaagaaaattaatcgtaacataatcgccaataatttaatactttgttaagcgaaaatttcataatgagaataaaaaaaaaaacacatgagaatgaaaatatacaatagatgcgaaacaattaagacaagtgttttattactactttaaatatagtttcatttaattaattcgttgaatttctgcgatgcaagctgatcgatgataattctgacataatattaaatattattataaataggtatttttatataaacaattataatcacttatgcgagcatttatattgatgtatagaatcaagttttaattgaactcgcttttaagttatttttaaatcagcaataatgaataataaaccatgaaatcttaagagtgaaattttaaattttcccgccaactctctttggttggcaacgcgaccatcccctggccgtgctgccaacttttagcgtgaaaattaaaagaaattgaaatatcataagtaaaaaagccagaatcaagtggaagaaagctaaattggcaacactgatcgctggcggtattttcctacgatccaccaacgatcacacttccccaaaattattaacaaaacgcagcaggatcggagcaaatggcccaaaaatgagtcgcgatagtgatcccatgaaatggtaccacggcaacctgtcccgcgaggcagccgacgaactgctaaagcagggtaagtgctggcgcaggacgccaattggcctgacatcagtgatgatcgctgggatgtgggcgtggtggagcacaatgatgggtaattggtatggcaatcaatcaacaggttacgaggacgggacatttctggtgcgcgagagcagcacagcggccggggactttgtgctgagcctgctctgccagggtgaggtgtgtcactaccaggtgcggcgacatggcggcgaggacgccttcttctccatcgacgacaaggtacagacgaagatactgcacggcctggacacgctcgtcgactactatcagcaggcggccaatggtctgcccaccaagctgacggtgcccttgatccgcgatctgccgccgcacaacactcgcagccacggagtgaccaatctgctgcatcgcgccacaagcaaaaacgagagcaaggtcgtcttcgagctgctcaagtgcggctatcggaatttcgatgccaagaatcaggatggacagacggctctgcatctggctgccctccactcggacgaggatatactgaaacacctgttgaatgcaaaggtccaggtcaacagctccgactcctttggctgccagccattgcacgtaggtttacccacgcacaactatgcataaagctccctataaccatacacttacattcgtagtacgccgctcgctccaaaccggccagtttcatacgcacactcatctcggcacaggccaatgtccagggcaggaacatcgacaacggctatgtgccgctgcatgaggctgccaagcacggcaacctggaggctgtgcaagagctgctcctggctgaggctccgccgttgcccagaacaagttcgggtgaatttccattcgatctggccaaggaagcgggccaaacggcagtagaagaattcctgctcaactacaagctcccaccggcgaataccacaagagaccagtggtatcatggcactctgaccagagaagaggcagtagccatactaaaaaagcatgccaaggagctattggccaagcaacctgaagtagacacctccggctgctttctggttcgctactccgagtcgccggcggcctcggggttggttttaacattgctttgtgatcaggtggtcaagaattttcgtatttcgcaagctgatctctaccagaatggtaacaaggtgcagtcgggcggggtaagttatcaccgtactttaaatgttctctttaaagtaacctctgttttgcagtccaagtttctgtacattgatgacggtccctactggccaagcgtggaacatctaatagcccacttcatgcgtttctcgtacgggttgccagtgagtctcaagtatccggttccgccacagcccaagccagaggtgccatcgtttgccacaatacctcgatctaatatgaagccaaaagcagcatcgcccgctaccccgcccactccagtatcgccacattcgcatcatcaacacccccacgttcccgccctgaccataacgaagaaaaagcagaaggagaacagtagctcaatgttcaacactctgcgactgacgagtccgaagaaagcgctattcgacatgaacagcctgcgcaaaaacaagtccaagggcaaacgcagtgactccgagagcagtgtgagtggttctttggccggaacggagcaggagctgcaggcagcggcacccatgctgaagagcctgtcgttctcgacggagttctcaacgtttaacgcggatggcgtaactggttctggtgccgccgctgctggcgaagtgtacaacgtgcccaggaacaacacgcccattgagattgacctgccaccgattgcccaaaagactgaagccgaagttgagtatttcacgaaaagtgatgtggccatagagcgcgagcgagcaggtcagtggatcggcaacggctaccagcccacaatggacgtgctatccctgttggatcagcagatcaaggcgcccgccgtggcgcgactaaactcgcttggtccgaacgcatcaacggaaagtgagatggccagctatcttcatcgcaagtgcagcggtacgccaagcacaccaagcgccactgaggtggaggccgccaagctgagattctttattgagccagaaaaactagtgctggatagagagatcgggcacggggaattcggttcggtgcacagtggatggctgctgagaaagagcggtgccggcgaggaatcgcgcttggaggtggccattaagatgcttagcgacgagcacagcaacaaacaggagttcctgcgcgaagcatcagttatgatgcggctggagcacaagtgcattgtgcgattgattggcattgcgaagggtgaaatgctaatgatggttcaagagctagctccgttgggctccatgctgcagtacatactggatcatggtcatgagatcacggccaatgcggagctgaaagtttgggcgtcacagattgcgtgtggtaagtcaaattcaagacaatttgattcaattcaattaattaattaatgtttgtaccaggcatgcattatctggaatcacagcattttgtacaccgcgatctggccgccagaaatatattgctgaccgcacgccaccaggcgaagatcagtgacttcggcatgtcgcgatcactgagacccggtagcacggaataccaattcacccagggcggacgttggcccatccgctggtacgcaccggaaagcttcaacctgggcatcttctcgcacgccagtgatgtgtggtcctttggcgtgaccatctgggagatgttttccctcggcgcaccgccatatggggaaatatctaatgtcgatgccatcaagttggtggacagtggcgaacgcctgccgcagcccaatctctgtccagcttacatctatgccgtgatgcagagctgctggaaggaacgacccaaagatcggccaacctttgtctatctcaccgagtttttcgcccgcgatcctgattaccaaaacctgccggaattggtgcaaacggttcacatttaagccagtttccattttccattttttccgttctgagtgcaattttctgtagctatttatgcaatgtcttctatttcgttttcaacgtattaacgatctggaacccacagatcactattgttgttccgtatcctagtattcatgtttatagcttgtaatatattttttaatcatatgtacaaccaatttgtgtcaaaagaaagcgaacaagtgccttaaagatttagcatataagctttgtattcatttttacaaatccattttgtttcattggttatacaaaataaaaactatttttatacatactgcgctttttgatttagtattaaataatacagcagtatgctttaataatcaatgtttaaacatttaatgcagttcttttatataaaacgtggtaacaaaagtaaatagtttgttggtaaaccgcttaaatactaggttagtaatatggtttcttggaaagattataactacgttagcgtggttagtgctctagaaatggattatatatttttttgttaattttttcgagctagcacaacagtaatcaagctgatccgtttattgcctgcttcacattcgatgcgctgacgagcttaagggcgccaagtattccgttcaggttctcctcgttgtagggcttgccctggagcggagtcaccaccgggacgagctgatcgctctgcggcagctggatgccgatctccttcattaatccctacaaatttagtaaaatcataagtgataattctctaaaacagggcaaaacaaatcttaccgcttccacttccacgcttagtttcagtttcatgtcctgctcatcgcccttcacctccagttccttctgcacggtgaacttgggagtcttgccgatgacccagtcccaagagctgtagttggagcgcaattcctcaatgccggggaaccatttctctgtgggattgaccagctgaaagccgcgctgctgcatcgtctgtgtgctgccgccgtcttcaagcgtagttgcagccgttctcaaatactcgtaacccacggcggaacgcagctgagcaacgttcaccgtgcgattgacatcaaccaggttgcgaatgggcgacggcaccgaagccgtggccttgctaatataattggccggctcccgcaccagagattcgcccaagtgcaatttgttggcgctggccaaaatggtgcagtgatggtacgagttcgggtgtcccagcttggccgcagtgccggaaatctgtaattgaacaagggcatactcgttgagtgggcaaataaagaccagatgcacagcccc

SEQ ID NO: 40196 - DNA, 3177 bp, DROSOPHILA
cacacttccccaaaattattaacaaaacgcagcaggatcggagcaaatggcccaaaaatgagtcgcgatagtgatcccatgaaatggtaccacggcaacctgtcccgcgaggcagccgacgaactgctaaagcagggttacgaggacgggacatttctggtgcgcgagagcagcacagcggccggggactttgtgctgagcctgctctgccagggtgaggtgtgtcactaccaggtgcggcgacatggcggcgaggacgccttcttctccatcgacgacaaggtacagacgaagatactgcacggcctggacacgctcgtcgactactatcagcaggcggccaatggtctgcccaccaagctgacggtgcccttgatccgcgatctgccgccgcacaacactcgcagccacggagtgaccaatctgctgcatcgcgccacaagcaaaaacgagagcaaggtcgtcttcgagctgctcaagtgcggctatcggaatttcgatgccaagaatcaggatggacagacggctctgcatctggctgccctccactcggacgaggatatactgaaacacctgttgaatgcaaaggtccaggtcaacagctccgactcctttggctgccagccattgcactacgccgctcgctccaaaccggccagtttcatacgcacactcatctcggcacaggccaatgtccagggcaggaacatcgacaacggctatgtgccgctgcatgaggctgccaagcacggcaacctggaggctgtgcaagagctgctcctggctgaggctccgccgttgcccagaacaagttcgggtgaatttccattcgatctggccaaggaagcgggccaaacggcagtagaagaattcctgctcaactacaagctcccaccggcgaataccacaagagaccagtggtatcatggcactctgaccagagaagaggcagtagccatactaaaaaagcatgccaaggagctattggccaagcaacctgaagtagacacctccggctgctttctggttcgctactccgagtcgccggcggcctcggggttggttttaacattgctttgtgatcaggtggtcaagaattttcgtatttcgcaagctgatctctaccagaatggtaacaaggtgcagtcgggcgggtccaagtttctgtacattgatgacggtccctactggccaagcgtggaacatctaatagcccacttcatgcgtttctcgtacgggttgccagtgagtctcaagtatccggttccgccacagcccaagccagaggtgccatcgtttgccacaatacctcgatctaatatgaagccaaaagcagcatcgcccgctaccccgcccactccagtatcgccacattcgcatcatcaacacccccacgttcccgccctgaccataacgaagaaaaagcagaaggagaacagtagctcaatgttcaacactctgcgactgacgagtccgaagaaagcgctattcgacatgaacagcctgcgcaaaaacaagtccaagggcaaacgcagtgactccgagagcagtgtgagtggttctttggccggaacggagcaggagctgcaggcagcggcacccatgctgaagagcctgtcgttctcgacggagttctcaacgtttaacgcggatggcgtaactggttctggtgccgccgctgctggcgaagtgtacaacgtgcccaggaacaacacgcccattgagattgacctgccaccgattgcccaaaagactgaagccgaagttgagtatttcacgaaaagtgatgtggccatagagcgcgagcgagcaggtcagtggatcggcaacggctaccagcccacaatggacgtgctatccctgttggatcagcagatcaaggcgcccgccgtggcgcgactaaactcgcttggtccgaacgcatcaacggaaagtgagatggccagctatcttcatcgcaagtgcagcggtacgccaagcacaccaagcgccactgaggtggaggccgccaagctgagattctttattgagccagaaaaactagtgctggatagagagatcgggcacggggaattcggttcggtgcacagtggatggctgctgagaaagagcggtgccggcgaggaatcgcgcttggaggtggccattaagatgcttagcgacgagcacagcaacaaacaggagttcctgcgcgaagcatcagttatgatgcggctggagcacaagtgcattgtgcgattgattggcattgcgaagggtgaaatgctaatgatggttcaagagctagctccgttgggctccatgctgcagtacatactggatcatggtcatgagatcacggccaatgcggagctgaaagtttgggcgtcacagattgcgtgtggcatgcattatctggaatcacagcattttgtacaccgcgatctggccgccagaaatatattgctgaccgcacgccaccaggcgaagatcagtgacttcggcatgtcgcgatcactgagacccggtagcacggaataccaattcacccagggcggacgttggcccatccgctggtacgcaccggaaagcttcaacctgggcatcttctcgcacgccagtgatgtgtggtcctttggcgtgaccatctgggagatgttttccctcggcgcaccgccatatggggaaatatctaatgtcgatgccatcaagttggtggacagtggcgaacgcctgccgcagcccaatctctgtccagcttacatctatgccgtgatgcagagctgctggaaggaacgacccaaagatcggccaacctttgtctatctcaccgagtttttcgcccgcgatcctgattaccaaaacctgccggaattggtgcaaacggttcacatttaagccagtttccattttccattttttccgttctgagtgcaattttctgtagctatttatgcaatgtcttctatttcgttttcaacgtattaacgatctggaacccacagatcactattgttgttccgtatcctagtattcatgtttatagcttgtaatatattttttaatcatatgtacaaccaatttgtgtcaaaagaaagcgaacaagtgccttaaagatttagcatataagctttgtattcatttttacaaatccattttgtttcattggttatacaaaataaaaactatttttataca

SEQ ID NO: 40197 - protein, 939 aa, DROSOPHILA
MSRDSDPMKWYHGNLSREAADELLKQGYEDGTFLVRESSTAAGDFVLSLLCQGEVCHYQVRRHGGEDAFFSIDDKVQTKILHGLDTLVDYYQQAANGLPTKLTVPLIRDLPPHNTRSHGVTNLLHRATSKNESKVVFELLKCGYRNFDAKNQDGQTALHLAALHSDEDILKHLLNAKVQVNSSDSFGCQPLHYAARSKPASFIRTLISAQANVQGRNIDNGYVPLHEAAKHGNLEAVQELLLAEAPPLPRTSSGEFPFDLAKEAGQTAVEEFLLNYKLPPANTTRDQWYHGTLTREEAVAILKKHAKELLAKQPEVDTSGCFLVRYSESPAASGLVLTLLCDQVVKNFRISQADLYQNGNKVQSGGSKFLYIDDGPYWPSVEHLIAHFMRFSYGLPVSLKYPVPPQPKPEVPSFATIPRSNMKPKAASPATPPTPVSPHSHHQHPHVPALTITKKKQKENSSSMFNTLRLTSPKKALFDMNSLRKNKSKGKRSDSESSVSGSLAGTEQELQAAAPMLKSLSFSTEFSTFNADGVTGSGAAAAGEVYNVPRNNTPIEIDLPPIAQKTEAEVEYFTKSDVAIERERAGQWIGNGYQPTMDVLSLLDQQIKAPAVARLNSLGPNASTESEMASYLHRKCSGTPSTPSATEVEAAKLRFFIEPEKLVLDREIGHGEFGSVHSGWLLRKSGAGEESRLEVAIKMLSDEHSNKQEFLREASVMMRLEHKCIVRLIGIAKGEMLMMVQELAPLGSMLQYILDHGHEITANAELKVWASQIACGMHYLESQHFVHRDLAARNILLTARHQAKISDFGMSRSLRPGSTEYQFTQGGRWPIRWYAPESFNLGIFSHASDVWSFGVTIWEMFSLGAPPYGEISNVDAIKLVDSGERLPQPNLCPAYIYAVMQSCWKERPKDRPTFVYLTEFFARDPDYQNLPELVQTVHI

SEQ ID NO: 40198 - DNA, 29596 bp, DROSOPHILA
tatagagggtttactagattcgttgaaaagtatgtaacaggcattcacactagctgagtagcgggtatctgatagtcaggaaactcgactacagcattctctctagttttaatttgaaaatgctattcaagaagtcgactagataagtgacatacttatataaagctcccttcttaccgagaactttgtgaaacttatcaatttaagccaatgcaattataatacttggcggtctcatcaaggaaaggtatccattgagcgattagctattaagacccatttttcaccgatgtcatgaccgggaagaattatgttcctaagagacaaccaggcaacggctgtaatgacatatatgtctgcccgaaataaacagcggaatgtggaaaaagttttttatatgaagcactatgacaccataaattccggaactaagggtaaaaaagatgggcgtatctagtggaaccggaaacggaagcattgaaattgatttcgctatgtctgttctgaagcagaattcacacaaaaatgaaaagtttttgccgtacaaagttttttttaccattgtcattgtcttttgcatgttgctgctggcagcagttgaataaagttttgcagaaactatttacccacaagaaagaagctcaattaaatgctacactcaattacaatgaattttccacgttttgttgtttgcttagttggtggttgtttgtttttggtgccacttccgttgctgccgccttaatggcattaccttaaaaactgtaatcttttgcggtggattgaagttaaatgcctgctcgtgccatttgccaatttgtcttggcccacactgcaagtatcaccgcaaattatcgcatcgctatgggaatttaaactattttaattgatttaatgcgcctcgaacgattgcgtgagctgcatttgattgattaaccgaaaataaacttatgcaaatctgtaaagagcagtcgaaattgttcaaaattaaatctattcaatgcaccccattaagtttatatatatatttatagtgagtgcataacgttggcatagtgcacttaatagcatcataaagtgctccgaaaattacactaaaagcactcaagacccattgtgggctacttaactctacttaagtaagagttgtaatttaaacgaaattaaatttatcaagcagaaacactttaaaaagaagttaaccccaataccttcgatggatttccctttaggttgctgcgcttctagccgaagattaatggtttagaacaccttttttttatgtcttaagggtgaaagtttaaattgaagcgaatgacttgatatatattcagttacagatacagttagctctaacctatattattaatattattatttttcagcgtgttccaccgcttcgcatcgatgatttaatcaatgacttacgcgatggtacgaaactaatcgcattgctggaagttctgtccggagaacgtttgcccgtggagaagggtcgcgttctacggcgtccacatttccttagcaatgccaatacggccctgcaatttttggccagcaaacgaatcaagttggtcaatatcaatcccgcagatctggtggatgggagaccaccagttgtgttgggcttgatatggacgatcatcttgtacttccaggtaagcatgccttatatactatatatatatattaaatacaccgagtgcaccagttcacgaattgagagcaccacctacaattggttgctagttgtacaccttctcacgaggctaccaccagtagagatgtacacttcaattccaaatgaccagcaattttgaaactttaaacgtaattaaccctatcaaacttcttttctatatacttttttttattgatatcattgattgataacacgtaaacaagcttcgtaaaaagaggcggaaaaacttagtagtagttataaattatgcgccacaggtgggtccaagttcgacatgaaattgttgttttgtcttgtgtacctcatttatttttgggtagaatatcgtctttagttggtagccaaaccttttaaggcacttccatattttaagtttaaccattacattgccattgcatgcgggaagtatcgtaaatgtactaactcatttatatgtccacagatcgaggagaacagccggaacctagagtatttgggtcatggtattggcggttcggttagttccctcgacagtgttggcaaccagaagcacggcgatctgaaggctgagaagtggaagcagggtgccaggaagaccctgctcaactgggtgactaatgccttgccaaagtgagtggacgcaccctatgctaagtagttcatattcataatcaatactcattaaatagggacagtggtgtggaggtaaaggatttcggcgccagctggagagatggcgtcgctttcctggccctcatcgatgccatcaaggcgaacctggtcaatttggctgagctgaagaagaccagcaaccgtcagcgtttggagaccgctttcgatgtggccgaaagcaaattgggcattgccaagctcctggacgctgaggatgtggacgtacccaagccggacgagaagagtatcatgacatatgtggcgcaatttttgcacaagtatcccgaaccaaaggcgagttttgatctttgaagctttcgaatacaacgggagctgtgaacgtttttacttatccaatcaaatttgttgcagggtgcttcccgcgaccagtcgcatgtgcaacaggaggcggacgaactgcgtcgcttcctggtggagaagaccaccgagtacgagcccatggtcatgatgagctcgttcccacgcgattttggtgaatatttactggcacgttctgaggtcgatgcacatttggcggcctacaatcgcttgaaacagctcattgagagccagagcggattcctgcaggtctcccgccaatcctgggaggagattaacgagctgtggcagcgcctccagtaccagatgatgtactggctctggttgctggattcggagctgcccggcgacttcggcaccgttggcaaatggttagccgaagcagagaaactattaatggacaacgatatacccaatgcaatgaatgaggagacggccgcagtgatcagcaggaagctggaggagcacaagctcttctttgccgacctgccgcgcattttggccatgtttgataatgccaagcggtcaccggtggctcaacagattcccctggagcagttgcgcaacatggagcgtagacttcaggaggtcggaccgaaggcagcggagcgaaggatacgtttgaagttcctggagcacaagtgctgtttgattgccttcctcaatctggtggagaacaagatgcgcggatggactggaaagtatggtcacgaggagaaggtggcccaacagctggagcagtacaagaactttgtgtcgcgcaacaagatcttccaggagttccaaaaggcctttgtcgatatgcaacaggtggtggaggagtacaagcgcgatggcaatgtgccgcgcaaggagatcaacgacatcgatcgattcatgtatgaaaccgaggagcgctggaagcgcgtctccatggaactgaagtgctgtcagaactccctggaggaagtggtcaactgctggcgcagctggaaccaattggcccccacctgcgaggagtggctgcagctggccgagcaaaaggtcaaccaaagcgaggatgagcgtttggacttctttcaggatatacccgtttggaaggacaagtttgatgccctcgctagctcggctaactatctgattgcctcctgcgaggagcccattgcccagcaattgcgtcagcgacatggagctctctctgagcgattcgagcgtctgtttgccaacaccaagcagtacatgcatgctggtgacattatccgatcccgacaggagtacaagtcgggcatagaacaactgtccagatggctgcgaggagccgaaagcgttctagaccagcgacaagttctgggcaacagtgaacaagtcaaggagtacggccagcagttgcagcaattggccagcgaaatcgatgacaacgaagagctgttcaaaaccatcagcaggaacttccaatcgctgatccaagacctttcccgcgatgaggtggataagatgatgaagctactcaagcaagagaaggaatctctggtgcgcatacgtgcacaattgcctgccaagctgcatctgttccaccagcttcagatccaacaggaatccctggaggctggacaaaaagagattcaccagtggctgagtgaggctgagcagcttctgggaacccacaatctctccggaggccgtgatgccatcaatgagcaattgcacaaacacaagacctacttctcgcgcactgtctactaccgatccatgctggagagcaagaacaaggtgttccagaatctcttgaaggctgtatcctccgatgataagatcgatactgctcctgcttcccagcaaatgcagcagctgaacgagcgtttcaactatgtgattcaaaatgcccagcaatgggaacagcgcttggattcggcagccggtggatggagtaacttcaaggacaacgaacgtgtggtcagcgaatggctaacccaagctgaatccatgttggtggagaagcacatcgaatcgaagacgacaatcgagacacagaagtacttctttgagcaggtcaacgatcgctggatgaatgacctggtgcagtcggctcaacaacttctgaccacattgcccgcccaggagcaacctgctgtggtgcacagtgtggagcagttgcagtcccgctggaagaatgtattgtcccaggctcctttgcatctattgaaactggaatttagactggatgagaacgcattctatcaatctctgaaggatgtagagaaggagttgcagctggagcagcaggccctcaatcgcaatgaggatgtggactccatactccagcgtaaccagcagttccttctgcaacaggatgtcgttcctcgcctggagcgatgcctccagaacatgcaacgtttggctcaggcccacaggcaacagcagcccggtgacattagtctggatcaggcctacgacaatgccaagtcgcagtggcaactgttgtccaacaaattgggcgacatgcgtcagactctccagcaaatcccggcccaatggcagggctatcatctgaagttcaacgacatggtcgattggatgaacggcgtggatcagagccttaagaatattgtgaacgaagtgaataccatggaggaattcgaaaaggagaaggtggtcttccaggtgagctagtaataatgatctataaacattccatttcgatcacctataaataataaataaataaataatcctctcattacccatcatgcattgccctgaagctgagggagctagtggtaactaatatgcttctatatatatctcctatgtttatttcaattttttataagccatggctaattaattattaattatcttaaaacagaaaatctgccaagatgctgacaacaaacgcgaggacatgaaatggttggtcaagaccttggactctctgcttagttacgccaccgaagatgaggccaatctggagcagaagaagctggaggatctgatcgcccgctacaaaaaccttatcccaacgattgaaatcacgatggtcaagacggaagtcttctcaaagtgctacacttaccgccgagaagtgcacgaggttgtgtgtctgctgagcaaggtcaaggatcagactgccaatataccagctcccgatagtctggatcgtgtgaatcgtctgattgaggagcagcagtatgccatcaaccaattggatcaccagcgtccgcatatcatgtccatgctgcaaagaggacgtgatctcatcaaggatgtccatgccccggcctttgtaaatgccgaggtcaagaatctggagacgggatggaatcaggcgtacacagagacctccgacaaactgcaggccctcaagggcacccaggccgtttggagcgagtttgtggaccagaagaacgatattttctcaatgcttcaaactgcggagacggagctgcgttccctgacaccattgcaaaccgatcccaagaacgtcagtcaggatctgaagtccaagagagatcttaacgtacaactgcagcaggcttcccatcaactgttgcctaagttgcatgctctcaaatcggaactggctcctctggccgcacccgataagcgtcccatcctcgagaaggaagtgaccgaggtggagaagatgttcttcaacaccatggagcacgtaaaggatcgcgtcggctatctggaagactacagtgccaagtggaataactacaagacccgtctcgctgaactgcaggaatgggccaacaaggtcgcgcccaagaatatcgaggcccttcaatcggaggacctcacaccggaggagcgtgtggtcaaggtgcaggcgttcaagcgtatccttggggatcgcatgaagcaactggatcttctggccgccgatgcttccgagttggcgcccaaggagggcaacattgccgaggccaagcgactgaagggagagattaccaagctgcaggaggtcctcagtgccatcaatcgcaacgtggaccatcaggcacaggctgtgcaggaggatcttgtcaactggcagcagttccaggccggtctgcagcaaatcaagccagccgtggagcaaagcgaagtcaaggtaaataatgtagtttctaagcccatctccctcgaagaagccgttgccatgcaacagaatgcccaacaattcgagacacagtgccaggagcaattggacaagctccatggcatatcaaacatcagtcataaaatgttatgtaagaccaatgcccccgacgaattggacgccatgcattcgcgttggactgccgtccatgagaacgcgaaacaggcgagcgccaagctcgaaaagttggtggccaattggaagtcattcgacgccgatgccgccaagctcgaggattgggttggacagggtgagcagcaaatgtcccgccgtccagctgtcctcaacaccccgcacattgacaagctcgaaaaggagctggtcaagctgaagtcgttcaacaacgagatctcgcagcaacaggccaaactggtgactctgggtcaaaatgccgatcaaatcagtttgcacttggctcctgaaggagcagccgctttgaaggatcgtgttaaccaaatgaagggcaagctacagaagctttcggaagcaactcgaggtcacatcaacgaggtgtccgacgccattatctccaggcaggatttcaatgccaagttggtgaacttctccaactggatggagcagctgcgtaaccaggtcactcaggtggaggagatcaacccggagcgggtggaaaccagtctccatgtcatacacgcgctactgcaggagcatgccgataagaagccaagtttcaatgccatatacgatgaagttaagcaattggctttgggagcaactcccgaagagtcgaatgccctgaacgatgcctacaccgctttggtggtgaactatcagaacctcgagaccaacatgctgcaaaagaaggcggctctggagaaatggacagagctgctgggctggaagaatgacaccgaatcgcatttgaactacctcaagcatcagctggacaagccggaaggacctgctgccgaggagctgtccaaggtcattgatgagatcgataatttgggtcagggtattggatactggaagggtcaggctaaggagattgatgaaaacccggccattcagttgagggatgctctgtctcgtcgtccattgattgccacccagattgtgaacgatgttgagaataaactagagaatctgaaactgcgctcgcagagccagcaacagcaaatccaacagatgaccgtgcgcaaagataagttccatgccctggagcataactttggacaggcacttcaagaaaatcgggctaagctagacgagattctcagacagcatccgactttaaataatatcgatcaaatcattgccgatttggtcgctctgaatgatgccctgaaataccaagccgatctgaagaatcgcattcatgacgaaggttcattgctgatgcgtgaggatattgctagcatgcccgccattcaggagagcctacttatcatggacaagaactacgattctctgcagaatgaaatagctgatcgcattcagaagtacaacctgattagccaggccctgagagaatatgccgattccaaggacaagttctccaaggaactgaagaaggcagaagatctatacaatgctatacctcaacagccacgcgatgaaaccgagctccatcaagcttccgagaagaccagaaagaccatggagcagttgcgtaagtcgaagctcagtttggatgaactggagcgtcggggcaacaatgtgggcaaacttttcagtgccattggagaacccattccgcaggaagtgccacaggaggtcaccgcagccaaacaacactggcaggatttgcacgacaaaaccgctaagaatgcgcatgtgtacgagacggaagctgttatttggtcacagatcgaggatgccaagaaggatttgcttccctggttgtccgaaacgaatcagggactctgcgatgctgcggataactcaattgaaattgagtttggacccatgcgtctgagcaagtaccgcacggagctaccttcgtatcaggctctgaaggattcgatagtggagaaaaccaatgatttggttaagatcaacaaaggtgcggaaattcccgctctatctgcactcaacaaactattgtctgagcagtttgctgaggttaacaacaatgcagatcgcctaagtgccataaccacctcgttcaatgaccaggaacaagagttgcgcaggcgttcgaaggaagctggcgaacgggtgagcaaacttcgtgagcagctgatcaaatgtgatgacatgtccggtgataataacaagatcatggagcgtcttcagcaatgccgtgccctgcgtggtgagctcgataatagtggaaacgaaatcgacaacatcaaacaaaaggttgacgagctgcgtaatttgtacccaactttcagtgagtccatcatacccaaagaactgaacaatgtgcaaaaacgctatgagaacgttgatctttacgccaagaagattgaaagttctctgctgcagttcctcaagaagttccacgccgataaggtgggcatgctgaagcgtatcattgccactcaacgcgaaaaggtggcctggtgtcagccggagtcctccagtgacaaatacaatctggatgtcaagaagtcctctctgcaggaagtcagcaagagcattgatgactgcaaggcacgccatgccgagaccctgaagtccttggagatgttgaaggcggtagagtcgccacagaacctggctgaactcaccagcgatgccgagttactgcgcaaggatatgcaggctctgcaggacagctttgaccaaatcaagggaatccttgacgagaacgtcgatttgtggtcgcagtatgagcaatcgaatgagcagatttccaactggctgcgtgacgttgaaggacgcgttaaggcagaaactagcagccaagtaaatctgtccgaggttccacagaagcttcaagaattgtctatcctccaacaggatgtgttggcccatgagcccattattaataacctcgagcagacatcccaacagctaattgaaaagaatccggaggcaagaattggccagtttgtcacccatttggtgcagcgatatcaagctgtgtccaaggctttaaccagctacatcgataagatccgtggtgctcagttatcaaacgctaactttgccaaggccgccaaggatttcaacgagtggtttggtgatgccaagatcgagttccaggaacttgctcgcatgggatctcccggatcatcctctgccacagctcagcaactgcagaccgtcaagaattacatcaagaccttcgacaatggtcagatactactgaataatgccgtcgatattggtgaggctttgtacccggtggtatcgcccgataatcgcgaacgtatccgtgctgatcttcgccagatgcgtgagaagttcgactacttgcgagatgaggccaatgcttttatgcagcaagtcgagggtgttttgattcaaaagacttcaatcgaagaaagctacactcaggtttctcactatcttaacgaatcgaaagctaaggttcccaccactgacgaattgtatcccactttggccaccaaaaaagctgccctccagaactacaagacccagctgcaggagatcactctgcacaagaatgctttgaagcagttgcacgacaaggctgtcaccctttgcgatgatgagtccgagagaaagaccgacgagtctatccaggagtataacacgctatccaagaagatttccgataggattacaacagtgggaaatcatgtggtcaagcatgaagcgtatgatcaggtcctggaaaaggcacaagactggctgaataccatcaaatccgaggccattgatatcctcaacgagacgacatttgaaaaggaaggcgccgaggagaaactgctggttgtggaaaatcttctgcaacataagcctgagggtgattccattttcgatacctgtcacaagttattggaaacggtgctcacacaaacccatcccagtggccatccagctctgctgaagggtttcgaggaaccgaagcaatcttgggaggactttatgactctttgtcaggattcgttggtaaaactgaagcagctttgctctaaatgggatgagtttgatacaatcattgaggagctagacaactggatgaagaatgtcgaggcggtggttaagaaccagaaccttaagagtacggcggaagccaagaacgcccatttgaagcagcttcaggatatttcaaaggacatcgaacggcgcggtgcggccatcaatgagctaatggatcaaggccgtgagattgagggtgaaaccgatttgaaccttaagttgtcgcgcctgaatactcgctatcagaccctgaagaatctgtgcaaggaatcgatagccaagtatgtgaactatgtaaaggatcacgaaagcttcgacaaggactttgattcattcaagcagaatcttcaatcttcagtcgacgagctggccaagaccaatgaaattgtcggcgatcaaagcgtgctgcaggatcagcaaaataaactccgtgagatgtccgacaagcgcattttggattccactctattcgagggactcatcgatcgtggcgagaaactctatggtcacaccagccccgaaggccgtgaaatcattcgccagcaattgcgtgccctgcgaaccctttgggacaactataccgatgatttgaactcggcgacgcaaaagatcgatcagtgtttgctgcagtttaacgagttcagcattgcccaggatcagcttaccaagtggctgaaggatgtggacaaggccatgcagagtcacactgaacccaagacgacgctgcaggagaagcgtgctcaactgcagaaccacaagctgctccatcaggagatcaccacacacaatgttctggttgataatgtctgcgacaaggcacaaatactggtcgaccagatcaaggataactcgttgaatgtgtacttgacctcgatcaaacagcttttccagagcatagtccagaagtcggatgaaattttgcacaatctggatgattgtgttcagaagcacaatgaattaaacaacgctctgtcctcggccaaaacttggatttcgaatgagaaggccaaattgctggagtgcgacgatgcttatggtgagaaggcagacattaagcgaaagattgaaactttgggacaattggctcagaacaagccacaggcaatgaaaataatcagcgacatccgtgatctctttgagaaagtgaaggcaacgacctccgaaaagggtaacgaagtgctggacaaggagatcgaggaattggagaccaccatgaagagtcactttgatgacatcgagggcattgaaggcaaacagaaggatgtgcttgcccagtgggacaagtttgaaaaggcgttggaggaacttaccaagtggtgccgcagtgcagaggcagtgttccgcgaacagcagctgcagtccacgctccatgagaaagtggagcagctggagaagtacaagattcaaagggagttgatactccagaaggagaaggagatcgatgccttcggagatgctgcccacgctctgcttaacaactgtggagccgatcgtctaaagactttaaccactcagatcaccaatcggtatcagctgcttcaagtccttagcaaggaggttgttaaccgctggtcaaatctggtcgatgatcaccagttctaccaggataagtacaacgaggtggatttgtggctgcaacccatcgaatcgcagatggcgaaggtccttttggatgagccaacccagagttctaacattttgcaagtgctgttgtctgaaaaggagcaagcggagagcttatttgctgctctaaatgcagctggagaaaaggctcttccagagacatccactcagggtagggagaagatccgtaaggacctgcgcgatatccgcgatcgttgggacaaactggacgagggcattcgcaacctggaaaaacgccaggaagcgcagggagttcagctctccagctaccaggatattcttaatcaaaccgtcaactggttggatcaagtggagaaactgatccacaatgagaaccctgctagctggaccagtgcccaagaaattcgctccaagttgtacaagtacaaggccaccaaccaagacatcaactcgcataaacgcatagtcgaggctgtgaatgaaaaggcagcagctcttctgggcagcgccgctccagccaatgcggatgagatctccaaggcggtggctgaggtgaacaagcgatatgatcaagtgggccaggactgtgccaagttagttgccgatctggatggagctttcgatgtgtaccagcagttcagtgagctgcagaaggctcaacaggactaccagaagaatctttgggatcgtcttaccggctactcggactactcaggcaataaggcagctctgcaagctcgccttcaaaagatcaacgagatccaagatgctttgccggagggtgtggccaaactcaagtccctggaggatcacattgagcaacaggccagtaatataccagcccgatccaaggaggtaatggcacgtgatctggccaacttgcatgccgatttcgagaagtttggagcttcgttgagcgacgtaaagagtggactagagaatcgtctacaacaatggaatgattacgaaatcaacttagatcgactgatcacttggttgggcgaggctgagaattccctcaagaactacaatctgaaatcctcgtttgaggagaaggaagaacagctgaacggtttccaatccttggctcagaatttgcgtcaaaacgaagctgactttgacaaggtgaaggacgacacctcagagttggtccagagttctggtgaaacaaggattgctgtcaatgtgcaacaggtttcctcccgcttccaatcgatacaggctacagctaaggagattctcaagaagtgcgagcaagctgtccaggatcatggtcatttcaatgacaagtataagcagtgcgccgactggttggcaaatgctcaggcccgttacgatgattgctgtgacttgtccacggtggcatctcgagacgatcttctcaagaaacaagtggtcatccaggagcttctggcccagcagccaacagctactcagcttctaaatagcaccgttgagctgggcgagaagtgctatgggtccacagcaaccgaaggacgcgaggccattcgtagtcaactggatgatctgacattcgatcagttgttcgacaacattgccatcactgcaagaaagattcaggataagatcgccaagtggtctggctttgatgagatcgctgacagcttgaagagctggttggatgaaacggagaatgcccttccagctgatattgagctgaaaacgactctggatgagaaacgcaataaactgcaaacctatcgtgacatcttgaacgacatcaacaatcatcaggtggagttgggtaatcttcaggagattgccgccaatctgccagagaaaacagagcttgtggaccaaatcataaaggatatctctgaccgctttggaaagctgcaaaaacgtgcccagaactacgtggagcgttacgagggtattgtgagtgcacatcaacagtactccaaggctgttatggatgctcaagagtttatcgatgctaccctgaatacggttcactattggggcgatctggatctggaacaaatctcactgcacacgaacctcgaccgcctaaagaatctgaaggccagtttggccgatgagttcccacgcgttgatcaagttagggctttgggcgagaaggttattccgggtacggtggatgtgggacaggtaaacattaagtcccagatcgacaccacccagcaagaatgggaaagcctactgaccacaatcagctccacaattgaagctatcgaagctcgcctacagcattggtcggagtacgagcaattacgtgaccagtgtttggcttggattcgagatacggataacaaccttcatgctatcgatctgaaggaggatctgccgaaaaagcgtgcacagttggatgcactgaaggccctccaaggagatgtacgcgccaaggaattagaggtggataatgtcacggagaaggcccaaacccttctgaagggtcccagcagcaatcgtgcctcgggtcctgagttggtaaccaagtaccagcagatcttccacaaggtcaaggagctcaacaaccgttggcaacagtatgttacctcacacgaagattttgataacgctatctctgattgctcctcttggatcaatgagatcaaagaaaaattggactattgctccgacatgtcatctatgagtccaaaagaactggataagaaactggccactattcaggatgttatcttgctaaaggacgaaggttctgctcgtgttttgaagatcttagagcaggcccagcatgttttggctaacacagcgcccggaggtcacgaagccatcaataaggaactcacagatctccaggatctctggtccggaatcgctctgcgcatcatggatgttaagtcaaatctggatgactcaattactcaatggtctggtttcctggatcaagtgcaaaatgttcgcaagtttaatgagtggttggatggtcaggttaaggagttgagtgagcatcaaacaaccatgacagagaaacgagcacaattggatcgggtaaaatctacggaggagaaggtgcgcgtcgagaagattgatgtggatgcactcaagatccaagccaaggaaatgattgccagtggtcaacagagtcaggcggccttccaggcgcaaaaagttctggatacattcgacgagctctttgccaagacccagaaattgttgtcgcatcgtcaagatcagtacagggatcatcgattgttcaaggaggcctacgatgatttggttagctggattggacgagcccgcgagaaattcccttcgttgaagcagagcagcttaagcgataaattggccattgaaaacgctgtccaagctacggaagctcttctcaacaagcaggcacagggtgaactcctcgtggagcacttggtccacactggagaggtggtgctggccagtacatctgctcaaggtcaggaaatcattaggaatgatattcgtgccctgcgcgacagcttcgagggcttgttccgtgaaatcaaccagcagaaggagaaccttgaggtgaccatggttcagtggcgagcctataaggaggaatatgaacgtctgatggaatggcttcaacagatcgacatccttgtgaagaaccacaaactgaacctgtgccccaacctacccgaaaaggaaaaacaggtggctgatatgaaggaagtaatgtcccgtctcgagaaaggcaaagatgacatcgataagtttaatgcttcggctgccagtctgctaaagtcccatttggatacttatgtgaacaatcagctaaggcacttgagctccgtgtatcaagtacaggtaaatctggccaaggatgttcttaagaaggtggaaaccaaccgcgatcagcatcgtgaatacgatgccaatatgaaatctgccaaggattggatagcaaatgccaaggctacaattcagtcggcgggtgaaggagcaggttccaaggaggctcttcagcgtcgactggagcaaattcaggatctgattcgcaaccgtgagcttggccagaatttggtgcacaccgctattaataatggcgaaaagataataaggaacactcgctctgacggacgtgacgccattaataccgagatgaaggaactgcaaaccgaatgggatcgactggtgaagaaaatgtccacagccaaggtgcagttggagacaaatctattgcaatgggctgactacagttccagctactctcagctgcagcaatggattactgaccgggaggccaagttgcagcaggcttgtgaacagaagatcgttaagtccaagaggggtcaacctggtctcagcagtggattgagcgaacgcaaggccaatcttcgccagacgaacaacattgtccaggatattgtgtcatttgagcccatgattcagtcggttacgtccaaggcttcggttcttcagcagggtgctccgggcactgaaatctccgataagtacgagaatcttaccaagcaagctaaggacttgtacgagaaacagaagaacaccatcgaaagctatcagtccttgattgacgcgggcaatgaatttgccacatggctgagaaatgccaaggaacgattgagcaaatgctctgaacccacgggcgataaacaagctctggccgagaagacccaccagctgaagattctgcagggtgagctgccggaaggcgcccaaaaacttaagaatgctctggaacagggcgagatcgcttgtcgcagtgccgagcccgaggattgtgagattatcgagcaggaagtggctctgcttcaagaagaattcgatgcctacagggaagctcttaataaggccaaggattatctggaagtgggtattgtcaagtggtccgactaccaggatcagtacaccgaagctttggagtggttaagtaagaccgaagctttggtgcaatcctacaacaaactgcaggatagtttgatccagaagaaggttgttctcgagcaattccagggtcatctgcagaccctattcgactggcagaagactctggatgatctgaacatgaaggcacaggttctactggagacttgctccgatacaagaatcagcaatgctattatgcaactgaccaccaaatacaatgctctactaactttggccaaggaggttatgcgtcgcctggagatgcactaccaggagcatcagcagcatcacagtctgtacgaggagtgccaatcatggattgagaagactcgtgagaagctttccgagtgcgaacaaattcccggaactcttaacgaggttcaaatcaaattgaataccgtaaagaatcttcgccaaggttttgaaaccggtcagaataaactgcgttatcttttggagctcaaggagaaggtgataatgaacaccgaacaaaatggtgcagccaagattcaggaagataccgaagccttaaagcaggactttgacaaactgttggtggatctgaacgatgttcgccagaaattggccaatcgtcttgcccagctggaggagatctttaagctgtacaagatcctgattgaatggctggaggatgtggaaccgagtgtcaagaccagtgatgagttcctgaatgacttgagtgagaagcgagcggcgctggagaagttccgcgtcattcagcgtgatatcaatggccacaatgatattgtggaaaagatcaatcagcgtcttaaggaggacaacagtttggatcttaaggacttccagcccggcttgaccaaattcgatgacctgcagacccaggtgaataaaatcatcgagtcgctggagaaccaggtaaacagccacgagaaatacaagcaggcctacaatgagctgcaagattggctgcgacgcactcgcattgaggtggagcagtgtgccgactgccatggcgagaaggatcaagtggagagtcgtctgaatcgattgggagatatacaatcatcatctctggagggcaaagcccttcttgaagcttgtgaagagctgagtcaggctgtgattgccaccagcggaagtgaaggccaggacaatgtggcccaggagattaagcatctcacctcggagtgggagaccctccaaacgatatcccgcgatgctcgcagcagcttagaatcctgcttggccgcctggcagaccttcctgcagaagttcaacaagatcaacctttggatcgaaacgatgaacaagcgcgttaccaaatcccaggaaggcgagaacaagacacccgaagatttggttaatgccaaggtaagaactcttcgtcaagtcgagatctcgcaactgtcgcacgcacctctaaccaaaagaaaagtagtaaaaatgtaatcaaatataaacatagccaaagcgtgcactttaagtagaactcaccgacaacaaaatttgtatctaaatatctcgtaccgtgagaaattaaatcatgtactaaaccctcactaatcactactgctaacttttcagctaatcacctatttgtataatcaattgcagctaatcatttacacagacacctgtctaatgcctaattgctttatgtgctataattagccaatattagatcttgtaactaaatattatttctttctattagaaactgcttgaggaagtgctggccgagaaggataatgtggaggatttgaacgacaactgtgagcttctcatggagcagagtgcctgcactcgcattcgtgaccagaccatcgaaactcaggccaactacaccaagctcctgacttccgctcagggattggttgccaagatcgagaagaatctgtccgatcacaccgagttccttaactataaaaaggaaatggacgcctggatcgaaaaggctcaacaggttctcgacgattgctccaccgatggcgatgctgccatcattgcccaaaaactggacacggtcaatgtaagttgtttgcacttatcataaaaatatatatatttttttcagatttttattgttttttattatattttaaatataattataaacatcttattcattttgcagtccttggcctctcgtcttcccgagggtcagcatctgttggccttggtgcaggatgcctactcgaaggcatcgaacatcactccagaggataagcaagagaagctgcgggagctgatgaccaaggttcgcgaggattgggatgccctgggactggccgttaagcaaaagttaagtgacctgaagcaggcgcagaatcgttggaacgattttgctgccaacaaggataagcttgagaagtggctcaatgaaaccgaaacgacactcaaggtggcaccggaaaccaagggtgaactgagcgaaatgaagaccctgctggaacgatacaagaccctttccaatgaactgaaactgaagggtaacgagctggagcagctgcagtcggaggctcgcgacctgggcaccgaagtggatgcagtgaatcgcttgcaatcgcgatgcgacaagctcaagaacgattgttccgctcacattacggcactggaacaggagatgttcgattataatgcctaccaccagagtctgcaggatgtggagaagtggctgctgcagatatccttccagttgatggcccacaattcgctgttcatctcgaatcgtgaacagactcaggagcagattaaacagcacgaagctttgttggttgagattcaaaagtaccagaccaatttggatgacttgaatgccaagggtcaggcgcagatcaagcgttatgaatcctcaacaccagccattcgtcctacggttgagtcacagctgaagaatatccaagatagctataactcactgctgcaaacgtcagtgcagattaagaaccgcctgttggaatcgctggccaagttccaggagtacgaggatactttggatagcattatgcgtaatctggagacatatgagcccattattcagaccgaacttgatgctccggctaccagcttggagttggctcaaaaccaattgaggtgtgcccaggaaatgcagaacaaactgaacaacgagaagtcccgactggcagctgccgttcaggcctgtgaggcagctactgcctccatcagtcgaccaagttctccactggaaacagccatgcaggctattcccgaaagggagctcattgtgcgcgccaagctcgaggatctgctggatcaggtaggataatgtttaatgcctttgcgatgcatttgtagagttgcgaccactttcaatagttcaaagtcaagcaattaaaatgaatggaagaatcattttgtagatctatgttgttctatcatattttcttaaaacctttttagatgtaatcagtagagattatgcttgatttcaaaacctattttcttttttagatagctattcttccattctattattcttttatcactattatttgctaaccaatgacttgttctttttattaaacccttaaccccacaaacccaacactgccctaacccttgttgatttgccactctgcccgtaaatgttgtaaattgcactacccaccaaaaaaatgctatgccttgcgctttgctgccacaaagaaaccgcctccaaagactcggagctcaaccggaggtgtcagcacagatgatgataaagacgaggctgatgttgagattcaggttgagctcagcgatgtgaatgaggcgcttttggatcccattgcccacgagcgtgtcaagaactatcgtcgcatagttcgcttgaatagcgcccatgtgggcaagctgaatgaattagttgctaaggtaagagtaaggtctattcctacacaggatcaaacaggtggcggtctgcatggctatgatgttttaaattgcttgttatgcttagaatataacttgtaactcaatttaatttaattgcgtgtttgtttttactaggtgcaatcccacttgggtggtttgactgcatccgttagcgaactggagcaacagcagaagcagcgcgccgagctgcaggattgggtgaagaagcagcagagctccgtctccgactggatgatgcgtccttgcaaactgcgcccggaggcagctcaacaggagctggtgtccatgaacgatttgctaaactccatcggtgacaagcggtcgcagttgatgctggaaatgacaggatcatgtaagtgttaggtttaagatatacgctagctaataggtttcatgtaaagttttgatccttgcatcaatcctgtgactcccgtgattttattatctattttcccctacatcagtgggcgacgaggataccgatttggacgataacattgacaagctggaatctgaactcatggatgccattgccaagaagcaggctggtcagaatgtaatcgatggctatcgccagggaatggctgatgtccagaactggttcgatacactgatcaagcgcatggacgttttggatcgcggttcgggtttgaattgtgcccagaaaatggcggccattaatgagatcaagaacgaatatgagcttcaaggacatcccaagattcaggagctcaagggcaaggcagcgcaggtggcggaggtcatcagcaatctcgatggtcagcaagtggaagagcaaatgaagtcactggatcgtcgctttgctgatctcggcaagcgcatcgatcgcaagtctcaactcctggatgtgaccaacaagggtgtggagggagccaagggcgagatcgatcaactccagaattgggtgaaacaacagattgaggagctgcaggcacccaaaccattgggttacactcccaaggatgccgaggcacgccagcagaagatcaagagtctgatgaaggatgccgaggccaagcaatccctggccgatgtcctggagaagcgtgtggccaacatgcagcaggaattggaacctgttgagtactcccaactggagtccgcattgcgtaatctcaacactgaaaaccgcaatctatcgggagtcctaaaggctgaattggatcgtgctctggaggccagcaaggctcgcaaatccctggagaacgatttggacaaggcacgccagtggctgaagaccaagatctccgaggtgcgcaagctgcccgtgtatcatccacttacctctgctgagatcgagaaaaagatccaggaaaaccggaaatacgatgacgatgccaagcagttcaatgacagcgttttgactgatgttcagcgccaagcggctaacataatgaaggattgcgatgatgccgacaaggctgcgcttcagcagatcctggatgaaatcgctgccgactatcagaccctcaaggatgagagcagcaagagaggaaagtctctggatgatctcctgcaaggtcgcaaagcctttgaggattccatgaagaacatgggcgattggttgaacgaaatggaaaccgccaccgaaggtgagctacgcaccaccagtctccccgttttggaggagcagctggcccattacaagaagctcctcagtgatgccgagaataagggcggcctcatcaacgatgtttcggagcaaggaaagagcatcctgcccacacttagcaatgccgataaattgaaactcaacgatgatatcaagaacatgaaggatcgttatggcagaatcaagaataccatcgatgatcgcgtgaacgccttgggtgatcacatcaagaagtacaaggatgccaagagcaggttggccgagtgcagtcagttcttgggtaatattcaacagaaactcagggaactcaatcgcccgattggatccaggatcgaagatgtccaggacttgttgggtgcctatgagggaattctcaaggaactcaaggacagcaagagcaaaatgggcgatatgcagatggatgatttgcccgagttgcagagcattttggcccagcaggatgatatgattaaactgattgaagatcagttggcccatcttcgccagcttctgctgctccgcgagcagtttattgctttgattaatgagattattgcttttatcatgaagtacaccgatgttatcatagacattgaaaactcacctgatagtctggaggataagatcaacaagtacgatgatgtgattgtgaagattcaggagtgcgaaggtgtcttggcctcggccaatgataagggccagaagattgcctccgagggtaatgctgccgataagaacagcattacagagcagttgcagtccctaaagaatcagctgcagaatctccgaaaggcggtagaatcgcagcgccagaagcatcaactccaactggaatcccacaagaagatggccgccgaactgagtgagatcctcgattggttgcacagccacgagggagcggctaagtcgcgtcctctactggatcgggatcccgagtccgtggagcgcgagctgcagaagcaccagtctctcagccaggacatcgaatcctatctaaataaattcaacaaaatcaatgatggtgtcaaaacggaaattggaatgccaagttccctgttggaaatgctctccgagggcagatccctggtggcttcactgccccatgaattggaggagcgtgaaaagtatctgaagaacaaccgcgactctcgtttggagtacatgcaactggtggcgaagttcaatgactgggtccatgaggccgagttgcgcctgcagaacagccagcatggcatcgactacgagcacttggtccaggatctcgacgaacacaagatcttctttggcaatgaggcacccatccgtaacctggtgcacaaacagatccaggaggccgccgataagatctggtcctcgctgaacaactacgaacagtcggaactctcggcggagttggctcagttccaaaccaagttgaccaacacactggccaatgccaagacccaacagagtgaactggagaaggaggcggaacgctggcgggaataccaacagtcaatcgatcgcgtcaaggccaccatcgaacgtaccaagttcgttgatgagcccgtccaaaatttggctggactccacttcaatatccagaagctgtcgcacgccattggcaatgttcaggtgagtttgtttaggaattattgggtgtatctgggatagtaaacgcattataaacttgatgaaatccttttcaacgaaagaaaatgttctaccatttccgattaaatagttcatttatttaggtttcaacttttgtcgttacttaacataaaaacccaacatattgaaggctcttttgtatgtatttaggcagtcttttgaatagccatgaatattcagctgttcgactgcatgctgtgtgcatataagtgtgcagtcgaagaaccagttttccaaaaaatgacacattgcacaaggatgtgccactaacttacatacatatgtacatatgcgaatgtatcgccttaagagcaactttatggagtggcaccataaaaaaccaaagtgcaatcgttttgtatcttttgcgtttcgtagcaacgattttgccggccggcaaaagcaaataaaatgcactcttgactcgcattcatatgcatttaagtgctcctctcttcgttggaaagcctcctctcttattcacactaaatataaagagagattgctttatttctgaactgatagttgtttattgaacacgttgagtttgttcatttgtttactttcgtaagcttttaccttgggcactcattaaacttttaacctactagttcactatttgtcgagcttatcgttcagtcgtctgtcgtcggacttccagttcgattataattattcaaggcactgggctcgatttttatgctaggcaactggaaaaaacagctgttgttgttgctgctgccgcggaatgaattaagctcatgacatcatcagcagcggcaacactgtatcaagcaaccagttttgagccagggatggataaatctttaaactacaatttgatacttaaaatttttggattttaaaagataacaatttataattaaaaatacatttttcaactgcttttctgtatgatttttcgtattccattttgttgggatatttctaaagggctttaaaatatttttaaatcaatttatatattttttatataatttattcagatacgtcagtgcccccatattttagtttttgatttagccctggtttttcaatgagatattgagatacaaatgctaagtgctcgtttgttggtttttgctgagtgagctttaagagcaccggccctttgtcctctctttcggctcttttctacacagctgtttggttgttgtacttgttattctttgttgtttttgcctagcagggcatgccggcaattgttgttgctgccaattgtgaaagagagaatggcagcaatacagaaagagagtgacgtgcacacggtggcgtatgcgtaatatacatattatatgtgcgaagcccaactttgaccgcccacgcccacccaaaaacgatgttcaatacacatacattatgccaaatggttgaaaaaaaaacgtgtttgcccggcttttttgctctctttcgacccgttctccggcaaactaagagagattctaactcgtgcttatttgcttttgcttttggggctgttggattttttttgagttccgacgaattcacttcaagttgagacgtttatctgtgcggttggcagcgtattttagactcgtattcgcgattcgtaccatacatatatgtgtatagaaagagagcagaagaaagaaagaggagaatcgctacatttgttaaatttgaattacccgtttcgttataaaaaattcgccatgtgtcttcggcaaggcgcaaattgaaattgagcaaaagtaaaaatacaacaaaatcgccaaccagatagacatcgatatcgaaaagccaacggctaacgtcatcagccatttaaaatctataaaagaccaataagaaaccaaacaaaataaaataaaggccacaaaaggaggctacactcgaggtgtgtgtgtgtgtgtgtgcgtttgtgtttgtatagaaaaatctataaaatttatatatgaattaagcaacgtttgcctttcaactccgtgggccaggcatatgtcagagttgaaatagggcacacttagcaaactctagaccaaagacgtaaaaccggaatttcagatataccacttacatatatgtatatatattttgtaccaaccgcgattccggaatcgtcgttacgtcagaatcaatttcatgccgtttgtttttttttttaccttcgcacattcacatttcagagccaaaacagcgacttaacgctagtcaaccagcaggcccaatcgttgatccgccaggcggacgctcgcaatcgccagctgatcgagcaggataacgccggactgaatagatcttggcaggatctggtgcgcagcctggaacagcgacgcgacaacctgcaacagttggccgaacattgggacggcttcgagaacagcctgcacgcctgggaaaaggcacttggtcgactggaggacaagttccgcaatgtcgatccgactgtaagatcccgacgtcacttggaagatacgaagaatgccattcaggtgagttgcgacattttcgggtgacactgggaaaaagtcacctgaggagtgtattattttaaaaggggcttggattggattcaacatatgaaagagtagatttctttattatcatttctttattttatttaaaaatatccctctctttcatacatttgataacaaatcatgttcatatcacagtgtgtttgcacttggggggcacccattcattcagcttcgttgtggcaaaaccgccctcccttgggggcttttatgtttgtcaaatatttttaccaatatccatgcataaacacattccgacagatatgtaagtgttagatatatatgtatgtagtatattcgtttattgtatagccgtgccgacatcaagttcatggtcacgttgtggaccggagcttgcgctcttgtagtttatcacgctcttcggactctcttaaaacgactcgagcttctcgaaagccatggagcagctgagttttcgaggcagctccaaaatatacatagccaacgatgtgttttgaatgattaacacggaaagccactaaatcacagcaatcaagagtgcgaatagcgaataacaacaaaacaacattctaactttcggtttcggtagactcttgattttagctaacctacagaaccagagatactccgatgattaatgagccataaataacttgaaactgtttgcatacacctgattttatttatatttacatattaattgcattattatattgtaacttcacgaactcgagttagttaactaaaccagcaattatcatttgtagtacttatcagcaatgatttgagtgatttgtaggcgagtgaaatcactgtttggagcgataacaactttggacgcttgttttcaatcggtcaactaaaaatagtacgaatacacaaattaagtaactgaaaaaggaagtcccacctcaacgtcaatagcaggctttcaaatcacatttcaattgaagcaattttcagccataaaagctaggcccgtccaaatcaaactaacgatgttgtcatacacgtcccatataaagcagcattcagcgataacgaaacaaaaaaaatgaaaccatcaaacttgccaatgataaacaaagacaaacaaacacttagttaaggttttagtttgtcttttcgaaactataaattgtatttcttttttgtttcatgcttaaaccacatatttcatcttctcgatcaaataacctcaagctccaaaagctgccaagtcaagtcaacaaatttatttacttttatgcggcggtgaccttccagaaaaactggaaataaaaccgaaattgagggagatacacaaaaaagagatctagaatgtatagcatcacataaccacaccaaatgaatcataattgaacaaacattgtaattagtagtaataatttcttatattttataggaactgcgtgaagaatcaaatcaacttaaatcatcacataaagaaatcgaggcgctctctaaatccatcctcacattccttggggaagtacacaaaccctcggcggaggccatacaggccaaagtggataagttagttgaacagcaggccaagtgagtacccaccgaacttaccaattaccagagccatataccttatactactacataccaatgtgcctaactacgcgtgactggggacccaaaaagtgaaaaaaaaatgccaaaaacaaaacacaaacaaagctcccaatcgaagcgtttaattccggaaattgtattggcttgcatacattatatccagctgccaaacttgttgcctaatgaaaataaatggcaatttagagaacttaactggttacagatgaatatcgcagcggctttcatgtttatatcacactcatatttaaagtgctatgaggcaatattctaacagaactttttacagctaaactacatacttataaggtttagttagttagagctctaaaaagaaatgcttctcgccttttcaaaccttttacttgttgcttggccctcgaaatgccatcttatagttatagttgagtcgaaatctgacgtcagaccaagtgttacgcttcgttgtcggcgttgttttgtgtgcattacgtaagccgaggcttatagttttttttttgtacccctctcagtctgctatttcccgaaataattgttattttcattgttctgggaatgagccgtttatgacggaaaactctttatttttaatcacttgttttctctttgtttttttttttttttgggctatcccggtcttcaaagaactgtgccaaagcttcggtcttatcaaacgcgatagggttcttaggagctattagatatatatatatatatattacgtgtagtatgctttttgcttttgcgataagctacacagcgaaagaagaattcttacttgtttttatcggaaatgcctaatatttatttatatatgtgttgttgcctggcgctagaaaaacacagaaactgtgccaatatgccaattcattttattgctcttgttgttcattgtatctttgaaattcttgtggattttctttcgctaattaatcacgtgccaaaagtttggcaacatg

SEQ ID NO: 40199 - DNA, 21606 bp, DROSOPHILA
atgcaccccattaagtttatatatatatttatacgcatcgatgatttaatcaatgacttacgcgatggtacgaaactaatcgcattgctggaagttctgtccggagaacgtttgcccgtggagaagggtcgcgttctacggcgtccacatttccttagcaatgccaatacggccctgcaatttttggccagcaaacgaatcaagttggtcaatatcaatcccgcagatctggtggatgggagaccaccagttgtgttgggcttgatatggacgatcatcttgtacttccaggtaagcatgccttatatactatatatatatattaaatacaccgagtgcaccagttcacgaattcatattcataatcaatactcattaaatagggacagtggtgtggaggtaaaggatttcggcgccagctggagagatggcgtcgctttcctggccctcatcgatgccatcaaggcgaacctggtcaatttggctgagctgaagaagaccagcaaccgtcagcgtttggagaccgctttcgatgtggccgaaagcaaattgggcattgccaagctcctggacgctgaggatgtggacgtacccaagccggacgagaagagtatcatgacatatgtggcgcaatttttgcacaagtatcccgaaccaaaggcgagtgcttcccgcgaccagtcgcatgtgcaacaggaggcggacgaactgcgtcgcttcctggtggagaagaccaccgagtacgagcccatggtcatgatgagctcgttcccacgcgattttggtgaatatttactggcacgttctgaggtcgatgcacatttggcggcctacaatcgcttgaaacagctcattgagagccagagcggattcctgcaggtctcccgccaatcctgggaggagattaacgagctgtggcagcgcctccagtaccagatgatgtactggctctggttgctggattcggagctgcccggcgacttcggcaccgttggcaaatggttagccgaagcagagaaactattaatggacaacgatatacccaatgcaatgaatgaggagacggccgcagtgatcagcaggaagctggaggagcacaagctcttctttgccgacctgccgcgcattttggccatgtttgataatgccaagcggtcaccggtggctcaacagattcccctggagcagttgcgcaacatggagcgtagacttcaggaggtcggaccgaaggcagcggagcgaaggatacgtttgaagttcctggagcacaagtgctgtttgattgccttcctcaatctggtggagaacaagatgcgcggatggactggaaagtatggtcacgaggagaaggtggcccaacagctggagcagtacaagaactttgtgtcgcgcaacaagatcttccaggagttccaaaaggcctttgtcgatatgcaacaggtggtggaggagtacaagcgcgatggcaatgtgccgcgcaaggagatcaacgacatcgatcgattcatgtatgaaaccgaggagcgctggaagcgcgtctccatggaactgaagtgctgtcagaactccctggaggaagtggtcaactgctggcgcagctggaaccaattggcccccacctgcgaggagtggctgcagctggccgagcaaaaggtcaaccaaagcgaggatgagcgtttggacttctttcaggatatacccgtttggaaggacaagtttgatgccctcgctagctcggctaactatctgattgcctcctgcgaggagcccattgcccagcaattgcgtcagcgacatggagctctctctgagcgattcgagcgtctgtttgccaacaccaagcagtacatgcatgctggtgacattatccgatcccgacaggagtacaagtcgggcatagaacaactgtccagatggctgcgaggagccgaaagcgttctagaccagcgacaagttctgggcaacagtgaacaagtcaaggagtacggccagcagttgcagcaattggccagcgaaatcgatgacaacgaagagctgttcaaaaccatcagcaggaacttccaatcgctgatccaagacctttcccgcgatgaggtggataagatgatgaagctactcaagcaagagaaggaatctctggtgcgcatacgtgcacaattgcctgccaagctgcatctgttccaccagcttcagatccaacaggaatccctggaggctggacaaaaagagattcaccagtggctgagtgaggctgagcagcttctgggaacccacaatctctccggaggccgtgatgccatcaatgagcaattgcacaaacacaagacctacttctcgcgcactgtctactaccgatccatgctggagagcaagaacaaggtgttccagaatctcttgaaggctgtatcctccgatgataagatcgatactgctcctgcttcccagcaaatgcagcagctgaacgagcgtttcaactatgtgattcaaaatgcccagcaatgggaacagcgcttggattcggcagccggtggatggagtaacttcaaggacaacgaacgtgtggtcagcgaatggctaacccaagctgaatccatgttggtggagaagcacatcgaatcgaagacgacaatcgagacacagaagtacttctttgagcaggtcaacgatcgctggatgaatgacctggtgcagtcggctcaacaacttctgaccacattgcccgcccaggagcaacctgctgtggtgcacagtgtggagcagttgcagtcccgctggaagaatgtattgtcccaggctcctttgcatctattgaaactggaatttagactggatgagaacgcattctatcaatctctgaaggatgtagagaaggagttgcagctggagcagcaggccctcaatcgcaatgaggatgtggactccatactccagcgtaaccagcagttccttctgcaacaggatgtcgttcctcgcctggagcgatgcctccagaacatgcaacgtttggctcaggcccacaggcaacagcagcccggtgacattagtctggatcaggcctacgacaatgccaagtcgcagtggcaactgttgtccaacaaattgggcgacatgcgtcagactctccagcaaatcccggcccaatggcagggctatcatctgaagttcaacgacatggtcgattggatgaacggcgtggatcagagccttaagaatattgtgaacgaagtgaataccatggaggaattcgaaaaggagaaggtggtcttccagaaaatctgccaagatgctgacaacaaacgcgaggacatgaaatggttggtcaagaccttggactctctgcttagttacgccaccgaagatgaggccaatctggagcagaagaagctggaggatctgatcgcccgctacaaaaaccttatcccaacgattgaaatcacgatggtcaagacggaagtcttctcaaagtgctacacttaccgccgagaagtgcacgaggttgtgtgtctgctgagcaaggtcaaggatcagactgccaatataccagctcccgatagtctggatcgtgtgaatcgtctgattgaggagcagcagtatgccatcaaccaattggatcaccagcgtccgcatatcatgtccatgctgcaaagaggacgtgatctcatcaaggatgtccatgccccggcctttgtaaatgccgaggtcaagaatctggagacgggatggaatcaggcgtacacagagacctccgacaaactgcaggccctcaagggcacccaggccgtttggagcgagtttgtggaccagaagaacgatattttctcaatgcttcaaactgcggagacggagctgcgttccctgacaccattgcaaaccgatcccaagaacgtcagtcaggatctgaagtccaagagagatcttaacgtacaactgcagcaggcttcccatcaactgttgcctaagttgcatgctctcaaatcggaactggctcctctggccgcacccgataagcgtcccatcctcgagaaggaagtgaccgaggtggagaagatgttcttcaacaccatggagcacgtaaaggatcgcgtcggctatctggaagactacagtgccaagtggaataactacaagacccgtctcgctgaactgcaggaatgggccaacaaggtcgcgcccaagaatatcgaggcccttcaatcggaggacctcacaccggaggagcgtgtggtcaaggtgcaggcgttcaagcgtatccttggggatcgcatgaagcaactggatcttctggccgccgatgcttccgagttggcgcccaaggagggcaacattgccgaggccaagcgactgaagggagagattaccaagctgcaggaggtcctcagtgccatcaatcgcaacgtggaccatcaggcacaggctgtgcaggaggatcttgtcaactggcagcagttccaggccggtctgcagcaaatcaagccagccgtggagcaaagcgaagtcaaggtaaataatgtagtttctaagcccatctccctcgaagaagccgttgccatgcaacagaatgcccaacaattcgagacacagtgccaggagcaattggacaagctccatggcatatcaaacatcagtcataaaatgttatgtaagaccaatgcccccgacgaattggacgccatgcattcgcgttggactgccgtccatgagaacgcgaaacaggcgagcgccaagctcgaaaagttggtggccaattggaagtcattcgacgccgatgccgccaagctcgaggattgggttggacagggtgagcagcaaatgtcccgccgtccagctgtcctcaacaccccgcacattgacaagctcgaaaaggagctggtcaagctgaagtcgttcaacaacgagatctcgcagcaacaggccaaactggtgactctgggtcaaaatgccgatcaaatcagtttgcacttggctcctgaaggagcagccgctttgaaggatcgtgttaaccaaatgaagggcaagctacagaagctttcggaagcaactcgaggtcacatcaacgaggtgtccgacgccattatctccaggcaggatttcaatgccaagttggtgaacttctccaactggatggagcagctgcgtaaccaggtcactcaggtggaggagatcaacccggagcgggtggaaaccagtctccatgtcatacacgcgctactgcaggagcatgccgataagaagccaagtttcaatgccatatacgatgaagttaagcaattggctttgggagcaactcccgaagagtcgaatgccctgaacgatgcctacaccgctttggtggtgaactatcagaacctcgagaccaacatgctgcaaaagaaggcggctctggagaaatggacagagctgctgggctggaagaatgacaccgaatcgcatttgaactacctcaagcatcagctggacaagccggaaggacctgctgccgaggagctgtccaaggtcattgatgagatcgataatttgggtcagggtattggatactggaagggtcaggctaaggagattgatgaaaacccggccattcagttgagggatgctctgtctcgtcgtccattgattgccacccagattgtgaacgatgttgagaataaactagagaatctgaaactgcgctcgcagagccagcaacagcaaatccaacagatgaccgtgcgcaaagataagttccatgccctggagcataactttggacaggcacttcaagaaaatcgggctaagctagacgagattctcagacagcatccgactttaaataatatcgatcaaatcattgccgatttggtcgctctgaatgatgccctgaaataccaagccgatctgaagaatcgcattcatgacgaaggttcattgctgatgcgtgaggatattgctagcatgcccgccattcaggagagcctacttatcatggacaagaactacgattctctgcagaatgaaatagctgatcgcattcagaagtacaacctgattagccaggccctgagagaatatgccgattccaaggacaagttctccaaggaactgaagaaggcagaagatctatacaatgctatacctcaacagccacgcgatgaaaccgagctccatcaagcttccgagaagaccagaaagaccatggagcagttgcgtaagtcgaagctcagtttggatgaactggagcgtcggggcaacaatgtgggcaaacttttcagtgccattggagaacccattccgcaggaagtgccacaggaggtcaccgcagccaaacaacactggcaggatttgcacgacaaaaccgctaagaatgcgcatgtgtacgagacggaagctgttatttggtcacagatcgaggatgccaagaaggatttgcttccctggttgtccgaaacgaatcagggactctgcgatgctgcggataactcaattgaaattgagtttggacccatgcgtctgagcaagtaccgcacggagctaccttcgtatcaggctctgaaggattcgatagtggagaaaaccaatgatttggttaagatcaacaaaggtgcggaaattcccgctctatctgcactcaacaaactattgtctgagcagtttgctgaggttaacaacaatgcagatcgcctaagtgccataaccacctcgttcaatgaccaggaacaagagttgcgcaggcgttcgaaggaagctggcgaacgggtgagcaaacttcgtgagcagctgatcaaatgtgatgacatgtccggtgataataacaagatcatggagcgtcttcagcaatgccgtgccctgcgtggtgagctcgataatagtggaaacgaaatcgacaacatcaaacaaaaggttgacgagctgcgtaatttgtacccaactttcagtgagtccatcatacccaaagaactgaacaatgtgcaaaaacgctatgagaacgttgatctttacgccaagaagattgaaagttctctgctgcagttcctcaagaagttccacgccgataaggtgggcatgctgaagcgtatcattgccactcaacgcgaaaaggtggcctggtgtcagccggagtcctccagtgacaaatacaatctggatgtcaagaagtcctctctgcaggaagtcagcaagagcattgatgactgcaaggcacgccatgccgagaccctgaagtccttggagatgttgaaggcggtagagtcgccacagaacctggctgaactcaccagcgatgccgagttactgcgcaaggatatgcaggctctgcaggacagctttgaccaaatcaagggaatccttgacgagaacgtcgatttgtggtcgcagtatgagcaatcgaatgagcagatttccaactggctgcgtgacgttgaaggacgcgttaaggcagaaactagcagccaagtaaatctgtccgaggttccacagaagcttcaagaattgtctatcctccaacaggatgtgttggcccatgagcccattattaataacctcgagcagacatcccaacagctaattgaaaagaatccggaggcaagaattggccagtttgtcacccatttggtgcagcgatatcaagctgtgtccaaggctttaaccagctacatcgataagatccgtggtgctcagttatcaaacgctaactttgccaaggccgccaaggatttcaacgagtggtttggtgatgccaagatcgagttccaggaacttgctcgcatgggatctcccggatcatcctctgccacagctcagcaactgcagaccgtcaagaattacatcaagaccttcgacaatggtcagatactactgaataatgccgtcgatattggtgaggctttgtacccggtggtatcgcccgataatcgcgaacgtatccgtgctgatcttcgccagatgcgtgagaagttcgactacttgcgagatgaggccaatgcttttatgcagcaagtcgagggtgttttgattcaaaagacttcaatcgaagaaagctacactcaggtttctcactatcttaacgaatcgaaagctaaggttcccaccactgacgaattgtatcccactttggccaccaaaaaagctgccctccagaactacaagacccagctgcaggagatcactctgcacaagaatgctttgaagcagttgcacgacaaggctgtcaccctttgcgatgatgagtccgagagaaagaccgacgagtctatccaggagtataacacgctatccaagaagatttccgataggattacaacagtgggaaatcatgtggtcaagcatgaagcgtatgatcaggtcctggaaaaggcacaagactggctgaataccatcaaatccgaggccattgatatcctcaacgagacgacatttgaaaaggaaggcgccgaggagaaactgctggttgtggaaaatcttctgcaacataagcctgagggtgattccattttcgatacctgtcacaagttattggaaacggtgctcacacaaacccatcccagtggccatccagctctgctgaagggtttcgaggaaccgaagcaatcttgggaggactttatgactctttgtcaggattcgttggtaaaactgaagcagctttgctctaaatgggatgagtttgatacaatcattgaggagctagacaactggatgaagaatgtcgaggcggtggttaagaaccagaaccttaagagtacggcggaagccaagaacgcccatttgaagcagcttcaggatatttcaaaggacatcgaacggcgcggtgcggccatcaatgagctaatggatcaaggccgtgagattgagggtgaaaccgatttgaaccttaagttgtcgcgcctgaatactcgctatcagaccctgaagaatctgtgcaaggaatcgatagccaagtatgtgaactatgtaaaggatcacgaaagcttcgacaaggactttgattcattcaagcagaatcttcaatcttcagtcgacgagctggccaagaccaatgaaattgtcggcgatcaaagcgtgctgcaggatcagcaaaataaactccgtgagatgtccgacaagcgcattttggattccactctattcgagggactcatcgatcgtggcgagaaactctatggtcacaccagccccgaaggccgtgaaatcattcgccagcaattgcgtgccctgcgaaccctttgggacaactataccgatgatttgaactcggcgacgcaaaagatcgatcagtgtttgctgcagtttaacgagttcagcattgcccaggatcagcttaccaagtggctgaaggatgtggacaaggccatgcagagtcacactgaacccaagacgacgctgcaggagaagcgtgctcaactgcagaaccacaagctgctccatcaggagatcaccacacacaatgttctggttgataatgtctgcgacaaggcacaaatactggtcgaccagatcaaggataactcgttgaatgtgtacttgacctcgatcaaacagcttttccagagcatagtccagaagtcggatgaaattttgcacaatctggatgattgtgttcagaagcacaatgaattaaacaacgctctgtcctcggccaaaacttggatttcgaatgagaaggccaaattgctggagtgcgacgatgcttatggtgagaaggcagacattaagcgaaagattgaaactttgggacaattggctcagaacaagccacaggcaatgaaaataatcagcgacatccgtgatctctttgagaaagtgaaggcaacgacctccgaaaagggtaacgaagtgctggacaaggagatcgaggaattggagaccaccatgaagagtcactttgatgacatcgagggcattgaaggcaaacagaaggatgtgcttgcccagtgggacaagtttgaaaaggcgttggaggaacttaccaagtggtgccgcagtgcagaggcagtgttccgcgaacagcagctgcagtccacgctccatgagaaagtggagcagctggagaagtacaagattcaaagggagttgatactccagaaggagaaggagatcgatgccttcggagatgctgcccacgctctgcttaacaactgtggagccgatcgtctaaagactttaaccactcagatcaccaatcggtatcagctgcttcaagtccttagcaaggaggttgttaaccgctggtcaaatctggtcgatgatcaccagttctaccaggataagtacaacgaggtggatttgtggctgcaacccatcgaatcgcagatggcgaaggtccttttggatgagccaacccagagttctaacattttgcaagtgctgttgtctgaaaaggagcaagcggagagcttatttgctgctctaaatgcagctggagaaaaggctcttccagagacatccactcagggtagggagaagatccgtaaggacctgcgcgatatccgcgatcgttgggacaaactggacgagggcattcgcaacctggaaaaacgccaggaagcgcagggagttcagctctccagctaccaggatattcttaatcaaaccgtcaactggttggatcaagtggagaaactgatccacaatgagaaccctgctagctggaccagtgcccaagaaattcgctccaagttgtacaagtacaaggccaccaaccaagacatcaactcgcataaacgcatagtcgaggctgtgaatgaaaaggcagcagctcttctgggcagcgccgctccagccaatgcggatgagatctccaaggcggtggctgaggtgaacaagcgatatgatcaagtgggccaggactgtgccaagttagttgccgatctggatggagctttcgatgtgtaccagcagttcagtgagctgcagaaggctcaacaggactaccagaagaatctttgggatcgtcttaccggctactcggactactcaggcaataaggcagctctgcaagctcgccttcaaaagatcaacgagatccaagatgctttgccggagggtgtggccaaactcaagtccctggaggatcacattgagcaacaggccagtaatataccagcccgatccaaggaggtaatggcacgtgatctggccaacttgcatgccgatttcgagaagtttggagcttcgttgagcgacgtaaagagtggactagagaatcgtctacaacaatggaatgattacgaaatcaacttagatcgactgatcacttggttgggcgaggctgagaattccctcaagaactacaatctgaaatcctcgtttgaggagaaggaagaacagctgaacggtttccaatccttggctcagaatttgcgtcaaaacgaagctgactttgacaaggtgaaggacgacacctcagagttggtccagagttctggtgaaacaaggattgctgtcaatgtgcaacaggtttcctcccgcttccaatcgatacaggctacagctaaggagattctcaagaagtgcgagcaagctgtccaggatcatggtcatttcaatgacaagtataagcagtgcgccgactggttggcaaatgctcaggcccgttacgatgattgctgtgacttgtccacggtggcatctcgagacgatcttctcaagaaacaagtggtcatccaggagcttctggcccagcagccaacagctactcagcttctaaatagcaccgttgagctgggcgagaagtgctatgggtccacagcaaccgaaggacgcgaggccattcgtagtcaactggatgatctgacattcgatcagttgttcgacaacattgccatcactgcaagaaagattcaggataagatcgccaagtggtctggctttgatgagatcgctgacagcttgaagagctggttggatgaaacggagaatgcccttccagctgatattgagctgaaaacgactctggatgagaaacgcaataaactgcaaacctatcgtgacatcttgaacgacatcaacaatcatcaggtggagttgggtaatcttcaggagattgccgccaatctgccagagaaaacagagcttgtggaccaaatcataaaggatatctctgaccgctttggaaagctgcaaaaacgtgcccagaactacgtggagcgttacgagggtattgtgagtgcacatcaacagtactccaaggctgttatggatgctcaagagtttatcgatgctaccctgaatacggttcactattggggcgatctggatctggaacaaatctcactgcacacgaacctcgaccgcctaaagaatctgaaggccagtttggccgatgagttcccacgcgttgatcaagttagggctttgggcgagaaggttattccgggtacggtggatgtgggacaggtaaacattaagtcccagatcgacaccacccagcaagaatgggaaagcctactgaccacaatcagctccacaattgaagctatcgaagctcgcctacagcattggtcggagtacgagcaattacgtgaccagtgtttggcttggattcgagatacggataacaaccttcatgctatcgatctgaaggaggatctgccgaaaaagcgtgcacagttggatgcactgaaggccctccaaggagatgtacgcgccaaggaattagaggtggataatgtcacggagaaggcccaaacccttctgaagggtcccagcagcaatcgtgcctcgggtcctgagttggtaaccaagtaccagcagatcttccacaaggtcaaggagctcaacaaccgttggcaacagtatgttacctcacacgaagattttgataacgctatctctgattgctcctcttggatcaatgagatcaaagaaaaattggactattgctccgacatgtcatctatgagtccaaaagaactggataagaaactggccactattcaggatgttatcttgctaaaggacgaaggttctgctcgtgttttgaagatcttagagcaggcccagcatgttttggctaacacagcgcccggaggtcacgaagccatcaataaggaactcacagatctccaggatctctggtccggaatcgctctgcgcatcatggatgttaagtcaaatctggatgactcaattactcaatggtctggtttcctggatcaagtgcaaaatgttcgcaagtttaatgagtggttggatggtcaggttaaggagttgagtgagcatcaaacaaccatgacagagaaacgagcacaattggatcgggtaaaatctacggaggagaaggtgcgcgtcgagaagattgatgtggatgcactcaagatccaagccaaggaaatgattgccagtggtcaacagagtcaggcggccttccaggcgcaaaaagttctggatacattcgacgagctctttgccaagacccagaaattgttgtcgcatcgtcaagatcagtacagggatcatcgattgttcaaggaggcctacgatgatttggttagctggattggacgagcccgcgagaaattcccttcgttgaagcagagcagcttaagcgataaattggccattgaaaacgctgtccaagctacggaagctcttctcaacaagcaggcacagggtgaactcctcgtggagcacttggtccacactggagaggtggtgctggccagtacatctgctcaaggtcaggaaatcattaggaatgatattcgtgccctgcgcgacagcttcgagggcttgttccgtgaaatcaaccagcagaaggagaaccttgaggtgaccatggttcagtggcgagcctataaggaggaatatgaacgtctgatggaatggcttcaacagatcgacatccttgtgaagaaccacaaactgaacctgtgccccaacctacccgaaaaggaaaaacaggtggctgatatgaaggaagtaatgtcccgtctcgagaaaggcaaagatgacatcgataagtttaatgcttcggctgccagtctgctaaagtcccatttggatacttatgtgaacaatcagctaaggcacttgagctccgtgtatcaagtacaggtaaatctggccaaggatgttcttaagaaggtggaaaccaaccgcgatcagcatcgtgaatacgatgccaatatgaaatctgccaaggattggatagcaaatgccaaggctacaattcagtcggcgggtgaaggagcaggttccaaggaggctcttcagcgtcgactggagcaaattcaggatctgattcgcaaccgtgagcttggccagaatttggtgcacaccgctattaataatggcgaaaagataataaggaacactcgctctgacggacgtgacgccattaataccgagatgaaggaactgcaaaccgaatgggatcgactggtgaagaaaatgtccacagccaaggtgcagttggagacaaatctattgcaatgggctgactacagttccagctactctcagctgcagcaatggattactgaccgggaggccaagttgcagcaggcttgtgaacagaagatcgttaagtccaagaggggtcaacctggtctcagcagtggattgagcgaacgcaaggccaatcttcgccagacgaacaacattgtccaggatattgtgtcatttgagcccatgattcagtcggttacgtccaaggcttcggttcttcagcagggtgctccgggcactgaaatctccgataagtacgagaatcttaccaagcaagctaaggacttgtacgagaaacagaagaacaccatcgaaagctatcagtccttgattgacgcgggcaatgaatttgccacatggctgagaaatgccaaggaacgattgagcaaatgctctgaacccacgggcgataaacaagctctggccgagaagacccaccagctgaagattctgcagggtgagctgccggaaggcgcccaaaaacttaagaatgctctggaacagggcgagatcgcttgtcgcagtgccgagcccgaggattgtgagattatcgagcaggaagtggctctgcttcaagaagaattcgatgcctacagggaagctcttaataaggccaaggattatctggaagtgggtattgtcaagtggtccgactaccaggatcagtacaccgaagctttggagtggttaagtaagaccgaagctttggtgcaatcctacaacaaactgcaggatagtttgatccagaagaaggttgttctcgagcaattccagggtcatctgcagaccctattcgactggcagaagactctggatgatctgaacatgaaggcacaggttctactggagacttgctccgatacaagaatcagcaatgctattatgcaactgaccaccaaatacaatgctctactaactttggccaaggaggttatgcgtcgcctggagatgcactaccaggagcatcagcagcatcacagtctgtacgaggagtgccaatcatggattgagaagactcgtgagaagctttccgagtgcgaacaaattcccggaactcttaacgaggttcaaatcaaattgaataccgtaaagaatcttcgccaaggttttgaaaccggtcagaataaactgcgttatcttttggagctcaaggagaaggtgataatgaacaccgaacaaaatggtgcagccaagattcaggaagataccgaagccttaaagcaggactttgacaaactgttggtggatctgaacgatgttcgccagaaattggccaatcgtcttgcccagctggaggagatctttaagctgtacaagatcctgattgaatggctggaggatgtggaaccgagtgtcaagaccagtgatgagttcctgaatgacttgagtgagaagcgagcggcgctggagaagttccgcgtcattcagcgtgatatcaatggccacaatgatattgtggaaaagatcaatcagcgtcttaaggaggacaacagtttggatcttaaggacttccagcccggcttgaccaaattcgatgacctgcagacccaggtgaataaaatcatcgagtcgctggagaaccaggtaaacagccacgagaaatacaagcaggcctacaatgagctgcaagattggctgcgacgcactcgcattgaggtggagcagtgtgccgactgccatggcgagaaggatcaagtggagagtcgtctgaatcgattgggagatatacaatcatcatctctggagggcaaagcccttcttgaagcttgtgaagagctgagtcaggctgtgattgccaccagcggaagtgaaggccaggacaatgtggcccaggagattaagcatctcacctcggagtgggagaccctccaaacgatatcccgcgatgctcgcagcagcttagaatcctgcttggccgcctggcagaccttcctgcagaagttcaacaagatcaacctttggatcgaaacgatgaacaagcgcgttaccaaatcccaggaaggcgagaacaagacacccgaagatttggttaatgccaagaaactgcttgaggaagtgctggccgagaaggataatgtggaggatttgaacgacaactgtgagcttctcatggagcagagtgcctgcactcgcattcgtgaccagaccatcgaaactcaggccaactacaccaagctcctgacttccgctcagggattggttgccaagatcgagaagaatctgtccgatcacaccgagttccttaactataaaaaggaaatggacgcctggatcgaaaaggctcaacaggttctcgacgattgctccaccgatggcgatgctgccatcattgcccaaaaactggacacggtcaattccttggcctctcgtcttcccgagggtcagcatctgttggccttggtgcaggatgcctactcgaaggcatcgaacatcactccagaggataagcaagagaagctgcgggagctgatgaccaaggttcgcgaggattgggatgccctgggactggccgttaagcaaaagttaagtgacctgaagcaggcgcagaatcgttggaacgattttgctgccaacaaggataagcttgagaagtggctcaatgaaaccgaaacgacactcaaggtggcaccggaaaccaagggtgaactgagcgaaatgaagaccctgctggaacgatacaagaccctttccaatgaactgaaactgaagggtaacgagctggagcagctgcagtcggaggctcgcgacctgggcaccgaagtggatgcagtgaatcgcttgcaatcgcgatgcgacaagctcaagaacgattgttccgctcacattacggcactggaacaggagatgttcgattataatgcctaccaccagagtctgcaggatgtggagaagtggctgctgcagatatccttccagttgatggcccacaattcgctgttcatctcgaatcgtgaacagactcaggagcagattaaacagcacgaagctttgttggttgagattcaaaagtaccagaccaatttggatgacttgaatgccaagggtcaggcgcagatcaagcgttatgaatcctcaacaccagccattcgtcctacggttgagtcacagctgaagaatatccaagatagctataactcactgctgcaaacgtcagtgcagattaagaaccgcctgttggaatcgctggccaagttccaggagtacgaggatactttggatagcattatgcgtaatctggagacatatgagcccattattcagaccgaacttgatgctccggctaccagcttggagttggctcaaaaccaattgaggtgtgcccaggaaatgcagaacaaactgaacaacgagaagtcccgactggcagctgccgttcaggcctgtgaggcagctactgcctccatcagtcgaccaagttctccactggaaacagccatgcaggctattcccgaaagggagctcattgtgcgcgccaagctcgaggatctgctggatcagaaaccgcctccaaagactcggagctcaaccggaggtgtcagcacagatgatgataaagacgaggctgatgttgagattcaggttgagctcagcgatgtgaatgaggcgcttttggatcccattgcccacgagcgtgtcaagaactatcgtcgcatagttcgcttgaatagcgcccatgtgggcaagctgaatgaattagttgctaaggtgcaatcccacttgggtggtttgactgcatccgttagcgaactggagcaacagcagaagcagcgcgccgagctgcaggattgggtgaagaagcagcagagctccgtctccgactggatgatgcgtccttgcaaactgcgcccggaggcagctcaacaggagctggtgtccatgaacgatttgctaaactccatcggtgacaagcggtcgcagttgatgctggaaatgacaggatcattgggcgacgaggataccgatttggacgataacattgacaagctggaatctgaactcatggatgccattgccaagaagcaggctggtcagaatgtaatcgatggctatcgccagggaatggctgatgtccagaactggttcgatacactgatcaagcgcatggacgttttggatcgcggttcgggtttgaattgtgcccagaaaatggcggccattaatgagatcaagaacgaatatgagcttcaaggacatcccaagattcaggagctcaagggcaaggcagcgcaggtggcggaggtcatcagcaatctcgatggtcagcaagtggaagagcaaatgaagtcactggatcgtcgctttgctgatctcggcaagcgcatcgatcgcaagtctcaactcctggatgtgaccaacaagggtgtggagggagccaagggcgagatcgatcaactccagaattgggtgaaacaacagattgaggagctgcaggcacccaaaccattgggttacactcccaaggatgccgaggcacgccagcagaagatcaagagtctgatgaaggatgccgaggccaagcaatccctggccgatgtcctggagaagcgtgtggccaacatgcagcaggaattggaacctgttgagtactcccaactggagtccgcattgcgtaatctcaacactgaaaaccgcaatctatcgggagtcctaaaggctgaattggatcgtgctctggaggccagcaaggctcgcaaatccctggagaacgatttggacaaggcacgccagtggctgaagaccaagatctccgaggtgcgcaagctgcccgtgtatcatccacttacctctgctgagatcgagaaaaagatccaggaaaaccggaaatacgatgacgatgccaagcagttcaatgacagcgttttgactgatgttcagcgccaagcggctaacataatgaaggattgcgatgatgccgacaaggctgcgcttcagcagatcctggatgaaatcgctgccgactatcagaccctcaaggatgagagcagcaagagaggaaagtctctggatgatctcctgcaaggtcgcaaagcctttgaggattccatgaagaacatgggcgattggttgaacgaaatggaaaccgccaccgaaggtgagctacgcaccaccagtctccccgttttggaggagcagctggcccattacaagaagctcctcagtgatgccgagaataagggcggcctcatcaacgatgtttcggagcaaggaaagagcatcctgcccacacttagcaatgccgataaattgaaactcaacgatgatatcaagaacatgaaggatcgttatggcagaatcaagaataccatcgatgatcgcgtgaacgccttgggtgatcacatcaagaagtacaaggatgccaagagcaggttggccgagtgcagtcagttcttgggtaatattcaacagaaactcagggaactcaatcgcccgattggatccaggatcgaagatgtccaggacttgttgggtgcctatgagggaattctcaaggaactcaaggacagcaagagcaaaatgggcgatatgcagatggatgatttgcccgagttgcagagcattttggcccagcaggatgatatgattaaactgattgaagatcagttggcccatcttcgccagcttctgctgctccgcgagcagtttattgctttgattaatgagattattgcttttatcatgaagtacaccgatgttatcatagacattgaaaactcacctgatagtctggaggataagatcaacaagtacgatgatgtgattgtgaagattcaggagtgcgaaggtgtcttggcctcggccaatgataagggccagaagattgcctccgagggtaatgctgccgataagaacagcattacagagcagttgcagtccctaaagaatcagctgcagaatctccgaaaggcggtagaatcgcagcgccagaagcatcaactccaactggaatcccacaagaagatggccgccgaactgagtgagatcctcgattggttgcacagccacgagggagcggctaagtcgcgtcctctactggatcgggatcccgagtccgtggagcgcgagctgcagaagcaccagtctctcagccaggacatcgaatcctatctaaataaattcaacaaaatcaatgatggtgtcaaaacggaaattggaatgccaagttccctgttggaaatgctctccgagggcagatccctggtggcttcactgccccatgaattggaggagcgtgaaaagtatctgaagaacaaccgcgactctcgtttggagtacatgcaactggtggcgaagttcaatgactgggtccatgaggccgagttgcgcctgcagaacagccagcatggcatcgactacgagcacttggtccaggatctcgacgaacacaagatcttctttggcaatgaggcacccatccgtaacctggtgcacaaacagatccaggaggccgccgataagatctggtcctcgctgaacaactacgaacagtcggaactctcggcggagttggctcagttccaaaccaagttgaccaacacactggccaatgccaagacccaacagagtgaactggagaaggaggcggaacgctggcgggaataccaacagtcaatcgatcgcgtcaaggccaccatcgaacgtaccaagttcgttgatgagcccgtccaaaatttggctggactccacttcaatatccagaagctgtcgcacgccattggcaatgttcagagccaaaacagcgacttaacgctagtcaaccagcaggcccaatcgttgatccgccaggcggacgctcgcaatcgccagctgatcgagcaggataacgccggactgaatagatcttggcaggatctggtgcgcagcctggaacagcgacgcgacaacctgcaacagttggccgaacattgggacggcttcgagaacagcctgcacgcctgggaaaaggcacttggtcgactggaggacaagttccgcaatgtcgatccgactgtaagatcccgacgtcacttggaagatacgaagaatgccattcaggaactgcgtgaagaatcaaatcaacttaaatcatcacataaagaaatcgaggcgctctctaaatccatcctcacattccttggggaagtacacaaaccctcggcggaggccatacaggccaaagtggataagttagttgaacagcaggccaagtga

SEQ ID NO: 40200 - protein, 7201 aa, DROSOPHILA
MHPIKFIYIFIRIDDLINDLRDGTKLIALLEVLSGERLPVEKGRVLRRPHFLSNANTALQFLASKRIKLVNINPADLVDGRPPVVLGLIWTIILYFQVSMPYILYIYIKYTECTSSRIHIHNQYSLNRDSGVEVKDFGASWRDGVAFLALIDAIKANLVNLAELKKTSNRQRLETAFDVAESKLGIAKLLDAEDVDVPKPDEKSIMTYVAQFLHKYPEPKASASRDQSHVQQEADELRRFLVEKTTEYEPMVMMSSFPRDFGEYLLARSEVDAHLAAYNRLKQLIESQSGFLQVSRQSWEEINELWQRLQYQMMYWLWLLDSELPGDFGTVGKWLAEAEKLLMDNDIPNAMNEETAAVISRKLEEHKLFFADLPRILAMFDNAKRSPVAQQIPLEQLRNMERRLQEVGPKAAERRIRLKFLEHKCCLIAFLNLVENKMRGWTGKYGHEEKVAQQLEQYKNFVSRNKIFQEFQKAFVDMQQVVEEYKRDGNVPRKEINDIDRFMYETEERWKRVSMELKCCQNSLEEVVNCWRSWNQLAPTCEEWLQLAEQKVNQSEDERLDFFQDIPVWKDKFDALASSANYLIASCEEPIAQQLRQRHGALSERFERLFANTKQYMHAGDIIRSRQEYKSGIEQLSRWLRGAESVLDQRQVLGNSEQVKEYGQQLQQLASEIDDNEELFKTISRNFQSLIQDLSRDEVDKMMKLLKQEKESLVRIRAQLPAKLHLFHQLQIQQESLEAGQKEIHQWLSEAEQLLGTHNLSGGRDAINEQLHKHKTYFSRTVYYRSMLESKNKVFQNLLKAVSSDDKIDTAPASQQMQQLNERFNYVIQNAQQWEQRLDSAAGGWSNFKDNERVVSEWLTQAESMLVEKHIESKTTIETQKYFFEQVNDRWMNDLVQSAQQLLTTLPAQEQPAVVHSVEQLQSRWKNVLSQAPLHLLKLEFRLDENAFYQSLKDVEKELQLEQQALNRNEDVDSILQRNQQFLLQQDVVPRLERCLQNMQRLAQAHRQQQPGDISLDQAYDNAKSQWQLLSNKLGDMRQTLQQIPAQWQGYHLKFNDMVDWMNGVDQSLKNIVNEVNTMEEFEKEKVVFQKICQDADNKREDMKWLVKTLDSLLSYATEDEANLEQKKLEDLIARYKNLIPTIEITMVKTEVFSKCYTYRREVHEVVCLLSKVKDQTANIPAPDSLDRVNRLIEEQQYAINQLDHQRPHIMSMLQRGRDLIKDVHAPAFVNAEVKNLETGWNQAYTETSDKLQALKGTQAVWSEFVDQKNDIFSMLQTAETELRSLTPLQTDPKNVSQDLKSKRDLNVQLQQASHQLLPKLHALKSELAPLAAPDKRPILEKEVTEVEKMFFNTMEHVKDRVGYLEDYSAKWNNYKTRLAELQEWANKVAPKNIEALQSEDLTPEERVVKVQAFKRILGDRMKQLDLLAADASELAPKEGNIAEAKRLKGEITKLQEVLSAINRNVDHQAQAVQEDLVNWQQFQAGLQQIKPAVEQSEVKVNNVVSKPISLEEAVAMQQNAQQFETQCQEQLDKLHGISNISHKMLCKTNAPDELDAMHSRWTAVHENAKQASAKLEKLVANWKSFDADAAKLEDWVGQGEQQMSRRPAVLNTPHIDKLEKELVKLKSFNNEISQQQAKLVTLGQNADQISLHLAPEGAAALKDRVNQMKGKLQKLSEATRGHINEVSDAIISRQDFNAKLVNFSNWMEQLRNQVTQVEEINPERVETSLHVIHALLQEHADKKPSFNAIYDEVKQLALGATPEESNALNDAYTALVVNYQNLETNMLQKKAALEKWTELLGWKNDTESHLNYLKHQLDKPEGPAAEELSKVIDEIDNLGQGIGYWKGQAKEIDENPAIQLRDALSRRPLIATQIVNDVENKLENLKLRSQSQQQQIQQMTVRKDKFHALEHNFGQALQENRAKLDEILRQHPTLNNIDQIIADLVALNDALKYQADLKNRIHDEGSLLMREDIASMPAIQESLLIMDKNYDSLQNEIADRIQKYNLISQALREYADSKDKFSKELKKAEDLYNAIPQQPRDETELHQASEKTRKTMEQLRKSKLSLDELERRGNNVGKLFSAIGEPIPQEVPQEVTAAKQHWQDLHDKTAKNAHVYETEAVIWSQIEDAKKDLLPWLSETNQGLCDAADNSIEIEFGPMRLSKYRTELPSYQALKDSIVEKTNDLVKINKGAEIPALSALNKLLSEQFAEVNNNADRLSAITTSFNDQEQELRRRSKEAGERVSKLREQLIKCDDMSGDNNKIMERLQQCRALRGELDNSGNEIDNIKQKVDELRNLYPTFSESIIPKELNNVQKRYENVDLYAKKIESSLLQFLKKFHADKVGMLKRIIATQREKVAWCQPESSSDKYNLDVKKSSLQEVSKSIDDCKARHAETLKSLEMLKAVESPQNLAELTSDAELLRKDMQALQDSFDQIKGILDENVDLWSQYEQSNEQISNWLRDVEGRVKAETSSQVNLSEVPQKLQELSILQQDVLAHEPIINNLEQTSQQLIEKNPEARIGQFVTHLVQRYQAVSKALTSYIDKIRGAQLSNANFAKAAKDFNEWFGDAKIEFQELARMGSPGSSSATAQQLQTVKNYIKTFDNGQILLNNAVDIGEALYPVVSPDNRERIRADLRQMREKFDYLRDEANAFMQQVEGVLIQKTSIEESYTQVSHYLNESKAKVPTTDELYPTLATKKAALQNYKTQLQEITLHKNALKQLHDKAVTLCDDESERKTDESIQEYNTLSKKISDRITTVGNHVVKHEAYDQVLEKAQDWLNTIKSEAIDILNETTFEKEGAEEKLLVVENLLQHKPEGDSIFDTCHKLLETVLTQTHPSGHPALLKGFEEPKQSWEDFMTLCQDSLVKLKQLCSKWDEFDTIIEELDNWMKNVEAVVKNQNLKSTAEAKNAHLKQLQDISKDIERRGAAINELMDQGREIEGETDLNLKLSRLNTRYQTLKNLCKESIAKYVNYVKDHESFDKDFDSFKQNLQSSVDELAKTNEIVGDQSVLQDQQNKLREMSDKRILDSTLFEGLIDRGEKLYGHTSPEGREIIRQQLRALRTLWDNYTDDLNSATQKIDQCLLQFNEFSIAQDQLTKWLKDVDKAMQSHTEPKTTLQEKRAQLQNHKLLHQEITTHNVLVDNVCDKAQILVDQIKDNSLNVYLTSIKQLFQSIVQKSDEILHNLDDCVQKHNELNNALSSAKTWISNEKAKLLECDDAYGEKADIKRKIETLGQLAQNKPQAMKIISDIRDLFEKVKATTSEKGNEVLDKEIEELETTMKSHFDDIEGIEGKQKDVLAQWDKFEKALEELTKWCRSAEAVFREQQLQSTLHEKVEQLEKYKIQRELILQKEKEIDAFGDAAHALLNNCGADRLKTLTTQITNRYQLLQVLSKEVVNRWSNLVDDHQFYQDKYNEVDLWLQPIESQMAKVLLDEPTQSSNILQVLLSEKEQAESLFAALNAAGEKALPETSTQGREKIRKDLRDIRDRWDKLDEGIRNLEKRQEAQGVQLSSYQDILNQTVNWLDQVEKLIHNENPASWTSAQEIRSKLYKYKATNQDINSHKRIVEAVNEKAAALLGSAAPANADEISKAVAEVNKRYDQVGQDCAKLVADLDGAFDVYQQFSELQKAQQDYQKNLWDRLTGYSDYSGNKAALQARLQKINEIQDALPEGVAKLKSLEDHIEQQASNIPARSKEVMARDLANLHADFEKFGASLSDVKSGLENRLQQWNDYEINLDRLITWLGEAENSLKNYNLKSSFEEKEEQLNGFQSLAQNLRQNEADFDKVKDDTSELVQSSGETRIAVNVQQVSSRFQSIQATAKEILKKCEQAVQDHGHFNDKYKQCADWLANAQARYDDCCDLSTVASRDDLLKKQVVIQELLAQQPTATQLLNSTVELGEKCYGSTATEGREAIRSQLDDLTFDQLFDNIAITARKIQDKIAKWSGFDEIADSLKSWLDETENALPADIELKTTLDEKRNKLQTYRDILNDINNHQVELGNLQEIAANLPEKTELVDQIIKDISDRFGKLQKRAQNYVERYEGIVSAHQQYSKAVMDAQEFIDATLNTVHYWGDLDLEQISLHTNLDRLKNLKASLADEFPRVDQVRALGEKVIPGTVDVGQVNIKSQIDTTQQEWESLLTTISSTIEAIEARLQHWSEYEQLRDQCLAWIRDTDNNLHAIDLKEDLPKKRAQLDALKALQGDVRAKELEVDNVTEKAQTLLKGPSSNRASGPELVTKYQQIFHKVKELNNRWQQYVTSHEDFDNAISDCSSWINEIKEKLDYCSDMSSMSPKELDKKLATIQDVILLKDEGSARVLKILEQAQHVLANTAPGGHEAINKELTDLQDLWSGIALRIMDVKSNLDDSITQWSGFLDQVQNVRKFNEWLDGQVKELSEHQTTMTEKRAQLDRVKSTEEKVRVEKIDVDALKIQAKEMIASGQQSQAAFQAQKVLDTFDELFAKTQKLLSHRQDQYRDHRLFKEAYDDLVSWIGRAREKFPSLKQSSLSDKLAIENAVQATEALLNKQAQGELLVEHLVHTGEVVLASTSAQGQEIIRNDIRALRDSFEGLFREINQQKENLEVTMVQWRAYKEEYERLMEWLQQIDILVKNHKLNLCPNLPEKEKQVADMKEVMSRLEKGKDDIDKFNASAASLLKSHLDTYVNNQLRHLSSVYQVQVNLAKDVLKKVETNRDQHREYDANMKSAKDWIANAKATIQSAGEGAGSKEALQRRLEQIQDLIRNRELGQNLVHTAINNGEKIIRNTRSDGRDAINTEMKELQTEWDRLVKKMSTAKVQLETNLLQWADYSSSYSQLQQWITDREAKLQQACEQKIVKSKRGQPGLSSGLSERKANLRQTNNIVQDIVSFEPMIQSVTSKASVLQQGAPGTEISDKYENLTKQAKDLYEKQKNTIESYQSLIDAGNEFATWLRNAKERLSKCSEPTGDKQALAEKTHQLKILQGELPEGAQKLKNALEQGEIACRSAEPEDCEIIEQEVALLQEEFDAYREALNKAKDYLEVGIVKWSDYQDQYTEALEWLSKTEALVQSYNKLQDSLIQKKVVLEQFQGHLQTLFDWQKTLDDLNMKAQVLLETCSDTRISNAIMQLTTKYNALLTLAKEVMRRLEMHYQEHQQHHSLYEECQSWIEKTREKLSECEQIPGTLNEVQIKLNTVKNLRQGFETGQNKLRYLLELKEKVIMNTEQNGAAKIQEDTEALKQDFDKLLVDLNDVRQKLANRLAQLEEIFKLYKILIEWLEDVEPSVKTSDEFLNDLSEKRAALEKFRVIQRDINGHNDIVEKINQRLKEDNSLDLKDFQPGLTKFDDLQTQVNKIIESLENQVNSHEKYKQAYNELQDWLRRTRIEVEQCADCHGEKDQVESRLNRLGDIQSSSLEGKALLEACEELSQAVIATSGSEGQDNVAQEIKHLTSEWETLQTISRDARSSLESCLAAWQTFLQKFNKINLWIETMNKRVTKSQEGENKTPEDLVNAKKLLEEVLAEKDNVEDLNDNCELLMEQSACTRIRDQTIETQANYTKLLTSAQGLVAKIEKNLSDHTEFLNYKKEMDAWIEKAQQVLDDCSTDGDAAIIAQKLDTVNSLASRLPEGQHLLALVQDAYSKASNITPEDKQEKLRELMTKVREDWDALGLAVKQKLSDLKQAQNRWNDFAANKDKLEKWLNETETTLKVAPETKGELSEMKTLLERYKTLSNELKLKGNELEQLQSEARDLGTEVDAVNRLQSRCDKLKNDCSAHITALEQEMFDYNAYHQSLQDVEKWLLQISFQLMAHNSLFISNREQTQEQIKQHEALLVEIQKYQTNLDDLNAKGQAQIKRYESSTPAIRPTVESQLKNIQDSYNSLLQTSVQIKNRLLESLAKFQEYEDTLDSIMRNLETYEPIIQTELDAPATSLELAQNQLRCAQEMQNKLNNEKSRLAAAVQACEAATASISRPSSPLETAMQAIPERELIVRAKLEDLLDQKPPPKTRSSTGGVSTDDDKDEADVEIQVELSDVNEALLDPIAHERVKNYRRIVRLNSAHVGKLNELVAKVQSHLGGLTASVSELEQQQKQRAELQDWVKKQQSSVSDWMMRPCKLRPEAAQQELVSMNDLLNSIGDKRSQLMLEMTGSLGDEDTDLDDNIDKLESELMDAIAKKQAGQNVIDGYRQGMADVQNWFDTLIKRMDVLDRGSGLNCAQKMAAINEIKNEYELQGHPKIQELKGKAAQVAEVISNLDGQQVEEQMKSLDRRFADLGKRIDRKSQLLDVTNKGVEGAKGEIDQLQNWVKQQIEELQAPKPLGYTPKDAEARQQKIKSLMKDAEAKQSLADVLEKRVANMQQELEPVEYSQLESALRNLNTENRNLSGVLKAELDRALEASKARKSLENDLDKARQWLKTKISEVRKLPVYHPLTSAEIEKKIQENRKYDDDAKQFNDSVLTDVQRQAANIMKDCDDADKAALQQILDEIAADYQTLKDESSKRGKSLDDLLQGRKAFEDSMKNMGDWLNEMETATEGELRTTSLPVLEEQLAHYKKLLSDAENKGGLINDVSEQGKSILPTLSNADKLKLNDDIKNMKDRYGRIKNTIDDRVNALGDHIKKYKDAKSRLAECSQFLGNIQQKLRELNRPIGSRIEDVQDLLGAYEGILKELKDSKSKMGDMQMDDLPELQSILAQQDDMIKLIEDQLAHLRQLLLLREQFIALINEIIAFIMKYTDVIIDIENSPDSLEDKINKYDDVIVKIQECEGVLASANDKGQKIASEGNAADKNSITEQLQSLKNQLQNLRKAVESQRQKHQLQLESHKKMAAELSEILDWLHSHEGAAKSRPLLDRDPESVERELQKHQSLSQDIESYLNKFNKINDGVKTEIGMPSSLLEMLSEGRSLVASLPHELEEREKYLKNNRDSRLEYMQLVAKFNDWVHEAELRLQNSQHGIDYEHLVQDLDEHKIFFGNEAPIRNLVHKQIQEAADKIWSSLNNYEQSELSAELAQFQTKLTNTLANAKTQQSELEKEAERWREYQQSIDRVKATIERTKFVDEPVQNLAGLHFNIQKLSHAIGNVQSQNSDLTLVNQQAQSLIRQADARNRQLIEQDNAGLNRSWQDLVRSLEQRRDNLQQLAEHWDGFENSLHAWEKALGRLEDKFRNVDPTVRSRRHLEDTKNAIQELREESNQLKSSHKEIEALSKSILTFLGEVHKPSAEAIQAKVDKLVEQQAK

SEQ ID NO: 40201 - DNA, 24789 bp, DROSOPHILA
gctgtcgcgtccgcggaactttcgtctgccttggatttcgttgttttttgggggggcagtgccatggtatggaatgtcggcgatgtgcgtcaaaaacgtttccatttaatgccctaaaagtgttgaaaatagtttttctcaaacgaaaacgaaaattacataatacctacataggtggagagtgcgatcggatcggattggatcggttctgatgtttggcaatatacgagcgagagcaacagacaaataaataaaccgatactactgggctacacaaaggaaacaagaaacaatttgaaaattctcgaactcggccaaaacgacagcgaaacaacaagttattagcgctcaacatcaaaaacacacgcatcccaaaaataaattggcaatcgcgttgttgtctagctagcgtttgaattattgcagtccgcggtttttcggcttttagtctattcgaatagctaagcaagttcaagcatttatttataaacattcgaaaatatttttgtcaattttcgctttcacataattccgattattgtttgttttcggtttattagtttattagtgcggcacataaacaaataactcttgagcagcaaaatgtttgcacgtgcaagctgagtaatttggaaaacgcttccgaaaacagggaatcttttatatttatatatcacagaattttaacatacatattcttggggaagacagatggtagattgatgactataggttaaaatctcatattcgttttgttttatttattccaaagaatccactttgacgtttttgtatttttcgaaacagatcgagtatttatataaaattaaagttggagcatctgtaaatgaaatgagagtaacattccgaggggcataaattgaaaattgcattaaattcaaacgagttctagtaatcgaaacgaatttcggttagttcaatctgcctttaaccgtaaccgattgcagtatcggttgtaaattaaacaaaacaaaacgccatgggcaacggatgttccaaatgctgccagtgcaatgagcacaagcaactcaacggcacactctcctcggcctcgtcggtctacaggaaaaggtgatctattacctgcaatgttttccatagggattcaagtgcttcattttgggcaaccttttgggtgatctaaccctaatcctgctgtacttccaggagccgaggtgagattcccattgaaaattccgatcgcttccgcatcacggccaccagcaatgccgtccagctggccgtggagcatgtgcagcgggaagacgccggccactacacgctgttcgcccggacgaagaggcaggatgtggtgcgcaggcacgtcgagctcatcgtggaggacagatccacgggcgacgatccgccggtgttcgtgcgccgcctgcccgacctatccgtcaaagtgggcacccggacacgcctcctaaccgaaatacgcagctcaacagatcttaaggtgagcatggagtccattaggtttcaaaatattctattatttagaactgcgtgttaatgtaacccatattgtattttaactgtttaactattttattgttttctagctaacctggtacagaaatgatcggagagtgtgcgcaaacgaccggatcacggaagtcaatgaaggcaccttccactacttggagattagtcccgtgacgctggacgacggtggtcagtggatgctaatggcggagaactttggtggacgcaactcctgcctgggaacactgaacgtcttggtgccgaaggcctacaaaacacccgaattcgtggaggaactgcgcgcagtgctcacggaacagggaaccgtctcgctggaatgcaaggtggtgggtgtgcccacgcctcatttgcgctggttcaaggactccaaggaaatcaaggccggcgacatcttcgccctgaccgccaacgcagatgaccccacctcgctgggcacgtacacgtgtgaggcgcgaaactgtatgggcgtcacctactccagctccaaggtgcatgtggtgggacgcggaagtcgagagggatctctcaagccagcggacaggtgagcagagatttcattactcatacgcactgttgccgttcattttttcaaccgttctaattgctctatttttggcttatttaaaagagcattaaatgagattctcgtgttgtacgaatgtttctatctttccgcagcgtggcaagcaatgctccgcctccgatattcacgaacgaactgcgagacatgagcctgctcatcggggagaccatcattctcggctgtcaaggtgagcactcggagtctagtgaatctagcgatgatctcctgctggcaccgggccaacgtatttttgtttatcttctctcgggcacttgggcgtgctggcgaaaattggtccaattctcgccggcgcttgttgtttttagatcgtgctctagaaacttgaactcgatcgcacgattcggaatgcctcgaatgttgaggtgggtcatcaacatttgcgatcaaaacaaaaccgctaattgcccgccagagagaagaaaaataatgacgcaaaaaaaaaaaaaagaatacatataacgagaaggctgagatcggcgttcgagcagattgtttacatgatctcacacctgatctttcctccattcccgcagtggtggtgccgccgtggccgaagagcgtctgctggtacaatgcgagcggacgagtggagaccgccgagcggtacaagctgatcgaggacggcctgggcgtctacatgatcgaggtgaagccatcggagtcctgcgatgccggcgaatggaaatgcgtggtgaccagcttcgatggcagtatgggcatttcaacgtgctccgttgccatggacagtgagtggagtggaatgattcagttttactagacctgatatttataaaacctttattttttttttagtacctaggaactatcgcaagcccaggttcatggagagtctgcgcgccgtgctcaccgaggagggactggtgtccttcgagtgcaaggtggttggctttccaacgcccgtgctcaagtggttcaaggatggacacgaactgaagccgggcgatgtctaccagctgacgggcaccaactcattgggcacctactgctgcattgcgcgtaattgcatgggtgaaaccagcagcactgccgtcctcaccgtggaggacattcagaaccagctgaccgacgaggagcgacttgtcttcaaccaacagaatcagaaccaagcaccaaaatttctaattggactgaaaagcacggatgctaagatcaacgaaccctttcagttcaaggtggtggtgaaggccacgccgaatccaatactatcctggttccgggacgagctgcccattgatccgaacgaaagatataaccattatcggggtgaaaacgaagactggctgctggacatcaagtccgtggagtttgttgatcaagcggagtggaagtgcgtggccgtgaatgatttcggcaccagcatcacttcctgcttcctgaagctgcagatcccgcgacactacaagaaaccccgcttcctggaatgcctgcgcgccgtgctcactgaggagggagccgtgaatctggagtgcaaggtcatcggagttcctcagcccgcgctcaagtggtacaaggatggggtggagctgaaaccgggcgatattcaccggattatttctggacaggatggcacctgctgcctgggcacttacacgtgtgaagcgaagaactgcatgggtatcgttgccagttcggcctcgcttctgggctttgaggatgcccaaagaagtcagcagcaaaagagcgagcaactgcacgaaaatgagttacaaagaaattactccctgtcaaccatccaggaggagcgcacctcccagctgtacgagacgccagtcggagacataaccatcgatgaaaagggcgacgtgtccttctccttcgacggcaaggaggtatcggtttcgctctacgagactcccgatcttacggaggaggaagccctaaagattgtcgaaatgtatgccgatcaaatctcggagcatgttactgagcacaacatcgtcgaactgccaccactgcgcttcgtcaaagagacctcgcaatcgggaaaacttctgatggaagcggtggtcatcgacatttcacctgaatactttacagtcgaggacgatatgcgaactgaggctgatatggatgacatttccataaacgagatcacggtacacggctcttccggaagggaaggccgagtggaccgagagactgagcagtatgttcagcaatcctttgacaaaatggaggaggaactatcgctatcagcgccaattcgaaagcgaaagaagtccaagcccacggaaacggatgagttctttagcttatccaaagcgtccggcagtcaaggtgatgaggagacatcggaattgcaaacctttgccagtgcccagatgtccgcatcacaaaaagcagcctctggtgcacaagctagtccggagaaggacaaggattcagtggcaccgccaaagcgtaaaaagtccaaaaaacccacagataccgattcctcgaagacaacagaggatgatgctcgtctgcaggatatatcgggagcagtgggagacggactaatggtaactcaatcctcccatgccaaggttgtttccgatgagaatgagatcaataaaaatctgattgccctcgttccgctcgcaaagttgctaaaggttatcgacaatcatttgagtgccgtcgagaatgaagtgatggaacagtccaccatgatgatgactccgtcggcagcggatcagagcatagccatcatccgcaacataatcgagcccatcaagcaaatcgaatcgaaattaagagtatactctggcgagacccaaatcgacgccctcatccaatcgatggatgaggatattcgacgactgcacatgggtctacaggtcattgaaaagtgcgtggagatcgacgagactggagccacgctcatccaacgcaccagtgtctgtatcattgacagcgtggccgagcaaatgaagagagcgctggaggagctgaaaatcgttagtaggaagtttgaatcggagtgtctacgagcccaaatcgaactgactgccgatgacatccaacagggattagagatcacgcagggcacaattaaatcacaggctcttctgcaggaggcgcaagaactggaggcagcaaagcatttttcggaaacggttgaaaaaatgcaagaagtgcccgattccatgtcctttgccaccatttcggaggccaatctgcccagcgaagcaagcgctctaaaggatatttgtcagccggtggcaaagatacaggaagccctagagcgcgtcgaaatggaattatcgcttgaggagtccgaggagcagatctacaagaaggtgcaccagaaggtgctggagagcattgtggagccgattaagcagctgcaatccacactgcagtccattgaagataagactgagtctctcgcaggatccgagtcaattgagcagaaaataaacatggccattttggatatcgttacaccccctcttttcgaactcaaaaagggtctagaagtaatccttaacgaaaaatcaggaagtgtggagggaggaatgcggacagttagcacagtggaatcgatggtgccccccttgcaggagattcaaaatggtctggcgcaactgggccaagaactgcaaagtggtcaggactccgtgcctcaggagcaactgcgatctgagccagtaatgggtgttgctgatacccagaagctcttacaatcatttgcccaggctgtcttacattttgagacgaacatcgaaaggatctctgcccgactatctcccaacgttaagatccgcttgctgaacctaaaggatgaactgtcagctctaattggcgcaattttggaaagagaaattaccggacatcatgtagaattgctggacagactaaagcggcccgtcgacgagctaaactactgcatccgtcagacagaggtcaagaatatgactggatctttggccgacctgattgaaccactgagtatgttacaggagaacacccaaaaaggtcaccaacgcttgctagtcgctcgggaacccgatcagcaggctcttcagaccctggacaacatacgcagtcttatccgcaacgtggtcatcgatatagaagagcacgagtttaagatcctacagcaagagattcaacaggatgaggagcaagcgtcgcagcagcaggacaaatcattcagcgcgctgcggaaagtgctggagaccaaggtgtccctggaagaagctgttggtaacatagaaaccctgcaggaagcgttaaacaaaattagtgaaaacccaaaggcttcggaacgagtgaagagctcctcaaacgaagcccaagtgtatcttcttcgtattctgcaaattgctaaaggactggcgacatttagcgaggcagaaacaacactcgacgtcaacgaggccaatacgactagaattcttttcgagtgtggcaaaagttttgctgacttggctaaagccctacacagtcccgaatctttgactgagagtgagttcataaatgcactgaatcagtttggtgacattgttggccaacagaaggagtcaatggatgaaaagctatccattgccagtccgctctccagtctgattcatgtgctccaaaatctgaagcccccgcgagcttcaatggaggatttatccaccttggatgatgtgtcagtgcttaagtcagtcgcagagtctttgcccactgatccggatgtggaagtgcccaaaggtaccgagaaaccatcgactgttgctgtcctactgtccgatttgaaccagggaatcacctcggttctttcgcatagtgaagatcctgacgtggtttccctatcgggaacagctgcacagcaggtacaggcagcccttgttaagatgcaagagctgcaaagtagcttggcagtggttcaggaaaccaacttggtggaagcggctcattcgatgtcagaggccagtcaacagggaactttcgccgaggcgctctgcagcttggaacgctgtgttcttcaggtggaggagtgtatggcccacagtggcgtcgagagtttgaccgatctcgaactgtccaagctcaagactttggccactccattgcacgatgtgaggcaatactgcgagcagatcgatgtgcaacttttggaaaatgtcattgatatatctacacacggagatatctctgaacttaagagcagtggtcatcagcaaaccgtatcagatcacatccaggaagtagccgttgtggaggaagagccccaagtggaggttttcgatatacaacaaggtgtcgccagtggcatcaagcaattagaagcctgtctggaagttacccagacagatgccaataaagaacttcagcaagttggcaaaataatggagcaactgaagtcagatctggagaacatacagatcgcccttgtcactgataccgtgcaacaggaaaccgttctggcccaagcgcaaatagctcgcaccatgttcagattgaaggagtgcttggtgcacacgtatgaatctggcttggtggactccttggagaacgtagagagtgcctttgaagacatactgctttcgttaccaattctggaaagtcagttggccgaggaaatgtttgccaaaatcgaaaaggcatttgctaactttgttgcgtactgtgagcgtccagaagctgtggactatcaaaaattgaaaactctaaagcaacctattgagaatctagtgggttcaattggagctgtggccgcgcagcccaccgtagatgtcgacaaatcatcttcggttgttgttcagcttcagactagtctaatggctgcttttcggtgcataaacgatgtcagcgagcagattagtaacgaagtcttaggtggtcttttgaagacacaaagcagcttagtggctgtctttgattttattgagggcaatgacaatacaattcgtgtcatagaacttctacaggaaatggattcgatcactgcggaattgaaggcattgtccgaaattcatgttgaacccacagtgccaatcgatataggcataattattgaaaacgtttcgtctggaaaggcgttccttaccgaaatcgaggaaggacttcgagttaataatccgacatgtattcttttgctagatgaaaatacagacgatatcgctcagctcgaggcaactcttgtgcaaatcgagaaagaaatcctttctcaaccgcaactcagtcagataaccactaagcagtttgctctcatagatgcactgcagctgcagatcagtaatcttcaggaaaaacttaacaaactgaacgtgtttctttccgaacttcaaagtcaatcggatgtctcctcacctgaatcagctttggatactgacatagatcttaaagaaggatctggaagccaggaagacattgaacccgaggctaaaagacccaaaatgctggaatccgagcaacaactggattcttacaaacaaaccgaaactcaagaagaagtgcctaaggaaacggatgatgaaaccaagaaagatattgaagtcgaatcaaagctagaaaaccaaaatgagttggttgctaaaaaagatgaacagaaggcagataaagtatccgaacaagaaaaactccaagagagtaaacaacaaacagaggtggatgatacgcaaaaatcaactgaagttgtatctcaaaaagcatcgcctgaaaatattttggaagccttatcggaaaaattatcccaatctccaaacaatgctacgcaaaatgatgaaattaaaacaatcatgacagaatgccaagatattcttgataatattgataatatcgaaaaagtttcaaagtctatattcaagttgagagagcacattgttcacacctttgatggcaaaccaccagaggaacagaccgagaaggaacttgttgaaaaacttattgaatccctcttcgaatcctgtccagaagccactgagcacgttattcaaacctacataaaagaaattaaaaccaacattattttaacaaaagcggcaattcaacttattgacgatagcaacttgttcacaaagccgtctctgctagttcccaaactggtaaatcttgaaaaactttcagaattaactcaaacggtgaaacttattgataagtcatcgaaagaaatgattggcttgcaacagaatttaatggatatatttattatacttgatgaccttctggatgaaagaacagaaaaaattaatccgaaaatagagaatataaaaaaaatattgctgagtgaatatgactatattgagaaaaaagaaggacaacttaatactgctgtggttaatggaaaaattaaattaataactgaaaagattcttgacatttgtgaagagttcaaacaaattattgaaagtcaaaaccaaaataaggatgcagcaggagatatcaaaaagtctgaaactgaagatgttgttgaccattcaatagaaaagaagattgaagaacccaagagatcagaaaaaaaagacttggataaggaattcctggaagaaaaagaactaaaggcaagtgcgaaaaagcaaggtgatcaggatatcgaacagaagtcccagaaaccagaagtatctgaggtcgtagctgagaagatatctgaaggaaagattgaagaaccaaagaaacctgaagaaatggacactgaagctaaatcagagaaagctacagtcttggataagcaagtcctggaagaaaaagaactagaggctagtgcagaaaagcaaggtgatcaggatgtcgaaaagaagtcccagaaaccagaagtatctgaggtcgtagctgagaagatatctgaagaaacaattgaagagccaaagaaacctgaagtaaaggacactgagattaaatcagagaaagccacagccttggataagcaagtcctggaagaaaaggaactagaggctagtgcacaaaagcaatgtgatcaggatgtcgaaaagaagtcccagaaaccagaagtatctgaggtcgtagctgagaaaatatctgaagaaccaattgaagagccaaagaaacctgaagtaaaggaaactgaggttaaatcagagaaagctacagtcttggataagcaagtcctggaagaaaaggaactagaggctagtgcacaaaagcaaggtgatcaggatgtcgaaaagaagttccagaaagcagaagtatctgaggtcgtagctgagaagatatctgaagaaacaattgaagagccaaagaaacctgaagtaaaggacactgagattaaatcagagaaagccacagccttggataagcaagtcctggaagaaaaggaactagaggctagtgcacaaaagcaaggtgatcaggatgtcgaaaagaagtcccagaaaccagaagtatctgaagtcatagctgagaagatatctgaggaaaagattgaagaaccaaagaaacctgaagaaaaggaaactgaggttaaatcagagaaagctacagtcttggataagcaagtcctggaagaaaaggaactagaggctagtgcacaaaagcaaggtgatcaggatgtcgagaaaaggtcccagaaaccagaagtatctgaggtcgtagctgagaaggtatctgaaggaaagattgaagaaccaaagaaacctgaagtaaaggaaacagaagctaaatcagagaaagccacaactttggatatgcaagtcctggaagaaagagaactagaggctagtgcacaaaagcaaggtgatcaggatgtcgaaaagaagtcccagaaaccagaagtatctgaagtcatagctgagaagatatctgaagaaaagattgaagaaccaaagaaacctgaagaaaaggaaactgaggttaaatcagagaaagctacagtcttggataagcaagtcctggaagaaaaagaactagaggctagtgcacaaaagcaaggtgatcaggatgtcgaaaagaagtcccagaaaccagaagtatctgaggtcgtagctgagaaggtatctgaaggaaagattgaagaaccaaagaaacctgaagtaaaggaaactgaggttaaatcagagaaagccacaactttggataagcaagtcctggaagaaaaagaactagaggctagtgcacaaaagcaaggtgatcaggatggaaaatctcgagatgatattattaaaacattgaaagaaaggctcacagaattatccaaggcattaggatctagtgtcgatgaaattttgagagaaagtcgggaaattgtcaataaccttgaagatgataaggtagtggcaaaacatttattcaaattaagagaccatatagttcacacctatgacggaaaaagaggagaagaaaataaagaaaaagaactcttcgaatcctttattgaattgttgtgtgaggcctcccctgaagcagctgagaaagtaaaactcaactatcttaaggaaattaaaaccaatgtgattttaacaaaagctactattcaacttatcgacgactctaacatgttcaccaaaccgtccttattaatccccaaacttttaaatttggagagagttgccgttaaaattcaatcagaaacatatgttgataagtcatcggaaaaaatgattagtttgcaacagagtcttatggatattttcgtaattcttgatgactttttagatgacgagacggaagttttaaaaccaaaaattgaaaatattaaaacaacgttgctcagtgactatgattatattgaaaaaaaagatggacccctcttaacggctgtaataaatggaaagattaatgttgtatcccaacatatcttaactattattgaagaagttaaccaattgactgaaaatcatgatcaaaaggaaaaagacgtgtccaacgcggaggcggataatttcgccgacgaaaagcgagaagaaagtcaaaaggaggagattaaggactctgaagcaaagcacaagaaatcgaaggtttcggagaagaaatcaatcgaagaagagaaacttgaagacaagaaagaaaaacagacagagtctgctattgatgaaaaatcccaaaaggctgaggtgtccgaaactgtctccgaaaagattactgatgagaaggcacaagaaagtcaaaaggaggaggttaaggattctgaagccaagcctaagaaggcaaaggtcttggagaagaaatcaatcgaagaagagaaacttgaagacaagaaagaaaaacagacggagtctgctattgatgaaaaatcccaaaaggctgaggtgtccgaaattgtctccgaaaagattactgatgagaaggcacaagaaagccaaaagaaggaggttaaggattctgaagccaagcctaagaaggcaaaggtcttggagaagaaatcaatcgaagaagagaaacttgaagacaagaaagaaacacagacggactctgctattgatgaaaaatcccaaaaggctgaggtgtccgaaattgtctccgaaaagattactgatgagaaggcacaagaaagtcaaaaggaggaggttaaggattctgaagccaagcctaagaaggcaaaggtcttggagaagaaatcaatcgaagaagagaaacttgaagacaagaaagaaaaacagacggagtctgctattgatgaaaaatcccaaaaggctgaggtgtcctgaaattgtctccgaaaagattactgatgagaaggcacaagaaagccaaaagaaggaggttaagggttctgaagccaagcctaagaaggcaaaggtcttggagaagaaatcaatcgaggaagagaaacttgaaaacaagaaagaaacacagacggactctgctattgatgaaaaatcccaaaaggcttgaggtgtccgaaattgtctccgaaaagattactgatgagaaggcacaagaaagtcaaaaggaggaggttaaggattctgaagccaagcctaagaaagcaaaggtcttggagaagaaatcaatcgaagaagagaaacttgaagacaagaaagaaacacagacggactctgctattgataaaaatcccaaaaggctgaggtgtccgaaattgtctccgaaaagattacttgatgagaaggcacaagaaagtcaaaaggaggaggttaaggattctgaagccaagcctaagaaagcaaaggtcttggagaagaaatcaatcgaagaagcgaaacttgaagacaagaaagaaacacagacggagtctgctattgatgaaaaatcccaaaaggctgaggtgtccgaaattgtctccgaaaagattactgatgagaaggcacaagaaagccaaaagaaggaggttaagggttcttaagccaagcctaagaaagcaaaggtcttggagaaagaaatcaatcgaagaagagaaacttgaagaccaagaaagaaaaacagacggagtctgctattgatgaaaaatcccaaaaggcttgaggtgtccgaaattgtctccgaaaagattactgatgagaaggcacaagaaagccaaaagaaggaggttaaggattctgaagccaagcctaagaaggcaaaggtcttggagaagaaatcaatcgaagaagagaaacttgaaaacaagaaagaaaaacagacggagtctgctattgatgaaaaatcccaaaaggctgaggtgtccgaaactgtctccgaaaagattactgatgagaaggcagaagaaagccgaaaggaggaggttaaggactctgaagccaagcctaagaaagcaaaggtcttggagaagaaatcaatcgaagaagagaaacttgaagacaagaaagaaaaacagacagagtctgctattgatgaaaaatcccaaaaggctgaggtgtccgaaactgtctccgaaaagattactgatgagaaggcacaagaaagccaaaagaaggaggttaaggattctgaagccaagcctaagaaagcaaagattttggagaagaaatcaatcgaaatagagaaattggatgaaaagaaagaaaagcagacggagactaaggttgccactgataccaaatcccaaacggttgaggtttccgaaatcgttttggaaaagatatcggaagaaaaggcagaagaaagccaaaaggttgaacttaaggactctgaggccaaatcaaagaaggcaaaggtcctggaaaagaagtcaaccttgaaagagaaactcgatgagaatgataaaaaacagaaggaggatggcgctactaacaaatcccaaaaggcagaggctgctgatgttgttcccgaaaaaatatctgaagagaaggttgctgaaataaaaactcctgaacctatggactcaaaggctaaatctaaaccagatggattacctgccgatgaaaagagtcacggggctaaggtttctgaatctgttcctgtaaagaatgaagctgagaaaacagatcaactttcagcaaagaaaccaactgttctggatgaggatctggttgttccaaaacgaaagccatatttggctgaacaaactgcagattctattagcctgcaaacgtacaagtccatggactccgagtacaaggaccgaaaggaatcccgaagtgccaagcggaagcccacggttgacatccaactaaccaatcgaaacacggcgtctggcagcgacctcaagctgacttgtggcctatcgggtcacgagatgaatgtgcaatggttcaaggataattgccccatcgagaacggtgccaagtacaggagaacattgaacgacggactgtcgtgccttgaaatcaaatcggccgaactgggtgactctggcatttaccgatgcatagcgtccaatcaaaatggagaagtcgaaactagctgtcttgtgactatatacgaagcaccttcaagtaaatttggcactccgcccatatttacacgcaacattagaggtaagtgccaattgtgccccatctacctagtgatccaatgcccgaatttcaaacttaattagtgctgcattgctttgaattcgcattatgcaccttgcatttgcatctctagctatatgtatatatatatatatatagtatatgtgtgtagtatagagctagtatataggaaactagtttgtaaggctagaataagtcgcgttctttatgatatgtcgggcgtatttacttgactaacaaatcggttcgcactttcggttctcaaatatggcaagtgatcaatgattaaggtaaacgatgcactttatcatcgcatttaaatagatccgcccattaaaaatagctaattcaattcgaatggatgcggtgcttacacttatataacttcgtttactgtctgcattcaattaaaaagtgcctgctacttaaatagaatcacattttggcaaatcaatgttgcatgcgtgtgtatgtgcgacatcggcagcgaacaaaacagaattcgtaaaattgtttttagcattaacaatcgattttgggggactaggatcgatcgattcgagaagtgggaatgtgttttcgaaattttcaccacgttcggtgacagtcgtgaatcttcttttgcatcgaacggacgtctcacgtcctaaaaaatctcgatcgaaccgttgcgggctatatatattgattatcacagtcatatacatatacgactcggacggataaaattcttttcggttctcatttacgaattatatccttccaaaaccgaaagagaccgtacgaaaacgatccgaaatgggagaaaccgagaacggagatatcgagccacgggcctccgccgaaccggaggcggcatccgcccaggatacgctgcaggtgccaacgcaaaagaagcgcaagcttaagtcaccaactccaggaagccttcgcggacgcagtgccacgcccattcatggccggagccagactccgtttacgctgtacatgacgcggcgcagtgccacaccttcgacatggcgcagcataactccgttcctgaagcgcgaggagaaggagaagacaccattcgagctgggaagggatatcaagagccagaccacctgcaacatcgccgtcttcgatcgcgccctcgttatggatatttccgagccgttggatgtgcaaaagcccgtgcgttacataacttccgacttgtcggtaatcgatcgcgctgccgtaatggatgtgtccaacgttgaggttatctacgttgtggaggaatacgaggaggtcgaggaggaggaaatcattgaggaggtcaagccaaagaagaaggagaagaaggctaggaagccgcgtgcccagcgcaagtccattgacaaggacatgagtccttccggagccgaagatggcgacgatttgggtgactttggcggcgatgacagggaggatagcgttgacctcgacgacggcgatgagccggtgaagaagggcaagaagaaggcaccgcccaaaaagaaggagaaaaaagagaagtcgcccagtccgaaattgaccttgaaactggagatcggcggtggccagaaggccagcaagaagatgttcgagcaacagcagcagcaggccaagccgccgccaaagaagagcaagatggtgctccagatggaggagcaggcaaaggcagctgccaaggccgccgaggaggcagctgctagggccaagcccaagggtgagacctttgaggagcgccagaagcgtctgcaagccgaaaaggaggagcaggagcgcctggaggccgagcaacgggcccaggaagaggctgaggcggaggcagaagcggaggccgaggaagacgaggaggatccatctaatgtcggcgaggagggtgaagaaggcactgaggccggatacggagatgaggatcaggaacaggaatatcctgaagacgaaatcgaagccgagcctgaagaggataccaagaaaaaggaaaagcgtcgcggcagcgactcctcggacgactttgtccgccccgatccccacgaggaggagcgctggcagcgcattgccgccgtcgagggcgaggagttcatgcagcagatgcgcaaatatagccaggccaagcggatcagtgagaaggagcgcgacgccgactggcagcgtcgccgggagcaggcccgcaatcccaagttcatcaatttcctgtctgaccgagccgttgaagccggtcaaagtgtgcgcttggcctgcgccgtggatggtccggagttgtcggttaagtggtaccacaatcgcaagcagctggagcgcgatggctgccatcgcatcatcaataacaataacattctggtgttggaggtgcttaacaccaccatcttggactccggcgaatactcgtgcgtgatctcgaaccagaacgatgagacgagctcgtcgtgcattgtgaccatctatgaaattttcaaggacgaacccaaacccccttccattcagtatatcaaaggtatttgtcgggatttgtggcgattgctgaccaccctaagtgcttaaaaattgaccatttcagagtactaccatctacgtgacgatgagctgaccatcgagtgtcacgtgcacggctatccccggcctgtgatcacgtggtggcgcggctgcttccaggtgaagcccagctacaagttcaccatgctggaggaggcgcacggtgtgtgcaagttgctcatctacaagccgggcaacaaggatggcggcatctacacgatgaaagcgatcaattccagtggcgaggtgcagattaaccatacggtcgaggtggcccgtaacctgcactaccacgtacccggcatcttccatgcccgcgacaagattcagctagacagtttgaagcaggccaagaaggccatggaggcggcccttaagtcgaaggccgactccgatcagaggcgtgcggaggcggaggaggagcaggcgcgcctgcatcctgtcaaggccacgccggagagattggtgcccgccaagcagaagctggcctttgccactcagctgcgcgatcgcatggcgctcgagggctcaactattaagtttgtggccactgtgattggacccgatccaaatacccgctggatgaaggacgacaagtgggtggttgtgggtggcaatatcaaaaacctgtccgaggagggcaaggccatcctggaggtgggcaacgttacatccgccgactctggcgtttacaagtgtgtggccaaaaacgatctcagcgagatcgagacatcctgctacttcaaggtgtacgcggcacaggcggatggcgatgaatctgaacccattttcgccctacccctccgaggtatttcaaccccattctgtagatatgtgtgtgtgtgcactgtggccaagtgttatcgcttacacgatcctcaaaaagacccatgtacttctgtgtgtccgacgttcggtgttttgttgcaattgaggtcgatcgcgtacgaaaatagccaaattgattgattgactttgttctcagatgtgtatcatgcctcgcagaacgatctgattctcgatacgaaggttcgcggcaacccccgccctgaaatctcgtggaccaaggaccagatacccgtggtgctcgacgatcgtgtggttcagatcgagcatttggacggcatttgcgagctgatcatcaacaagccgacgatcaatgacaacggaatctatgtctgcaccgccaagaacaaactgggcagtcagtcgaccacccacacggttgtcgtcgacaccacccacacttcgcgcagatcgagcatcctgtctgccattgctatgcaggaaggaggaggaggcggagagtcagccgatgccaaggccaagggcaagaagaagaagaaggaggatgagcccgaaggtggcgatggtggctacgagcgacgcagccgaatgccggatccttcgcccaaacagatgttgtacttcacggtcaacctgtccaatcgctacgtggccgagggatccaaggtcaagttgcaggctgtgatcggtggaccccagccgatgatcaagtggctcaaggacgaccagaatgtaacgtatggacccaacattcgcaacatgaaccgcgacagcttggcggtgctggagttcaccaatgccaaggtggaggactctggaacctactccattgttgcccagaatgagtcgtgcaagatcaccacctctgccatgctgcatgtgtacgagaccaaggtcaatacggatgtgcaacccgtctttatacgctctctgaaaggtaagatattgggtatcggatgagtgttcgtaatcgatcgaatcatctataattagcagtgtgtataattgtgcagtgccattgactgcattcgttatgcaatgctattttggcaacgtttttatgtaaccagtctcggtgtttctctctctcagagacctatcacctgaacaccaacgaactgatcctggagacagctgtccggggtcaacctacaccggcggttcagtggtttaaggacagcattgaaatccagagcggcggtcgctttcagatcatcgagcaccaggacggcacctgtgagctcatcatcgatcgaccggacaacaaggactccggcaagtatgttgtcaaggcggaaagtcgcgccggcaagatggagatctcgcactatgtgctctttgagggtcaatcccatcacattgccgaaaatatccatggtgtgttccatgcggacaagagcctgttgcgtccgaaggaggtggagaagccggtggaaaagaagccggctcctgctgccgaaccggaatccgaggctgaggacggcaaggcgaagaggcgtgccaagaaggaggaggacgatggagcctcttcggcctatgccaccgactacgcctccgataccgccagcttgtcaagcaagcgtcgcgagaagaacatcgctatccacttcagcacctcgatgagagatcgcgtggtggccgagggatccaaggttaagatttcatgcttcctggaggccaaagagccgcaggtcaagtggttcaaggacggcgagcagatccaaaactcacccaagatcaggggtaggtacagtgagggtctgtgtctgttggaggtcatgagcgccacagcggaggacaacggcgagtacaaatgctggggtcgcgacgagactggagaagcatccacctcgtgccgactggaggtttacgagaatcccggcactggtgatgttccaccaacctttacgcgcaacatcaaggacacgatgcacggcaagatcaacgagctccagctggacgtccatgtgcgcggtctgcccacgcccgccgttacgtgggtgaaggatggcgtcaagattgagaacagcgacaagtaccagcaggttgaccacgatgacggcacctgtgagctgttcatcagtcgcccgaaggcttcggatagcggcaagtacgtttgccaggcggagaatcgcgagggcaagaccgagattgtccacatgattacagtggagccacgtgttagggcacctcgcatctcgccgcccagggagggcagacctccacgtccgagcggcgatgaggaaccagccgctgccggagaggaaggtgccgaaggcgcagctgatggtgagggtggcgagaagcgccgcaggaagcccaaaccggatgaggaggagcaaaccagctccagacgcgaggtaccaccacctccggatctaagaaagcgtttgtacttccgcaacttcctgtccaaccgaaccgtgaaatcgggcagcaacgtcaagtggatggtgaacatcgatggaccggagccaactgccaaatggttctttggtgaccaaccgatcgccttcggaccgaggagcaagatgtccatgcaggacggcatcgcctggttgaacctcgtgggcgtcacagaagaggatgccggagaatacactctacgggtcaggggtagcgaaaacgaaatcgtgagcacttgcaatttgtttgtgtacagcacaggcaaaccggaggtgattccgcccacatttgtagtgggcatcaaaggtaggattctcaatgtgctggcgggaactgtctaactgagtgcgtacaggtgaatgtccttgtatctatgagctaagtgtatccgtattcgtagtcctaagattactttaagagaactaaccgccttttaagccaacttcctaaacctcttatagtgccttgtcttatgtgtcttgggttgtgtctctctgtctctgtccatgttccagatgcatatcattcccagggtaaccagctcacattggagtgcaaggtatctggcagtccaaagccacatatttactggcagagggataataccctactgcccatcgagggcaccaagtaccagtatgaggagcaaagcgacggaataaaactcctaaccattaacaactttggcagcaatgattccggcttgtacacttgctatgccgagagtgaaaatggccaaatgaagatcagcaaatttgttcaagcctctgattatgttagagagagaattgccgataagaaaccgattgacaaggtcatccaggagatcaaacgggatgaatcctccagtgccgcggcgaacgatactgcagctgccaaggcgaaggctcgggaggcaaagttgcgactaaatctggagaccagcctgaagaccatgaccatcggaagtggtaacaaggctcagctcatctgctatgtgactggcatcatcgaggatgttcactggctgaggaacgacgagcgggtgacgaaggatgcccgccacaagatctacaacataaacggagccattagcctggaaatctacgatgcccgggtggaggacagtggccactacagatgcgtggtgaagaacagccggcagacggtggaaagtgctggccagctaagtgtgctggatcagtccacgggaaagttgccggaaagcttctccagtggtattataggtaattactaaagcatccttaaccatacatcatctaacctttttatttggttccttttagaatcctacgatgaccagcgtaatgagatcgtgcttagttgccaggtgattggacgcccgagtgtcagctggatgcgtgatgaccactccatttgcaacaaccggtacagaacaatagaagaaccaggtggtgtaagaaagctggtaatacgcaatcccatatcctccgattgtggaatcttcgcctgctatgcagagcacgaggatcggattgactccactagcatcaccatcaaggcggccgatcttaagcgcctgattaacgtcagtcaggaggagattccaagcattggtgatcatgagagcacgccttggtcacgtagccagtcgcatttgagttccggtagccaggttaacggcaatggagaacttcatcgagccggtgatcgtgtcctacgcaacgtgggcaagggaaagccactcttccacactctattgcacgatcgcactgtttcggagggagccaatctccggctggtctgttccgtatccggagacgagaatacccacatcgagtggttgaagaatcacaaacctttgcccaggagcgacaatcgctatcagacagtgtatctgaatggagaagcctcattggagatcttcgccgcggtggccgatgatagtggcaactatacctgctgtgccaccaacgattttggagagagtttaactcatgcccagctgcgggtatataaaaacttcaaggaagccccattgccaagtacttttacgcagccaattcgaggtattacccgtctagaagaagctacggattccatcttcgcttgcacatccttaatgttttctaacttctgttggccccaatttaaattgaaagaaacctacttactaatccttaccctttgcagacacatattctctcaacgagaatgagttggttctggattgtcgcgtacgtggccagccgcgtcccgaaatccaatggatcaagggcacggaacccattgaggccagcgagaagttcaagccgagcgatcaggccgatggctatgccaagctggtcatcgtgaatcccacagagaaggattcgggcatctattggtgcgtggcccgcaacgagggtgcggagaacaagatctcccatcaggtggacttcaagggacgccagcactactcgctggagaagacgcacggattcttccatcgcgatcccaacaagccgcacttcctgctgccgttgggcaatcagacggtctgcaacggtggcaccgtggccatttccgccgaattcatggagaccagcacacccatcgaggtcaagtggcttcgcgatcgcagggtggtggatggacccaatgtcaaggccctggccgatcgcggtgtctacacgctgaccatcatgaatgccggtcccgaggtggaaggcacctatacttgccgcgcctccaatgcctttggtcgcatcgaatccaatgtcaacgtcgatgtggccgtcggagctgagaaggatgagcgtcctccgctgttcctctcgcgaccggataccgaaatgaagatcgccgtcggtgatcccttctcgctgtccttccgcattgccggcgatccgaaaccaaagcgtaagccggatataccaacgatggtgtgtaggtaacttctgatgtacgattcttgttttgcagtgaccttcatgaagggcacgaaggacattacccaatcggatcgggtcagcaaagaggtgtccgatgactacacaagattctcagtgcagcaagcccagatctccgattctggcacctacttcgtggtagcccgcaacaactttggcaccgacaggatattcgtcactgtgacggtaggctgcgtgtctatatatgtgtccttatgcgatctatacactatatgatatatgctatatgctatatataccagttgatctgttgctcgtggctgtccctctatcgctttcgctcactaaccactgcaattcgttctctcttctctgcttctctaattccagattaaaatacccaaaaagaaagaagaataaagcttattaatacaatacaatttattttgcaaatttcgaacgcctccctcttcaagcaagcaccaaatacaaattacaattatatcatacttagcccacctcagtcttctttcctgaccctatgtgttcactccaaccaatacaatatatcgttctgactacaaaacttataggtaaatccgcgcgctcgatccgcgacgccaacgcaaccacgatggggtcttcccctggacagctatagcgacacctcgtacttcagaggtaaggattgtgtattccatttgggttataagataacccgtatcatgtgtagactccttcaatgtccgttgtgttccgtgttgtccgtcgtagtgtccgtatgtgtcacttaaaaccaagcccaatcctcatttgcaatcatcatttgcagatcggttcaatcgccccaacaaaccacaagctacaaaagaaatttcctgtgagatcgtagatacccaacagatacccatgaactattcctgtatttatcttttgttagtatttctgaacgattgacttaattacttttattataaataatgtattatataaagcacagcaatccagcttatacatttacgtagtggaaacaagaaaataaaaaatatttctccggggcgtaaagagttttacttgaggtcacctaactatccacgcccaatcccatttgagcctcattcatttatcagttttctctcatccatccctcagatccaccgggttgcatatccaccgagccactggtcgtggattccggacccactcacatctcgttgtcgtgggg

SEQ ID NO: 40202 - DNA, 12777 bp, DROSOPHILA
atgggcaacggatgttccaaatgctgccagtgcaatgagcacaagcaactcaacggcacactctcctcggcctcgtcggtctacaggaaaaggagccgaggtgagattcccattgaaaattccgatcgcttccgcatcacggccaccagcaatgccgtccagctggccgtggagcatgtgcagcgggaagacgccggccactacacgctgttcgcccggacgaagaggcaggatgtggtgcgcaggcacgtcgagctcatcgtggaggacagatccacgggcgacgatccgccggtgttcgtgcgccgcctgcccgacctatccgtcaaagtgggcacccggacacgcctcctaaccgaaatacgcagctcaacagatcttaagctaacctggtacagaaatgatcggagagtgtgcgcaaacgaccggatcacggaagtcaatgaaggcaccttccactacttggagattagtcccgtgacgctggacgacggtggtcagtggatgctaatggcggagaactttggtggacgcaactcctgcctgggaacactgaacgtcttggtgccgaaggcctacaaaacacccgaattcgtggaggaactgcgcgcagtgctcacggaacagggaaccgtctcgctggaatgcaaggtggtgggtgtgcccacgcctcatttgcgctggttcaaggactccaaggaaatcaaggccggcgacatcttcgccctgaccgccaacgcagatgaccccacctcgctgggcacgtacacgtgtgaggcgcgaaactgtatgggcgtcacctactccagctccaaggtgcatgtggtgggacgcggaagtcgagagggatctctcaagccagcggacagcgtggcaagcaatgctccgcctccgatattcacgaacgaactgcgagacatgagcctgctcatcggggagaccatcattctcggctgtcaaggtgagcactcggagtctagtgaatctagcgatgatctcctgctggcaccgggccaactggtggtgccgccgtggccgaagagcgtctgctggtacaatgcgagcggacgagtggagaccgccgagcggtacaagctgatcgaggacggcctgggcgtctacatgatcgaggtgaagccatcggagtcctgcgatgccggcgaatggaaatgcgtggtgaccagcttcgatggcagtatgggcatttcaacgtgctccgttgccatggacatacctaggaactatcgcaagcccaggttcatggagagtctgcgcgccgtgctcaccgaggagggactggtgtccttcgagtgcaaggtggttggctttccaacgcccgtgctcaagtggttcaaggatggacacgaactgaagccgggcgatgtctaccagctgacgggcaccaactcattgggcacctactgctgcattgcgcgtaattgcatgggtgaaaccagcagcactgccgtcctcaccgtggaggacattcagaaccagctgaccgacgaggagcgacttgtcttcaaccaacagaatcagaaccaagcaccaaaatttctaattggactgaaaagcacggatgctaagatcaacgaaccctttcagttcaaggtggtggtgaaggccacgccgaatccaatactatcctggttccgggacgagctgcccattgatccgaacgaaagatataaccattatcggggtgaaaacgaagactggctgctggacatcaagtccgtggagtttgttgatcaagcggagtggaagtgcgtggccgtgaatgatttcggcaccagcatcacttcctgcttcctgaagctgcagatcccgcgacactacaagaaaccccgcttcctggaatgcctgcgcgccgtgctcactgaggagggagccgtgaatctggagtgcaaggtcatcggagttcctcagcccgcgctcaagtggtacaaggatggggtggagctgaaaccgggcgatattcaccggattatttctggacaggatggcacctgctgcctgggcacttacacgtgtgaagcgaagaactgcatgggtatcgttgccagttcggcctcgcttctgggctttgaggatgcccaaagaagtcagcagcaaaagagcgagcaactgcacgaaaatgagttacaaagaaattactccctgtcaaccatccaggaggagcgcacctcccagctgtacgagacgccagtcggagacataaccatcgatgaaaagggcgacgtgtccttctccttcgacggcaaggaggtatcggtttcgctctacgagactcccgatcttacggaggaggaagccctaaagattgtcgaaatgtatgccgatcaaatctcggagcatgttactgagcacaacatcgtcgaactgccaccactgcgcttcgtcaaagagacctcgcaatcgggaaaacttctgatggaagcggtggtcatcgacatttcacctgaatactttacagtcgaggacgatatgcgaactgaggctgatatggatgacatttccataaacgagatcacgcgaaagaagtccaagcccacggaaacggatgagttctttagcttatccaaagcgtccggcagtcaaggtgatgaggagacatcggaattgcaaacctttgccagtgcccagatgtccgcatcacaaaaagcagcctctggtgcacaagctagtccggagaaggacaaggattcagtggcaccgccaaagcgtaaaaagtccaaaaaacccacagataccgattcctcgaagacaacagaggatgatgctcgtctgcaggatatatcgggagcagtgggagacggactaatggtaactcaatcctcccatgccaaggttgtttccgatgagaatgagatcaataaaaatctgattgccctcgttccgctcgcaaagttgctaaaggttatcgacaatcatttgagtgccgtcgagaatgaagtgatggaacagtccaccatgatgatgactccgtcggcagcggatcagagcatagccatcatccgcaacataatcgagcccatcaagcaaatcgaatcgaaattaagagtatactctggcgagacccaaatcgacgccctcatccaatcgatggatgaggatattcgacgactgcacatgggtctacaggtcattgaaaagtgcgtggagatcgacgagactggagccacgctcatccaacgcaccagtgtctgtatcattgacagcgtggccgagcaaatgaagagagcgctggaggagctgaaaatcgttagtaggaagtttgaatcggagtgtctacgagcccaaatcgaactgactgccgatgacatccaacagggattagagatcacgcagggcacaattaaatcacaggctcttctgcaggaggcgcaagaactggaggcagcaaagcatttttcggaaacggttgaaaaaatgcaagaagtgcccgattccatgtcctttgccaccatttcggaggccaatctgcccagcgaagcaagcgctctaaaggatatttgtcagccggtggcaaagatacaggaagccctagagcgcgtcgaaatggaattatcgcttgaggagtccgaggagcagatctacaagaaggtgcaccagaaggtgctggagagcattgtggagccgattaagcagctgcaatccacactgcagtccattgaagataagactgagtctctcgcaggatccgagtcaattgagcagaaaataaacatggccattttggatatcgttacaccccctcttttcgaactcaaaaagggtctagaagtaatccttaacgaaaaatcaggaagtgtggagggaggaatgcggacagttagcacagtggaatcgatggtgccccccttgcaggagattcaaaatggtctggcgcaactgggccaagaactgcaaagtggtcaggactccgtgcctcaggagcaactgcgatctgagccagtaatgggtgttgctgatacccagaagctcttacaatcatttgcccaggctgtcttacattttgagacgaacatcgaaaggatctctgcccgactatctcccaacgttaagatccgcttgctgaacctaaaggatgaactgtcagctctaattggcgcaattttggaaagagaaattaccggacatcatgtagaattgctggacagactaaagcggcccgtcgacgagctaaactactgcatccgtcagacagaggtcaagaatatgactggatctttggccgacctgattgaaccactgagtatgttacaggagaacacccaaaaaggtcaccaacgcttgctagtcgctcgggaacccgatcagcaggctcttcagaccctggacaacatacgcagtcttatccgcaacgtggtcatcgatatagaagagcacgagtttaagatcctacagcaagagattcaacaggatgaggagcaagcgtcgcagcagcaggacaaatcattcagcgcgctgcggaaagtgctggagaccaaggtgtccctggaagaagctgttggtaacatagaaaccctgcaggaagcgttaaacaaaattagtgaaaacccaaaggcttcggaacgagtgaagagctcctcaaacgaagcccaagtgtatcttcttcgtattctgcaaattgctaaaggactggcgacatttagcgaggcagaaacaacactcgacgtcaacgaggccaatacgactagaattcttttcgagtgtggcaaaagttttgctgacttggctaaagccctacacagtcccgaatctttgactgagagtgagttcataaatgcactgaatcagtttggtgacattgttggccaacagaaggagtcaatggatgaaaagctatccattgccagtccgctctccagtctgattcatgtgctccaaaatctgaagcccccgcgagcttcaatggaggatttatccaccttggatgatgtgtcagtgcttaagtcagtcgcagagtctttgcccactgatccggatgtggaagtgcccaaaggtaccgagaaaccatcgactgttgctgtcctactgtccgatttgaaccagggaatcacctcggttctttcgcatagtgaagatcctgacgtggtttccctatcgggaacagctgcacagcaggtacaggcagcccttgttaagatgcaagagctgcaaagtagcttggcagtggttcaggaaaccaacttggtggaagcggctcattcgatgtcagaggccagtcaacagggaactttcgccgaggcgctctgcagcttggaacgctgtgttcttcaggtggaggagtgtatggcccacagtggcgtcgagagtttgaccgatctcgaactgtccaagctcaagactttggccactccattgcacgatgtgaggcaatactgcgagcagatcgatgtgcaacttttggaaaatgtcattgatatatctacacacggagatatctctgaacttaagagcagtggtcatcagcaaaccgtatcagatcacatccaggaagtagccgttgtggaggaagagccccaagtggaggttttcgatatacaacaaggtgtcgccagtggcatcaagcaattagaagcctgtctggaagttacccagacagatgccaataaagaacttcagcaagttggcaaaataatggagcaactgaagtcagatctggagaacatacagatcgcccttgtcactgataccgtgcaacaggaaaccgttctggcccaagcgcaaatagctcgcaccatgttcagattgaaggagtgcttggtgcacacgtatgaatctggcttggtggactccttggagaacgtagagagtgcctttgaagacatactgctttcgttaccaattctggaaagtcagttggccgaggaaatgtttgccaaaatcgaaaaggcatttgctaactttgttgcgtactgtgagcgtccagaagctgtggactatcaaaaattgaaaactctaaagcaacctattgagaatctagtgggttcaattggagctgtggccgcgcagcccaccgtagatgtcgacaaatcatcttcggttgttgttcagcttcagactagtctaatggctgcttttcggtgcataaacgatgtcagcgagcagattagtaacgaagtcttaggtggtcttttgaagacacaaagcagcttagtggctgtctttgattttattgagggcaatgacaatacaattcgtgtcatagaacttctacaggaaatggattcgatcactgcggaattgaaggcattgtccgaaattcatgttgaacccacagtgccaatcgatataggcataattattgaaaacgtttcgtctggaaaggcgttccttaccgaaatcgaggaaggacttcgagttaataatccgacatgtattcttttgctagatgaaaatacagacgatatcgctcagctcgaggcaactcttgtgcaaatcgagaaagaaatcctttctcaaccgcaactcagtcagataaccactaagcagtttgctctcatagatgcactgcagctgcagatcagtaatcttcaggaaaaacttaacaaactgaacgtgtttctttccgaacttcaaagtcaatcggatgtctcctcacctgaatcagctttggatactgacatagatcttaaagaaggatctggaagccaggaagacattgaacccgaggctaaaagacccaaaatgctggaatccgagcaacaactggattcttacaaacaaaccgaaactcaagaagaagtgcctaaggaaacggatgatgaaaccaagaaagatattgaagtcgaatcaaagctagaaaaccaaaatgagttggttgctaaaaaagatgaacagaaggcagataaagtatccgaacaagaaaaactccaagagaaaaagaagattgaagaacccaagagatcagaaaaaaaagacttggataaggaattcctggaagaaaaagaactaaaggcaagtgcgaaaaagcaaggtgatcaggatatcgaacagaagtcccagaaaccagaagtatctgaggtcgtagctgagaagatatctgaaggaaagattgaagaaccaaagaaacctgaagaaatggacactgaagctaaatcagagaaagctacagtcttggataagcaagtcctggaagaaaaagaactagaggctagtgcagaaaagcaaggtgatcaggatgtcgaaaagaagtcccagaaaccagaagtatctgaggtcgtagctgagaagatatctgaagaaacaattgaagagccaaagaaacctgaagtaaaggacactgagattaaatcagagaaagccacagccttggataagcaagtcctggaagaaaaggaactagaggctagtgcacaaaagcaatgtgatcaggatgtcgaaaagaagtcccagaaaccagaaagaccgtacgaaaacgatccgaaatgggagaaaccgagaacggagatatcgagccacgggcctccgccgaaccggaggcggcatccgcccaggatacgctgcaggtgccaacgcaaaagaagcgcaagcttaagtcaccaactccaggaagccttcgcggacgcagtgccacgcccattcatggccggagccagactccgtttacgctgtacatgacgcggcgcagtgccacaccttcgacatggcgcagcataactccgttcctgaagcgcgaggagaaggagaagacaccattcgagctgggaagggatatcaagagccagaccacctgcaacatcgccgtcttcgatcgcgccctcgttatggatatttccgagccgttggatgtgcaaaagcccgtgcgttacataacttccgacttgtcggtaatcgatcgcgctgccgtaatggatgtgtccaacgttgaggttatctacgttgtggaggaatacgaggaggtcgaggaggaggaaatcattgaggaggtcaagccaaagaagaaggagaagaaggctaggaagccgcgtgcccagcgcaagtccattgacaaggacatgagtccttccggagccgaagatggcgacgatttgggtgactttggcggcgatgacagggaggatagcgttgacctcgacgacggcgatgagccggtgaagaagggcaagaagaaggcaccgcccaaaaagaaggagaaaaaagagaagtcgcccagtccgaaattgaccttgaaactggagatcggcggtggccagaaggccagcaagaagatgttcgagcaacagcagcagcaggccaagccgccgccaaagaagagcaagatggtgctccagatggaggagcaggcaaaggcagctgccaaggccgccgaggaggcagctgctagggccaagcccaagggtgagacctttgaggagcgccagaagcgtctgcaagccgaaaaggaggagcaggagcgcctggaggccgagcaacgggcccaggaagaggctgaggcggaggcagaagcggaggccgaggaagacgaggaggatccatctaatgtcggcgaggagggtgaagaaggcactgaggccggatacggagatgaggatcaggaacaggaatatcctgaagacgaaatcgaagccgagcctgaagaggataccaagaaaaaggaaaagcgtcgcggcagcgactcctcggacgactttgtccgccccgatccccacgaggaggagcgctggcagcgcattgccgccgtcgagggcgaggagttcatgcagcagatgcgcaaatatagccaggccaagcggatcagtgagaaggagcgcgacgccgactggcagcgtcgccgggagcaggcccgcaatcccaagttcatcaatttcctgtctgaccgagccgttgaagccggtcaaagtgtgcgcttggcctgcgccgtggatggtccggagttgtcggttaagtggtaccacaatcgcaagcagctggagcgcgatggctgccatcgcatcatcaataacaataacattctggtgttggaggtgcttaacaccaccatcttggactccggcgaatactcgtgcgtgatctcgaaccagaacgatgagacgagctcgtcgtgcattgtgaccatctatgaaattttcaaggacgaacccaaacccccttccattcagtatatcaaagagtactaccatctacgtgacgatgagctgaccatcgagtgtcacgtgcacggctatccccggcctgtgatcacgtggtggcgcggctgcttccaggtgaagcccagctacaagttcaccatgctggaggaggcgcacggtgtgtgcaagttgctcatctacaagccgggcaacaaggatggcggcatctacacgatgaaagcgatcaattccagtggcgaggtgcagattaaccatacggtcgaggtggcccgtaacctgcactaccacgtacccggcatcttccatgcccgcgacaagattcagctagacagtttgaagcaggccaagaaggccatggaggcggcccttaagtcgaaggccgactccgatcagaggcgtgcggaggcggaggaggagcaggcgcgcctgcatcctgtcaaggccacgccggagagattggtgcccgccaagcagaagctggcctttgccactcagctgcgcgatcgcatggcgctcgagggctcaactattaagtttgtggccactgtgattggacccgatccaaatacccgctggatgaaggacgacaagtgggtggttgtgggtggcaatatcaaaaacctgtccgaggagggcaaggccatcctggaggtgggcaacgttacatccgccgactctggcgtttacaagtgtgtggccaaaaacgatctcagcgagatcgagacatcctgctacttcaaggtgtacgcggcacaggcggatggcgatgaatctgaacccattttcgccctacccctccgagatgtgtatcatgcctcgcagaacgatctgattctcgatacgaaggttcgcggcaacccccgccctgaaatctcgtggaccaaggaccagatacccgtggtgctcgacgatcgtgtggttcagatcgagcatttggacggcatttgcgagctgatcatcaacaagccgacgatcaatgacaacggaatctatgtctgcaccgccaagaacaaactgggcagtcagtcgaccacccacacggttgtcgtcgacaccacccacacttcgcgcagatcgagcatcctgtctgccattgctatgcaggaaggaggaggaggcggagagtcagccgatgccaaggccaagggcaagaagaagaagaaggaggatgagcccgaaggtggcgatggtggctacgagcgacgcagccgaatgccggatccttcgcccaaacagatgttgtacttcacggtcaacctgtccaatcgctacgtggccgagggatccaaggtcaagttgcaggctgtgatcggtggaccccagccgatgatcaagtggctcaaggacgaccagaatgtaacgtatggacccaacattcgcaacatgaaccgcgacagcttggcggtgctggagttcaccaatgccaaggtggaggactctggaacctactccattgttgcccagaatgagtcgtgcaagatcaccacctctgccatgctgcatgtgtacgagaccaaggtcaatacggatgtgcaacccgtctttatacgctctctgaaagagacctatcacctgaacaccaacgaactgatcctggagacagctgtccggggtcaacctacaccggcggttcagtggtttaaggacagcattgaaatccagagcggcggtcgctttcagatcatcgagcaccaggacggcacctgtgagctcatcatcgatcgaccggacaacaaggactccggcaagtatgttgtcaaggcggaaagtcgcgccggcaagatggagatctcgcactatgtgctctttgagggtcaatcccatcacattgccgaaaatatccatggtgtgttccatgcggacaagagcctgttgcgtccgaaggaggtggagaagccggtggaaaagaagccggctcctgctgccgaaccggaatccgaggctgaggacggcaaggcgaagaggcgtgccaagaaggaggaggacgatggagcctcttcggcctatgccaccgactacgcctccgataccgccagcttgtcaagcaagcgtcgcgagaagaacatcgctatccacttcagcacctcgatgagagatcgcgtggtggccgagggatccaaggttaagatttcatgcttcctggaggccaaagagccgcaggtcaagtggttcaaggacggcgagcagatccaaaactcacccaagatcaggggtaggtacagtgagggtctgtgtctgttggaggtcatgagcgccacagcggaggacaacggcgagtacaaatgctggggtcgcgacgagactggagaagcatccacctcgtgccgactggaggtttacgagaatcccggcactggtgatgttccaccaacctttacgcgcaacatcaaggacacgatgcacggcaagatcaacgagctccagctggacgtccatgtgcgcggtctgcccacgcccgccgttacgtgggtgaaggatggcgtcaagattgagaacagcgacaagtaccagcaggttgaccacgatgacggcacctgtgagctgttcatcagtcgcccgaaggcttcggatagcggcaagtacgtttgccaggcggagaatcgcgagggcaagaccgagattgtccacatgattacagtggagccacgtgttagggcacctcgcatctcgccgcccagggagggcagacctccacgtccgagcggcgatgaggaaccagccgctgccggagaggaaggtgccgaaggcgcagctgatggtgagggtggcgagaagcgccgcaggaagcccaaaccggatgaggaggagcaaaccagctccagacgcgaggtaccaccacctccggatctaagaaagcgtttgtacttccgcaacttcctgtccaaccgaaccgtgaaatcgggcagcaacgtcaagtggatggtgaacatcgatggaccggagccaactgccaaatggttctttggtgaccaaccgatcgccttcggaccgaggagcaagatgtccatgcaggacggcatcgcctggttgaacctcgtgggcgtcacagaagaggatgccggagaatacactctacgggtcaggggtagcgaaaacgaaatcgtgagcacttgcaatttgtttgtgtacagcacaggcaaaccggaggtgattccgcccacatttgtagtgggcatcaaagacacatattctctcaacgagaatgagttggttctggattgtcgcgtacgtggccagccgcgtcccgaaatccaatggatcaagggcacggaacccattgaggccagcgagaagttcaagccgagcgatcaggccgatggctatgccaagctggtcatcgtgaatcccacagagaaggattcgggcatctattggtgcgtggcccgcaacgagggtgcggagaacaagatctcccatcaggtggacttcaagggacgccagcactactcgctggagaagacgcacggattcttccatcgcgatcccaacaagccgcacttccttgaccttcatgaagggcacgaaggacattacccaatcggatcgggtcagcaaagaggtgtccgatgactacacaagattctcagtgcagcaagcccagatctccgattctggcacctacttcgtggtagcccgcaacaactttggcaccgacaggatattcgtcactgtgacg

SEQ ID NO: 40203 - protein, 2542 aa, DROSOPHILA
MGNGCSKCCQCNEHKQLNGTLSSASSVYRKRSRGEIPIENSDRFRITATSNAVQLAVEHVQREDAGHYTLFARTKRQDVVRRHVELIVEDRSTGDDPPVFVRRLPDLSVKVGTRTRLLTEIRSSTDLKLTWYRNDRRVCANDRITEVNEGTFHYLEISPVTLDDGGQWMLMAENFGGRNSCLGTLNVLVPKAYKTPEFVEELRAVLTEQGTVSLECKVVGVPTPHLRWFKDSKEIKAGDIFALTANADDPTSLGTYTCEARNCMGVTYSSSKVHVVGRGSREGSLKPADSVASNAPPPIFTNELRDMSLLIGETIILGCQGEHSESSESSDDLLLAPGQLVVPPWPKSVCWYNASGRVETAERYKLIEDGLGVYMIEVKPSESCDAGEWKCVVTSFDGSMGISTCSVAMDIPRNYRKPRFMESLRAVLTEEGLVSFECKVVGFPTPVLKWFKDGHELKPGDVYQLTGTNSLGTYCCIARNCMGETSSTAVLTVEDIQNQLTDEERLVFNQQNQNQAPKFLIGLKSTDAKINEPFQFKVVVKATPNPILSWFRDELPIDPNERYNHYRGENEDWLLDIKSVEFVDQAEWKCVAVNDFGTSITSCFLKLQIPRHYKKPRFLECLRAVLTEEGAVNLECKVIGVPQPALKWYKDGVELKPGDIHRIISGQDGTCCLGTYTCEAKNCMGIVASSASLLGFEDAQRSQQQKSEQLHENELQRNYSLSTIQEERTSQLYETPVGDITIDEKGDVSFSFDGKEVSVSLYETPDLTEEEALKIVEMYADQISEHVTEHNIVELPPLRFVKETSQSGKLLMEAVVIDISPEYFTVEDDMRTEADMDDISINEITRKKSKPTETDEFFSLSKASGSQGDEETSELQTFASAQMSASQKAASGAQASPEKDKDSVAPPKRKKSKKPTDTDSSKTTEDDARLQDISGAVGDGLMVTQSSHAKVVSDENEINKNLIALVPLAKLLKVIDNHLSAVENEVMEQSTMMMTPSAADQSIAIIRNIIEPIKQIESKLRVYSGETQIDALIQSMDEDIRRLHMGLQVIEKCVEIDETGATLIQRTSVCIIDSVAEQMKRALEELKIVSRKFESECLRAQIELTADDIQQGLEITQGTIKSQALLQEAQELEAAKHFSETVEKMQEVPDSMSFATISEANLPSEASALKDICQPVAKIQEALERVEMELSLEESEEQIYKKVHQKVLESIVEPIKQLQSTLQSIEDKTESLAGSESIEQKINMAILDIVTPPLFELKKGLEVILNEKSGSVEGGMRTVSTVESMVPPLQEIQNGLAQLGQELQSGQDSVPQEQLRSEPVMGVADTQKLLQSFAQAVLHFETNIERISARLSPNVKIRLLNLKDELSALIGAILEREITGHHVELLDRLKRPVDELNYCIRQTEVKNMTGSLADLIEPLSMLQENTQKGHQRLLVAREPDQQALQTLDNIRSLIRNVVIDIEEHEFKILQQEIQQDEEQASQQQDKSFSALRKVLETKVSLEEAVGNIETLQEALNKISENPKASERVKSSSNEAQVYLLRILQIAKGLATFSEAETTLDVNEANTTRILFECGKSFADLAKALHSPESLTESEFINALNQFGDIVGQQKESMDEKLSIASPLSSLIHVLQNLKPPRASMEDLSTLDDVSVLKSVAESLPTDPDVEVPKGTEKPSTVAVLLSDLNQGITSVLSHSEDPDVVSLSGTAAQQVQAALVKMQELQSSLAVVQETNLVEAAHSMSEASQQGTFAEALCSLERCVLQVEECMAHSGVESLTDLELSKLKTLATPLHDVRQYCEQIDVQLLENVIDISTHGDISELKSSGHQQTVSDHIQEVAVVEEEPQVEVFDIQQGVASGIKQLEACLEVTQTDANKELQQVGKIMEQLKSDLENIQIALVTDTVQQETVLAQAQIARTMFRLKECLVHTYESGLVDSLENVESAFEDILLSLPILESQLAEEMFAKIEKAFANFVAYCERPEAVDYQKLKTLKQPIENLVGSIGAVAAQPTVDVDKSSSVVVQLQTSLMAAFRCINDVSEQISNEVLGGLLKTQSSLVAVFDFIEGNDNTIRVIELLQEMDSITAELKALSEIHVEPTVPIDIGIIIENVSSGKAFLTEIEEGLRVNNPTCILLLDENTDDIAQLEATLVQIEKEILSQPQLSQITTKQFALIDALQLQISNLQEKLNKLNVFLSELQSQSDVSSPESALDTDIDLKEGSGSQEDIEPEAKRPKMLESEQQLDSYKQTETQEEVPKETDDETKKDIEVESKLENQNELVAKKDEQKADKVSEQEKLQEKKKIEEPKRSEKKDLDKEFLEEKELKASAKKQGDQDIEQKSQKPEVSEVVAEKISEGKIEEPKKPEEMDTEAKSEKATVLDKQVLEEKELEASAEKQGDQDVEKKSQKPEVSEVVAEKISEETIEEPKKPEVKDTEIKSEKATALDKQVLEEKELEASAQKQCDQDVEKKSQKPERPYENDPKWEKPRTEISSHGPPPNRRRHPPRIRCRCQRKRSASLSHQLQEAFADAVPRPFMAGARLRLRCT

SEQ ID NO: 40204 - DNA, 8801 bp, DROSOPHILA
ctatgccatcatcgcgccaaaaagagtgatctaatatacctccaagcggcatgtcatcgataattatatagacacaactgagatatattgtatatcccaaaatgcgtcgcaaaatttcaatgcatttacacacttgagatattaaacacattgtttcggcatgcaaaaatctaatcagcaaaaatacattaagtctcttgcgttttgtggggatttaataatttatttttaacaattcgcggcgtttgtgagcgtgtttatcttgaaggcgacaattaactccattagcgagtaaatttgatttttgcacaaatactatatagagattttaaagcagaatataggtatatatatataggtacatatatgccattgatgaaatgcctgagaggaaacaagctaggcaatgtgagcagaatgtgtaaacaaaaagccgaaaaaatcataaagaataagtaaataaaaagcacaagtgaaaattgaattttttgcttgagttttgggtgacttcatcagtaagaaatggtaaaagtatgaagaaaaggtgaactaaaaaccatatgtgcaacttattaaagtgaatgacaagcgaaccactgccgacttgcagattcactaaccttatcaggtgtataagccatcattaggcacccaaagaaatccaagtttaatctgagatttgcatatgcatttgcatgaacaatttgtcattcgggtaaggccgaaataaaaaagagaaaatcataaataacagacaacaacagaaacgaataataataaaaactttgaccaaatgaggtaatcgggtaataataagtatattttcgccactgttagtcgttaacagagtgctgttagctttttcgttccattcaactgctttgctctctccttttctttttccggttctctcgagtggtaggtttattgccggcttttcttatctaaaccggtgaattggcattatggtcttatcaatcagccctgcatttggtgtactatgttgccctggaaaagggtgagagtttcctgctaagttcgttgattttagccggtttattcaatgtcaagcgatttggccataaaaataatagctttcagttcccacttttgctcagatatttcggtgtggtgagtttgggctcttagcagttttcgttcttttatttccgcagcgccttcgtgcgccattaacgatcgacagccgacgaaagccgaagcaaagtttttggcaatttttagcgttgagaattctattcaaatcagtttttatttagagttagttgcaagcggacgtgtttctcaaactggatggctggaaactaaatgaaagagcaaacgaacgaagcgaccgcaaatacatatacgcatatttttaaatcaaattaattaactaagaagtagtaaagaccagagaagcagcaaagcaaaaaaaaaaaacacaatcaaaccggcgccccaagaatacaagagagagatgtatgacaatggatatatattcttttgggccaacggctgctaatcggaatttacatttcttctccccttcgattctttctattttcatgttgaagtttcgaacgccgctttgtggattaccaggcgtatacgtaacgagcgaacagcaacgagtccgggaattaattttccatttgcagcgtctgcttgggtttcaccgcaattccgcttacggaattgaggcactggaagtcaagcagagtgctcgcaagttccaaaagttgagcacacttctgcctccaaaagttacaggaggtccgaaagttgtcgccaacgagccaaaatcgcagaccgaagactgagcagcaattaaaaattgtgtagctaattgccggccacttacgcacacgtagttcaagtcgtgaaaagcataaggtgattaatttcccacacatgaaaaaaaaaaatagaagaagaagataggaatcgcgtacttaaacgagagctgttagaaattttgcaagacttgattaagtcatcgtagatatgcaaaacatcaccggtctctggtactcgtattgtcatatactcgaatacctgccagggtcgtcaggtgtgtttgtttttgttattttcgcttcattcgattcgctagagaaacggagagaaagagcatattgaatcgcaggcgtttctactttaaacgatgacgtagccaaggcgacagaaatagccagacccaaatgcttatcgtcgtcgctgtgggaatgattacattcctactaccgccacaattgatcaaactatttttcgtaaatgttttgctatattttgcgatttgtttttatgcacactctcgtttcgttttggaacaacacgcgccaatttataccaataccatttgcctttcactttcactcgtgctcgccacggcatttctagcatattttgccatttaaattagagccgcgtactaaatttaaatcgttaatttgtacaaaatggcagccgactgaaaatagcgtagaggaaaaataattttcgtattttttttttttgctcttagatttattttgcttgcctgtcggcggcggcggcaattcaaacccaaacaaaattgagcaattcactagttcgatatttgttggctgcgaaaaatgacgccgaaataattctggctagtttatagacgagtatcgtttatttccgctgcccgattttctcagtttcggcgcagcgcatttaacaattaaatttgaaaatgtgttcagccgacttttcggtcaattggccaagagccagaatgtgagttgacttggcctcatcttggccagcatttcgctacgccactcggtgtctgtaaagggcaacaaacgttccattaacgaatccgtcattccatgccaagtgcaatggttggacatgaaaataacgaacaagtatgaacaacgtgatgcttgaagtatacctcaagcgcttttgctttgggccaccagggcgtatgagtgatatgcgtcatatgctggaaatacggagcggaaatcaatgcgaatttctttatatacgatccatgttactcattgatttaatgcgttcactgcaacgccccaatgacgtcagcttgtctacggccgaaatgcaaatcgaaaaagcaaaaaaaaaaaacataaataaatgaggggaatataaatttaaacatgcgccgcttttaaaaatacacccaagctaaaactataacaaaaacaagacattttgaaagtggtgcgtgtccaagaagcgttagggaatacatgtatttattttttttctttctttggcggctttttaatgaagaaaagtttcgctctttggctctcaatgggatcaaggcgatttcgaattatgagaaatgtacgaaaaactttttcgaaaaattgccgaggcccaagcaaatgtgctcgaggcatttcatttagaaaactctcttgtagccaaacggcagcattcatttttcacggaaatcttcgcagcctcgaggccaaagcccagtggatcttacacacaaacacacatatatatatatatatatagcgatttatatatatatgcgcagcaaaagaacattgaaaacttcagaatatttcagccttttgtgccagcagaataacttttagcaccaccaaatatctctatagatagaggtctttcagatctctacgcgtgtacggaatagaacttggtctatgccatcaggaaccgcgtggtcttcacactgtctccccatccacagtgcatgccattgaataacgtgcccctgaaacttaaaaaaccgctctgtttcctttcagattgaacgacactctgcgcgataaggagcaacaggttagcaaggatctcgaggagatcgagcaagtcttccgtcgcatctcgcagctgcaggacaagctaaacgcgcttcacgagcaactacaatcggttcacgtctacgacgagcacatagcccaaacggaacagctcctcatcacattgaacagccaggtgcagcaggccgccgaggagagcaaattactggtggcccagacaacggcccactaccaggccaaacagaatcagctgcccagcgatattgcccaggagtttacggctcttgagctacttgccgaacgcgtccaagtgaccatggagaccaaagagaaggatttcaagcgggccaagaccgtgcgcaccgaatatgtggacggtgtggacgaggtgcagcgttggctgctccaggcagaggtgcaggtgcaggagagaagcctcacacccacacagatgaaggagctgctgcagcgcattaaccacgagatcaccgccatctacgaacgcttcaccctggtcaagaccaacggtcagctgatcatcgagaactgtcgcaacagcgaggagaagacgctggtgcagacgaccatcgatcagttggccgcatcgctggcccaggtacgcggttggctggatgagaagaagcaggcggtgggcgatagtctggacgcgtggacgaggttcatgaacctctaccagatcgtgatgtcgtgggcatccgagaagcgcaacttcattgaccagaccatcgagctgcgcaccctgcccgaggcacgcaacaaattgaacgactatgtgacgtctgtgaagagtattaaaccgattgtgaagcatctgagcgaaatggacaaggaactggagcacattggccaagtgacgactgtgggcgatctcaaggacaaactgcaggaggccgaggatgcgaagatatccgtggaagcggtgctgctagagagggtaaagtggcaatccaacaccatcactaccagagtggaggaatttttggggaatccatcaattattcaactcttttcccccacattctatattgtatcttgtagaactccctgctgcaagaggcctgcgaggaatgggaccaatgtgaacgcaagattaaggatatacgctcctggcacgaaaagacgaagcagggactggactcctcgcagcagcagaagaaaccgctgcgcgatcagctcggtttctgtgagaagaccctggccgatatcaatgtgcagaaaacgaaactgagactgtccatcgaaaaactggaggtaagtattgggggcgttggcatggctaatccctgcttaccatctcgtccacaggttcatttccgcaatggcatgggcggtgatccgcgcctgagcgagaacgtcgatgatctggtgcgcgtgctcgacggcctcggcgaattggtcaaggccaagtcgcagagcctcgagcagacgctggcccagatcgacgtttaccaacagcagatgcagtccctgcgccagcgtatcatccaggaggagcaacagctccgcctggtgatggcgcccacgtacttgccgcacgatcgcgagcgcgcattagccgagcaacaggtacgtaccgtccagactttgctagatctacaatagttagacccgtttagcaaacagctaggcagctaggagttaaattcagttgtagcagatatatgaccaggatactcgttagtaaagtcggttatccaatgttgaagccccaccccttttgatatctatctcatttcttcattgctgtgaacgaaccttcatcgctatgaacaaacagttgacagaacaaccaaacaaagttattaaccccttacccgaatatataatataaacttgattaatctttgaaatcgttttgccccaaacgctttactgtgtgcgggtaggtctgaagaaaaacagttgcacggtggctgcgtatatttaagttattttatttagtttgtttaaaaacaaatgaaatcaaggcgccttattattttcctattttcattacattctattttgttcggctaaattctattacgtttttttattttcgaattcgttttgcgccattatatctcacacaaatgctcacaccaatcagcattcatcattttcatttcatctttgtgtttccttatgttcaaacatcattcatcgctcatttaccaaccgtgcagctcacaatctcaaaactcattgctttcacatcgctctcattgggaaaactacccacaaaattataccacatcaatatcggatctttaagatctttaagaactcatcattaccatttgtcacgtgctgcggcccaaaagcattttgaatgccagaaaaaaacaaataagttcttgctgtcagggttaggccacccagatgagaaaagcgaattcctcctccagataatcacacgtactatttttagagccacgctgcttgccattgtttttttttttgttgttcataaacaaagtgattatatttagaaccaggtggcctagcagcaataggttaaaatcaagatttccctagttttttaaatagctcgtaaatttattactaaaatttaactttacattgcgaactgcaatgttggcggtaagtggcaatcttagaattcaattcaatttggggcagtagctaattttgatgatatttgttggggcagctcttgctatgagaacaatttttgatttcccttcacctgacctttcacacacacacacacacacacacaagagaaagtacagtcatcacatcgcatttaaatcgtcacatcttatggcacatttatgacacattaagctttggcctagacatttaaacaacaatacttttggtttaatttcatttactttttattttagttttttttttttttttgatttattcatttagccagcttagccaagcaatcataatattcttcaccaagcagctctttctctttctctctataaatctttctatatctttctggtatcttgtaatagcgaaagtcggttaatatttaattatggttacggttataatttgatttggtattttatttttgacaattgtatttctttttatcttttctctacgtaacttttgttgaatataaacaaaaaacctggtgtcgttgcgctgaaaacaatcgaaaaacaaacatgcaaattattaaacacacttcataaacattgttcttactaatcgtatattaaaccaattacaacttatcttgggctttgctcgcttgcttgttatgctacttacaaaacggtgactaattcaaatctgccccattccgatttaacctttaaccccatcgaataacaaccccttatcacacacaaacacacacacgtatataaacatacatgggtactgcttacttcttctaataaatcgaaatatcgaacatggtgaatggtcgcttttcctgtatctatcccacatggcgtatgatgtgctcgctgtctatgaaataccataaacgatactcaatatatatgctgacatctcttgtatttcttctctatatatatatataaatatatatctctgctctcacgccaaacattcgatccatgcaccatctataccctatatacgaacaataggcatgccgggaacgtgtcaaaaatctgcattcgaaaataactgcacgtaatgagcgcatcaagttgttaatacatcgcggcacgccggacgatgccaagctagagatttaggatgccacaaccttaaccataagataaagccaatctaggactagatcaaagccaaagcagccaccccggcgtcttccgtttgcccctgccaccgatttccttctcccaggaacggtggctacggtacaactgtcaactgccgtcattactctaatcaatgaaacatgacccgtgttttagaatttactattatctatatatatatatatatatatatatacatacatatatactattttacagaataaattaaattaccgaattatatttataaaacgcaagccccaatcgagtataatttatgagggagttaggatttgcaactttttactcttaggtagcttagccttgagtccccatttttcaaaacccctgcaatcatatcaaagctaacgtttttggcaaatcttccccccatctctcccactttctctcactctgatacgtgaaccgtgatgatgaacaattaggcaatgcgggaatcaatcgatggcatgcagcaagtctacgatgcgaccgctcgaaagtcctatgcgctggatccccattcagtggtgaccacttcatcgactgtctcgttgcttatgaagccaacggcggcagtaggtctaacctatgctgaagtgctgtcgggacaagcgagtccggtaagcagcggtaatgaatcggtaaccaattcccgaccagaacgagacccctccacgacgacaacaacaacgacaacacggcagcaacaatcgaacgatactcagaacacgaccactattacaaccattaagactaccacaactacgacaacgacttcgagaagtacgcacggcgatgatgatcaaagccaggagagacaagagctcaatggcggtggcagcaccacagccacagcaaactataagcgcccccaacaggtcacaccacccagcgagaatacctcaaacacggttcctaacacagctacgacaacgataaccaatcccaatatccagttcatcgaaagcgagcggaggcatcagcatcaccacgcgaaaacgggtaagaagcttcatgcgccgcggccagaacgacgtggtcgatcgcccagacgacgaccacctcaacagcaaaagccagtggaatcatctcaacaaccctcgatcgaaattcaattggagcgccagcaaccacaagaacaggagcaactattcttgccagctgatgaccgaactagatctcgcagccccatgtgggtaccaggatcgacttcctacgctgaggttcttcggggactagagctggagcggat

SEQ ID NO: 40205 - DNA, 2016 bp, DROSOPHILA
atgttgccctggaaaaggtttcgaacgccgctttgtggattaccaggcgtatacgtaacgagcgaacagcaacgagtccgggaattaattttccatttgcagcgtctgcttgggtttcaccgcaattccgcttacggaattgaggcactggaagtcaagcagagtgctcgcaagttccaaaaattgaacgacactctgcgcgataaggagcaacaggttagcaaggatctcgaggagatcgagcaagtcttccgtcgcatctcgcagctgcaggacaagctaaacgcgcttcacgagcaactacaatcggttcacgtctacgacgagcacatagcccaaacggaacagctcctcatcacattgaacagccaggtgcagcaggccgccgaggagagcaaattactggtggcccagacaacggcccactaccaggccaaacagaatcagctgcccagcgatattgcccaggagtttacggctcttgagctacttgccgaacgcgtccaagtgaccatggagaccaaagagaaggatttcaagcgggccaagaccgtgcgcaccgaatatgtggacggtgtggacgaggtgcagcgttggctgctccaggcagaggtgcaggtgcaggagagaagcctcacacccacacagatgaaggagctgctgcagcgcattaaccacgagatcaccgccatctacgaacgcttcaccctggtcaagaccaacggtcagctgatcatcgagaactgtcgcaacagcgaggagaagacgctggtgcagacgaccatcgatcagttggccgcatcgctggcccaggtacgcggttggctggatgagaagaagcaggcggtgggcgatagtctggacgcgtggacgaggttcatgaacctctaccagatcgtgatgtcgtgggcatccgagaagcgcaacttcattgaccagaccatcgagctgcgcaccctgcccgaggcacgcaacaaattgaacgactatgtgacgtctgtgaagagtattaaaccgattgtgaagcatctgagcgaaatggacaaggaactggagcacattggccaagtgacgactgtgggcgatctcaaggacaaactgcaggaggccgaggatgcgaagatatccgtggaagcggtgctgctagagaggaactccctgctgcaagaggcctgcgaggaatgggaccaatgtgaacgcaagattaaggatatacgctcctggcacgaaaagacgaagcagggactggactcctcgcagcagcagaagaaaccgctgcgcgatcagctcggtttctgtgagaagaccctggccgatatcaatgtgcagaaaacgaaactgagactgtccatcgaaaaactggaggttcatttccgcaatggcatgggcggtgatccgcgcctgagcgagaacgtcgatgatctggtgcgcgtgctcgacggcctcggcgaattggtcaaggccaagtcgcagagcctcgagcagacgctggcccagatcgacgtttaccaacagcagatgcagtccctgcgccagcgtatcatccaggaggagcaacagctccgcctggtgatggcgcccacgtacttgccgcacgatcgcgagcgcgcattagccgagcaacaggcatgccgggaacgtgtcaaaaatctgcattcgaaaataactgcacgtaatgagcgcatcaagttgttaatacatcgcggcacgccggacgatgccaagctagagatttaggatgccacaaccttaaccataagataaagccaatctaggactagatcaaagccaaagcagccaccccggcgtcttccgtttgcccctgccaccgatttccttctcccaggaacggtggctacggtacaactgtcaactgccgtcattactctaatcaatgaaacatgacccgtgttttagaatttactattatctatatatatatatatatatatatatacatacatatatactattttacagaataaattaaattaccgaattatatttataaaacgc

SEQ ID NO: 40206 - protein, 578 aa, DROSOPHILA
MLPWKRFRTPLCGLPGVYVTSEQQRVRELIFHLQRLLGFHRNSAYGIEALEVKQSARKFQKLNDTLRDKEQQVSKDLEEIEQVFRRISQLQDKLNALHEQLQSVHVYDEHIAQTEQLLITLNSQVQQAAEESKLLVAQTTAHYQAKQNQLPSDIAQEFTALELLAERVQVTMETKEKDFKRAKTVRTEYVDGVDEVQRWLLQAEVQVQERSLTPTQMKELLQRINHEITAIYERFTLVKTNGQLIIENCRNSEEKTLVQTTIDQLAASLAQVRGWLDEKKQAVGDSLDAWTRFMNLYQIVMSWASEKRNFIDQTIELRTLPEARNKLNDYVTSVKSIKPIVKHLSEMDKELEHIGQVTTVGDLKDKLQEAEDAKISVEAVLLERNSLLQEACEEWDQCERKIKDIRSWHEKTKQGLDSSQQQKKPLRDQLGFCEKTLADINVQKTKLRLSIEKLEVHFRNGMGGDPRLSENVDDLVRVLDGLGELVKAKSQSLEQTLAQIDVYQQQMQSLRQRIIQEEQQLRLVMAPTYLPHDRERALAEQQACRERVKNLHSKITARNERIKLLIHRGTPDDAKLEI

SEQ ID NO: 40207 - DNA, 3629 bp, DROSOPHILA
gtggaataccgtgtacttagacctgcagcttacaataattaatcgatattgattttaagccagagtcctttcactgtagttttttatttttggctagcggctttaaagcagctttatctttgacctgattctggaaatggagcactgagcctattgtagatgacacacgcaaccacatacccagccacgcccactttttgacaagtcatttggcaggtcgttgaaaaaagggccaacttaattgtgtcactcaccgttcagccttaatttgagagccaagatgatggtgaacgacgatacagcaattaacgaggtacaaaatcatttcattgtgtttgccaaacgccgcgacccagagcgcccaaaagccagcggcgataagtttttttattacacctgagtctgggggaggaacccaggtgagctccacactatctcaatgtgcgtgtgtgtgtatgtgtgccaggactcattaaaaacgaaagagacgctcattacctggccaagagcaggcagagaaacaaacgaactcgccgccctcataggacaacaaacgatttttgagccggcgacttttcgctccaacaccccaaaattcacccgctgaaattgaggtttatgtggatgaggatgcgtgtggtgttgggttttaattacctttggtttcatccttcgcgccgtcattcggctcgttgtttaagtaattgtttgccattagttaaaatgttttcattttgcaccggactcgtgcccggaccggacgcacatacgtgtgcatgtggtatctggtgatggcggaaaagatatcaaatttgtaacctgtcagagcggaaattcaatgaatttccattttcatatttaatgatttcggtttcttagttaaacgtattaaacagaatgttaaaatgcagtctctcataaaaacactaacgagctttacactttggtatacttagatgtgactctaaatggaatattttactctatttttcgaccacagcaatcggtgaacttacgctttgattgtcagtcgttgtgtacattttatgtttcagcagtctacagacacaaagccgacacgacatatcgtctcgaaaactcgagagaaatctttcccaattcaatttccacatcccccacttttgtcgatctttcgcagactgccggaatggcctttgtagcgcgtcggagtagcgatggctcggtggtggatcgtcagcaggtgtctggtcgggaaaaagtacgtccagcttcccagtcggacattagtgatgaggattcggagtcgctgctgggctatacaaaccacacctatggggctcccacagtgaggtatgttggccagggtgaagatcgtgaagcggtggaacctcagctagattatgaggattttggggattctctgggggatcatgccgacaattcggaaagcgagacggattccattttgagtttctgcaaggaactggatgaggaggaggccaacgatgcattgctaaatggcagaatgagcttcacagacgagaaggcgaaagttgaggataaagcgaatgcagatgatgtgtttcaccgggtcatgaacaaaggcgatgaggcggctgccacggacacggagaccgtgatgaactttgatcacgatgtgcagagccttagctccttaggcagctgcacgccaacggtgacgcaacgcggtgaggatgtcgacaatttggacaatatcagcggcaggacatttttcaaggaggaaaaatcgcacagcattaacaccaggaccttttgcaaggataacaatctggatgcgctgagcggcaggaccttctacaagcaggcctccgtaaaggagactaaccagggccagatttccagtcggacatacagcctgagtagctcgggcaacaatcaaaaccatgacgcatcctcgatgtccacctgcagctggtcggacatgtaccgcggtgctctgcagtccaccgatggatgcaccggtatgccccctctgagcctggccagcgtcgtctctgactcgtccacgtgctacaagcagctggaggagcataaggaacgccctggcccgcaggccttcgaggactggaaggcgcgaaaggccgccgagaagcagaagaatctgctggctgccaaacaggagcgcgaaaagcgggaggcggaggcagcactgcgacagaaatatgcccaggagcacttccaggagtggtgtcgtcgcaaggaggagcagcagcagcagcagcggcaaaagcaaaagaaatcctcgacctctagctccagtttgggatcggtttccagctctagcaccgcccctacaaggaaggtgtctcccgagaacacaaagaaccgtctgcagaagtgggagcaagccaagcgggagcagcagcaacaggaaaaacaacgcctgatccgactgcagtgcaacaagcagaaactggaggaggaacgccgtcagcgccgccaaggcgcctggcagaactggatgaaacaggtggacaagcgggccaagccggttcccctcaatcagggctttgacacgctgcgcggtaccatatccaacatctacatcaatcccgtgcaatgggtgtccaatatcgatccgcaggattcggggcgcagtcgttagaattccttggagcgctctcacattcgttagtccatcgccatttcacgctgaaatgcatgcaagacctatggggacgactggtgcaggaggacgggaggagatcgcctcggttgctgggcccgcaaaatgattttaattctactactacacattatacacgaattttgattagtggcggtggatcccactttgttttaccttcgcaagttactcaataaactacaagatcggcagctttaactgtagtttggtttatattatatatctcttgatagccaacaaacaagaatagttattaatagttattaacaaaatgtttcacgcatttctaaatatgacaattaaaatcgtagaagtgaaagagctcatatttgtggatagtgcgaacccattgcgagaaggttaataaaaggccagcttagtgaagcgaacccgtaacgataacctttgacccgggtgtattatggttatgctcctccaccacccttggcccagagcctaaggacactgcacttccttgttggccattctgtccctttattctggcaaccatttccgtgtttgtttcaatgcccatcccatcccattccatactatccacccacaattgtgtgcgtttgtgtcaatttctgtttttattatttatttgcccggtccatggggagtcggcaggtggtggagcaggcttaattaagctttactccacccacccggaccgtcccagttttatttatgcaattaaccaaagcctcgtgtaatatagtcccgttaggtaaaaatctttgattaattgtagttttgtttacacgatggcagcgagtcagacctgattatgtgggccatcatctgacagggtccaaaaggggattttggggcacctcgggatgtgcgtgtgtgtgagtgtgtgttagagggtcctttcaggtgattagtcctttagttggctggcaatttgtttacacgttctgtgagctcgcctaatcgccagcaggcctctcgt

SEQ ID NO: 40208 - DNA, 1539 bp, DROSOPHILA
caatcggtgaacttacgctttgattgtcagtcgttgtgtacattttatgtttcagcagtctacagacacaaagccgacacgacatatcgtctcgaaaactcgagagaaatctttcccaattcaatttccacatcccccacttttgtcgatctttcgcagactgccggaatggcctttgtagcgcgtcggagtagcgatggctcggtggtggatcgtcagcaggtgtctggtcgggaaaaagtacgtccagcttcccagtcggacattagtgatgaggattcggagtcgctgctgggctatacaaaccacacctatggggctcccacagtgaggtatgttggccagggtgaagatcgtgaagcggtggaacctcagctagattatgaggattttggggattctctgggggatcatgccgacaattcggaaagcgagacggattccattttgagtttctgcaaggaactggatgaggaggaggccaacgatgcattgctaaatggcagaatgagcttcacagacgagaaggcgaaagttgaggataaagcgaatgcagatgatgtgtttcaccgggtcatgaacaaaggcgatgaggcggctgccacggacacggagaccgtgatgaactttgatcacgatgtgcagagccttagctccttaggcagctgcacgccaacggtgacgcaacgcggtgaggatgtcgacaatttggacaatatcagcggcaggacatttttcaaggaggaaaaatcgcacagcattaacaccaggaccttttgcaaggataacaatctggatgcgctgagcggcaggaccttctacaagcaggcctccgtaaaggagactaaccagggccagatttccagtcggacatacagcctgagtagctcgggcaacaatcaaaaccatgacgcatcctcgatgtccacctgcagctggtcggacatgtaccgcggtgctctgcagtccaccgatggatgcaccggtatgccccctctgagcctggccagcgtcgtctctgactcgtccacgtgctacaagcagctggaggagcataaggaacgccctggcccgcaggccttcgaggactggaaggcgcgaaaggccgccgagaagcagaagaatctgctggctgccaaacaggagcgcgaaaagcgggaggcggaggcagcactgcgacagaaatatgcccaggagcacttccaggagtgctctagcaccgcccctacaaggaaggtgtctcccgagaacacaaagaaccgtctgcagaagtgggagcaagccaagcgggagcagcagcaacaggaaaaacaacgcctgatccgactgcagtgcaacaagcagaaactggaggaggaacgccgtcagcgccgccaaggcgcctggcagaactggatgaaacaggtggacaagcgggccaagccggttcccctcaatcagggctttgacacgctgcgcggtaccatatccaacatctacatcaatcccgtgcaatgggtgtccaatatcgatccgcaggattcggggcgcagtcgttag

SEQ ID NO: 40209 - protein, 456 aa, DROSOPHILA
MAFVARRSSDGSVVDRQQVSGREKVRPASQSDISDEDSESLLGYTNHTYGAPTVRYVGQGEDREAVEPQLDYEDFGDSLGDHADNSESETDSILSFCKELDEEEANDALLNGRMSFTDEKAKVEDKANADDVFHRVMNKGDEAAATDTETVMNFDHDVQSLSSLGSCTPTVTQRGEDVDNLDNISGRTFFKEEKSHSINTRTFCKDNNLDALSGRTFYKQASVKETNQGQISSRTYSLSSSGNNQNHDASSMSTCSWSDMYRGALQSTDGCTGMPPLSLASVVSDSSTCYKQLEEHKERPGPQAFEDWKARKAAEKQKNLLAAKQEREKREAEAALRQKYAQEHFQECSSTAPTRKVSPENTKNRLQKWEQAKREQQQQEKQRLIRLQCNKQKLEEERRQRRQGAWQNWMKQVDKRAKPVPLNQGFDTLRGTISNIYINPVQWVSNIDPQDSGRSR

SEQ ID NO: 40210 - DNA, 2603 bp, DROSOPHILA
gtatagataacaataggaaatgtttaagcaacagaatgcatttcgcttaagatcaggcataactgcataacttctacttttgtttaaatactgcaagttatatttcaaaaagtgattatgtttttagtttcatcaaactgacaattctctagctactttgaaataaacgagtaaacagaatggataaaccgtgatttttggggttacgatattaaatatcgtgtgaacggaaaatcctattgcactaaaagatttatatcttttatatcaatacgtgatatgtattattaaaacagattgggttcatttttcttaggaagtttatttatttaaattataagttagattgtacgtgagctactttatgatatatacaaattttcataaaaaacatgtaaactaatttatgttcataattgatttaacacgtgtcacatatgtgttggcttaaagaatttccaagcagtgttggcctaattgggtggtagttttcatgagttgtcaactggcaagtatatattacttgaacaaagtaatttgattaaactggattttgatttcagtcaaacatttccttgtgctaattctaacgtttcactttttaactgggattagaaaagccatcggtcagaagcagaaagttaagaatatacgaatataaagaaaagcaacggatattgcaaactgtaaaattgtccaaggtaagcgcggtatttaaccaatgtatagtctataagaacaaatcccaaaatggatttaattttagtttgtggcttgtagcatttattataactttgacaattttgtgttaatccgtaccaggtgtttggttcgggccataaacagcgacgcatttgggcccagcaagtcggacaggtaaagctcctcgccaggtaaaagcccctattgcagagacccttgtttttggtgtgccatataagacagaaggatgagagattgcagctgtcagagagaatcgagtcttcagatcgacaacaacatgggcaacgtaatggatcgcaaggtgtcctgctcagaggcacgtgccacaaacaccacgcccactccgattgcgagtgaaaaggagacggaggcgccactgaaggaacaagtgctggagccgcaggagattgtcccaaatttatcgttccatttgttcagctatcgacagcaaatgggcagcaagaagcaccagttgatgaagtgggccacatccaagttggtactcaccgaagagctgctcaaattgcaaaggcaacgactggcagataccaacgagtcctggaccgattttgcatccttgtacgcggacaaggatgatgaggagaatcgtgaaccaaatggtgacgatacattagttcaggaactgagcaacctgagaaactatcgaatggaattgaggggcaccattctggagtttgcccaggagaagatgaagaagcgagagaagaaaaagttgaagcgactgaaacgacgcaccctcatctcctccaagaaacccagcaataagaataagatcgactactggtatccgcatacggatatcgaggagacggtggacttggatcctcaggatcaaacggaagtcgttgtcatcgattaggttagcattatactaagccttagttactttagtcgttattcttgttataattgtacatatacactgataagcttagagaatattcaaaatataagaacaacatattgtatacaaatttttttttatacttacacactctgatgatggcttcgactatataatacccattactcataatgcagtacagagggtttatgcaattttactttttaatactttctgcttttatatgaacattacactttctatatttacaattttgataccgacttatcccatctccacgttctataccttcttgcggacaaagtgatcgtagaacacaacatacccgaacttgggagagtagaccatcgatcgcttggcgttcctcgagtaaatgttgaactggccgcccaccgaaatcattttgtggtcaccgcgatgcatgaacatcagtccgaagtgatggtcgtgcatcacctggtagttatcgctatccgtgtacttgaccacgttataccggggattcgagtagctgagatggtgtggcatgggcttcagacgagagcgaccttggaagactccccgccagtctgtgtgcttgattgcctcgcggaagcagttgcgccagctcatgtccaggtctatgtagccggagatctccgagccgtccatgtggatgtacgaggtaaaaacgatggtctgttatgcaattaatagaaaagagagtatatcagctaagatgccgagcctaccgatagtatcttgttcaagttgagcagctcgcgggccttgaactccagaagaactgggtccctgttcgtcggcgacaggaggtcgctgaacaggcccacgtgtgccagcttcggcctaatggcctccagggccaggtcaaccctcttctcatactcttcggctgtgtagggtatcttggtggtgcggtagcccagctggacgatggtcttgatcgtgttttgattgcccagatatctgtggtccgtgacggtggcaaacgagg

SEQ ID NO: 40211 - DNA, 603 bp, DROSOPHILA
atgggcaacgtaatggatcgcaaggtgtcctgctcagaggcacgtgccacaaacaccacgcccactccgattgcgagtgaaaaggagacggaggcgccactgaaggaacaagtgctggagccgcaggagattgtcccaaatttatcgttccatttgttcagctatcgacagcaaatgggcagcaagaagcaccagttgatgaagtgggccacatccaagttggtactcaccgaagagctgctcaaattgcaaaggcaacgactggcagataccaacgagtcctggaccgattttgcatccttgtacgcggacaaggatgatgaggagaatcgtgaaccaaatggtgacgatacattagttcaggaactgagcaacctgagaaactatcgaatggaattgaggggcaccattctggagtttgcccaggagaagatgaagaagcgagagaagaaaaagttgaagcgactgaaacgacgcaccctcatctcctccaagaaacccagcaataagaataagatcgactactggtatccgcatacggatatcgaggagacggtggacttggatcctcaggatcaaacggaagtcgttgtcatcgattag

SEQ ID NO: 40212 - protein, 200 aa, DROSOPHILA
MGNVMDRKVSCSEARATNTTPTPIASEKETEAPLKEQVLEPQEIVPNLSFHLFSYRQQMGSKKHQLMKWATSKLVLTEELLKLQRQRLADTNESWTDFASLYADKDDEENREPNGDDTLVQELSNLRNYRMELRGTILEFAQEKMKKREKKKLKRLKRRTLISSKKPSNKNKIDYWYPHTDIEETVDLDPQDQTEVVVID

SEQ ID NO: 40213 - DNA, 10234 bp, DROSOPHILA
ctggaattgcgtacaagccacatacatatattcttcccttactccatgtatcctgtatccttaaaagggctattcagtcaatagatttgatttatttgaacatgccacgtactcaaaatgacatcaaatcgaaacttgtaaccccttcgtttgcatattggattggtctattagaaaaccccgaacaaaggtttttaactaaattgttttgcgttgaaatcatttgcgaaagaacacacaaaatacatgaggagtaaaaaacaataaatgaattgcaacaaattaattatacattttgaaattatatttaacgaacaaaattaatgtagtgtgtaaagaaaagcaaacaaaacatgaaagtaaaacaagttttaagcaaaacaaaatactttgaatatatacataaattgcaagtaaatagaataaatgtcactcactctttttatttaagtcttgtgccgctcgataattcctgggattgaaacgtattttcggaactcgaaatacgaatgacagctaaatttgattttcgtgtgaaaaactaaaggaatcctccccagatctcaatgttggagctcgtcgtgctctttcttctcagttccgtaacctttttctgtgcccacctggaaagcccaaccacaaattgggcatatttctatgcatcttgtccaatcgtcatggggttactatccgctggactggtttacataaatgtaggttttgcctccgtgcaatacgagtatatcaaatatttcatttttttttccacatagaaatagaaacagacgtcacaaagaattatttgaaaaagatgactttatttcggcgaagtgttcaaataaaaatgtattaaactatttaaaaacaacaaataattatgatgacttggcaagagaacaaattgcaattcggaagccaatgagagcgagggttattcgaacgttctacagctacgattagaatgaatcctatgagattgaaacctattaaccgatggtcactacttggctacgcgtcgtcttgtcgttggtgtggtgggtgctccggcgctcggtggtttggggatctgcaatggataatcagtttttagaatccgacgagattttagttacaatccagatatcttacagaacgtatgggtcttggtgtaagggaattggcaggcggcggctcgcgaggttgtggtccatctggatgtcccactacggtgacggccacgggtctctggtcggaaccggcacgttccatgctctcgctgcgagaggcggatccggagcgcttgaacatgccggaaagtcggccgcgaagatccttcttgctcgatctcatgtcgctggccacgctgatgtccgagtcagatccttgaatctgcaaacacatataggttacatcagcacttaaatgctaatcgtaggtagttcttactgaaatttcactctcggaattgcgactgcttttggtcaggctgcgcagcttgcccatgatgcccttcttcttcttgcgaggtcctcgaggtatgtcgctctgtgtggatccaccggatagccgcgaatccaggcgcgagtccaagctggagtccctgaccaggccacccagctcagagtctatggattgcatggaggacacgctgccatcgtcctggcgccaaatattctgcaaggagtatcaaagttattaaatgaaatacatatacagttcatagaacatggcttaagcgaatctgttttgcgtacctgatctctttgtatggagtgatcaagtgagaggctcttccgaatcagactgccattgttggaggagttacgggacaagcgtccaccgcctcgctgcgatcctgccgcacttgccaccgaactggtgctgccatgcggatcgttctcctgcgaagcagcccgacgcagattactcctcctcattcggctgcgctcctgttcgtcctcgttgacccgctggaacttgcgcaactcctccgaggcttctgccagtctggccaggacactggtgatctgggaactgctcagagtgggcgaaggcgagcgactgcggcgcacattgggttgctccggtcgcaagttcttgtcgtagccagagctgctgctgcttcgagctgatccgccgctgccaactattttcaggtcaggagctatcttcacaagctcatcaacggtctgcaaaagggcgcccaccttacggtctccgccatctgcctccatgcgtcgcttgatcagctccttttcatagcgttcacgctggaattaaacattaggaaatggacattatttcattattatcattcgaaatattctaaattacgttaaatgaatatgaatgcgaggtgaaaaaatatttaaacaacactgacctctcgtctcagcttttcgttggaggtccgcagctttgcgtgtacgtcccggagctccaagagatcgcactgcagctcggcgatcttcttgcggccctcctccatttcctcttcggtggcccgcttgatctggtccagcttgcgctttgactccagccgctccttgtcacgctcccgttccacttcgaagagagtctgtcgcaagtctcgcgccagagtggaggtttcctgcagcaatcgctgctgatcctcgcgctccttctgccaggacagctccagcttggtcttcatgcccggcagcttcgtgctgcccgaaccgatgacgcgctcctcctcgaactcgttgagcttcgactgcatctccgatatcttgatctcattggcactgcgctcggagacgagctccgtttttatcttgctggactccagcctcgactcgaccagctgatcttccagatgaccaatctgcaatcgaaaacatatattagcttcgtgccaaaggtagtgtcttcagtgttttcaaacctgctgttcgagataggcaatcttgctcttatcatcatcatcgctgctgtgcatggagccgcgactctgtcttccggtattgttggccttgaggtcgccaatcttcttctgggccacttccagcatctgtttgaatgcatcgcgatcctttttgaaacgttcgcactggcgctgtttttaaggatattattatgtgtgatctttttaatatataatgtatataattgtttttacctgcattgaggttaattctccgctcagattcttcacctgttgctcatagcgaagtctaactgtggccacttcggatttcatctgcagttcagtgctctgtaatctgtaatatacaaagagcacgaattcaagtttaatatctaacatttctttgtctaatctttgagaaggggcgtccacttactgttccttgagctccctgatttctgcctctcgcctcgctccgtgtccattaagcgaggattgcgcctgctcaatccggttgtagtcgcttagcttgccattcagatcgtcgttatccttgcgcagctggaagaccaggtcgatgttcatctcattctcccgacgcaggcgctcatactcgtgctccttctccgccagtttgtttttgagaacggtgcgctcgtactcggccccattgccgttgaccgttttgagagccttggcctggagatcggcgatcctcttctgggcctcactcagtttgcgagccatgtcggtgcgctcgatgcgaatggtgtccatttcggcgattttctgcttgctggcattcagttcggcctggagactctgcttctcggtggtgagttgggcacgcatcaggatggtttcctcggagagcttctcccagtgattgttgagatcctcgtagcgtttctgttcggcgctcagtgaggcctgcacttcctccacttgcttcttgagatcctgcacctgtttgctgtccgatttgctagccttggtctttagatccttgatctccttctccaaactggacttgctcttctcggccgacttcttggcactgagcagttcggcatctagttggctgatcttggcctccagtttttccttctccttggcctgtttttccatgtccttctccaggctggacagcttctccttttcccgcttgctttgcgactcccaggtggacttgctcgtttcgcccagcttcagttgggcttcctgcttcttcaccttgtcctccaagtccttcagcttggagtttagcttcttggcttcctcatcgccgcgtttcagtttttgctccaactcgctgaccttgctgcttgatccgttcaggagtttcaatcgctggacatcgccttcggcgagggaaagcttttgcttacacttccgcaaatcctcctccagcgctcccttggccgattgcagggctttcagctgatcggtcccgctggagctgagcatgacgcgcatttcgctgatctcgtcctccagctcctccacccatttcttgagatggctcttgggcgtcaggtcgtttaccctcttggcggtgcgcggtggcagcttgtcctccgcctcaagctgcatccgtttgagccgggccgtcagctcgtccctttcccgttgagcttgggccagggactccttcatcttttgatccacttctccagtcttttcgctcgcctttcgcagcgccagcagccgtttgttctccttggccagcttgtcgttctccgtttcgagtgtgtccagcttacttagctgattcttgagcgagtccaccgtctgctccttttcggtaagcgtcctgcgaagctggaccaactcttcgttgagcgtcttcaccttcttttcggccgcactggacgatgttccgagactgagaagcgaggacttgctgccattggagctgtcctggcggagctttgcctgcagttccctcacgtactttttggactcggcgttctccttctccagatcctccaccttgagtcgtagaattgaggcctcctgctcgttaagctccaagagaattctcagctcggcgggatcatcctcgtcggagattccctcatcgcgatcagcatggacctcgggagccaatcgatgaggatgcggtgtgggactcagcttgcgacctgaagtacagtgagaaaataaattgtcaagtttgcaaatataacatattaatcacgatttaagttagttactagcaattggacatagattttatgattagttacggttaaataaatgtgcagccgcaaaaaatggcaattaaccgattcggtttattcattaataagcaaatgaaaagtttaaacttaaatcttagttagttggttaagttaaaaaccttgaaggtcagttatgaaaaaaaagtcactccagctatggaatttatgtgaccttatcctgaatgaaagtggttactttacacagttgtcacttaatatgaaaaattcaaaaattaaattatatgatgaacatgttaaaaactacagaactttagattgagttattctgattttgcatttcaaagtcaaaagtgacaaccatgtcagtagtatttggatgacttaatcctgatgaagttgtttacgaactaaagttaagtacttagttagattaaggctctacttcgctgtattgtttggttcgtacttcttgagcgcgttgccatttttttcaactgcatcatcaaagactcattttcatcctcgaaacgagtcacctttttcctcaaatgttcagcctgaaacacaaaaacgtgatttattgcaactgaataatgacgagtgagtaagaattatagatcgaatactcgtaaacccattcagagatcgttttcgaggataaaaatagttttgcagagctcggacgaataaaaaagaacataaactggttctacaaatggttactacacgaaaaaaaaaggcattgtatcggatcgaatccttttggctgaggttcttggtacctgctccactcaaaaggacatgtgaaatggcgctgggaaagagcagcgaaccggactgtcccactctggacgatgacgatggtggaaagagccccgcaaatggagacgacattgtttctctttcgattgaaacatttctatcgggcacttcgaaatcggtttgcgtgacagccacattggaggtcaccaagttctccacactggtagacatatcgctctgaaccgttgccactgtctgtgtgcctcggggaaaggccaccacctcgagtggcacctcggtttgagtaccacaactgaatctaacacgctttcgctcgcgatccctaagtcgctgaagctttgcgtaaaatggtcaagtgattagtcgagtgggttgtgtgcgtcaatgggcattacctcttcttccgcgaattttagttggtcctttaggtctgtctcccgctcaatggagtcctgcagctcgcgttgcaagtgctgcggatcttcttgggagccaccacgcgtcaaggactctcgggtgaatttggcatccgccgacgtcgacttgcctaggacacccagcatgggtgccttcttcttgccaggattgcgtagctcctcggcttccgcctaggaagtttatttattagtaaatacttttggaaatcaacttagctgattaacctgcaactttcgggttagctcattggagaaacgcagctcctcctccagtttcttgatcttattggaaagctcagcattgaaggaactttggcgttcctgctccagggtttcgatcttgcgatcactcttcttcaacttgaagctgagaatgcgacagtttttggtggccttctcgagatccttctgcagactggtcttggccttgacctcgtcgtcgcggaaggtgtcctgcacctcgtccatctctgcctgcaggttgagaatctccttcttggcgctttggttctcctccatgagctcctcgcagatctgctcggcggcctgtagctttcgccgcagctcggactcgctacccttgttctccagctccttcatccgcaagttaagtttgcgtttgtcctccgttacccgatccagctgctccttcatttcgttcagcttctgctggagattaagtgcttccgaggctgctgtccgattcgaggcggtatccatggaggccagacgtcgcagaagaatatcactcttttcccgctccgctttttccgcccgtgtcttcatcgtttccagctccagttttagcgccttcatttgctcttgcatgccatttgtgtcctggctcttggatgcagtgctggcggtgctactggtgctgttggagtgggatatcgatgcagcgggaacggtttgtcttttgatttctttgctagccactgaatccgcctccttgcgacgaaccgagctcgaactcgtcgaagaactggacgtagacgtgacgaccttcacctcattgctggcggatgtggaatttgaggttttcagggaggtgctgctgctgttactgctggacgccgtcgtggtggaagccaccgccactttctttggcggtagggcagctcgcttctgttcggcttgggccaattggtttagggaagtacccgacttgctgcgctccggacgatcgggtaccactggtgtgggtgtagctgtagactcgctttctctaatagataaaatttaacattattatcttgcttatctctgaagattgcaattgcttactcttccctccgcggaactgatcgctcccgactgttttcccgggagttgagactgcgctgcttcttgagaagattcattttacggacacgctctgctagactgtctgtcgataggatgactaactcatctggaatacttgaagttttactgggtgaggatgtgacacgggttggcggtgtaatggcgtgttccacctaggaaatacaaatcacgcagagcgtaaaagacatcttctatagccggtcaccatgcaatcttacctccttgatgtccaaggcggtggtatggcgtcgcggtggaaccggcagctttacagtgacagccacatcctgatcctcggcggaggatgctgctcgactggtggatgccgtagccggcgggcggcgagccacattgtccggctcgtcgatatccggcgtggaggcccatgactgcggacgcttcctcagctctacattgaagtggacaactaggctcagtaagggcgtcaggtgtgttgcatgcaggtgcaagttgcgagttgcagtttgcaattagcgttcgattccactcggagccgtgggtgcgagagtgagacaaacggatgccacagaacgagcgagagagagagcgtgggagcgcagtacagatcacgcgtggcatggtagtagttaacattaacggttcatttaatgcagagattagtgttgagagaaagtaagagagagcgagacagagacagacacagagcaatagagatgacacagttggcggtggttttttgtgcacacgcagagtgagagtgagagagataagtagacaaacacattgattaagattcgtaacaattttttaagcaacttactataactaaatgtcagaggaacaatttctcaatggtaaaaatactttaagaaccaaattatttcaaaaactacatatattgttatgtttctagcaggtttatgaaagtataaaacagtgaaattaagagtttggacaaatttttctagtttactagttgcattgagaaatcgtttttttaattaatacatgtattaaacataaacaattttaatacttaaaacaataaccgattgacaagggtactgaaactatttgaattctacacaaacattataatcaacaacttaacaaatactattaaatagattaagcttataatgcatataaatattccatttattccacgttctcgataccattactatgattttttgcgagaacacactcagctacaaagttaagttagcttctagcgctgattaacaataaacaaaagtgatcgtctttattttaatcataaagtttatagatttcttaaccgttgcgagtggcattcatacctatatcattgccattagttgcgtttgcactggtaagattttgagttgacgtccacgtccgcgaagagggtctataaaataaagtattatgtatgttcaaaggtggaaatcccgggaagatcttaccgagaactctgggcatcggagagattgggcgaggaggcggccacctcttcgccggctctgcgggctccatgctccttgtaatcccggaagcagcgcttacatcgcgtgggataccgagtctggggatgaaagccgagtgggcacaactggtcgcctttcagcgatgggtacagatgatgcatctgttctcgtacaacttatcagcttttctttttctgcaagagttgaagtgtgaagtcctctcaagccaacgctttattttataattaacacggtatgcgtaacatctcactactggttttatttatttatttttttctttttgtttaaaatcttttaaatttacatttgctatttctatgtacttttcgcacgatcccaatacccaattgactgcgcaagtctgtggaatttctggcactaagccaaatcgacaaaagaattttgtacacgttcatcaaatacttaaacatttacatttcgttatcattcacttggccattggttctaaattgaatagctgcctggtttgatggctattgtcaacgtgagttggaagtgcagatgtagatcaatgccttcgattaattaactatccctcattggaagacagatatattaactctgagaaacaaaaaatgaaactgatttaaaaattaacttactaaaaaaaggaaatcagcaagtcgatttaacatacatatgtatgtatatcttggaatttattctatttttaaaaagaggtgataatatgcattcttatattcgcattgatacacatatacaaatattaactttaactataattataaaaatgtttaaaatctggatttaaatgtaaccattgctaagaatacttaaaaaatgataagtaacttactagttactagtactatgattgaagaaaaaactcctaacaacaaaagcttcacatccttaaactttgacttttctaattcaatttcaaatcatccttcatatctgtcacttcagtcaggcataaacaatcgaatggaaatggtaaatataaacaataacaaatatgtatccatctatttgagtatttttagagcgatctatgagtagaaagagagcgagataagctggcacaggtggaagctagttgcgcaggcgattttccgccgcttgcgcatgttttttgttcttttggcgaaaatggcg

SEQ ID NO: 40214 - DNA, 5502 bp, DROSOPHILA
atgcatcatctgtacccatcgctgaaaggcgaccagttgtgcccactcggctttcatccccagactcggtatcccacgcgatgtaagcgctgcttccgggattacaaggagcatggagcccgcagagccggcgaagaggtggccgcctcctcgcccaatctctccgatgcccagagttctcgcctagttgtccacttcaatgtagagctgaggaagcgtccgcagtcatgggcctccacgccggatatcgacgagccggacaatgtggctcgccgcccgccggctacggcatccaccagtcgagcagcatcctccgccgaggatcaggatgtggctgtcactgtaaagctgccggttccaccgcgacgccataccaccgccttggacatcaaggaggtggaacacgccattacaccgccaacccgtgtcacatcctcacccagtaaaacttcaagtattccagatgagttagtcatcctatcgacagacagtctagcagagcgtgtccgtaaaatgaatcttctcaagaagcagcgcagtctcaactcccgggaaaacagtcgggagcgatcagttccgcggagggaagaagaaagcgagtctacagctacacccacaccagtggtacccgatcgtccggagcgcagcaagtcgggtacttccctaaaccaattggcccaagccgaacagaagcgagctgccctaccgccaaagaaagtggcggtggcttccaccacgacggcgtccagcagtaacagcagcagcacctccctgaaaacctcaaattccacatccgccagcaatgaggtgaaggtcgtcacgtctacgtccagttcttcgacgagttcgagctcggttcgtcgcaaggaggcggattcagtggctagcaaagaaatcaaaagacaaaccgttcccgctgcatcgatatcccactccaacagcaccagtagcaccgccagcactgcatccaagagccaggacacaaatggcatgcaagagcaaatgaaggcgctaaaactggagctggaaacgatgaagacacgggcggaaaaagcggagcgggaaaagagtgatattcttctgcgacgtctggcctccatggataccgcctcgaatcggacagcagcctcggaagcacttaatctccagcagaagctgaacgaaatgaaggagcagctggatcgggtaacggaggacaaacgcaaacttaacttgcggatgaaggagctggagaacaagggtagcgagtccgagctgcggcgaaagctacaggccgccgagcagatctgcgaggagctcatggaggagaaccaaagcgccaagaaggagattctcaacctgcaggcagagatggacgaggtgcaggacaccttccgcgacgacgaggtcaaggccaagaccagtctgcagaaggatctcgagaaggccaccaaaaactgtcgcattctcagcttcaagttgaagaagagtgatcgcaagatcgaaaccctggagcaggaacgccaaagttccttcaatgctgagctttccaataagatcaagaaactggaggaggagctgcgtttctccaatgagctaacccgaaagttgcaggcggaagccgaggagctacgcaatcctggcaagaagaaggcacccatgctgggtgtcctaggcaagtcgacgtcggcggatgccaaattcacccgagagtccttgacgcgtggtggctcccaagaagatccgcagcacttgcaacgcgagctgcaggactccattgagcgggagacagacctaaaggaccaactaaaattcgcggaagaagagcttcagcgacttagggatcgcgagcgaaagcgtgttagattcagttgtggtactcaaaccgaggtgccactcgaggtggtggcctttccccgaggcacacagacagtggcaacggttcagagcgatatgtctaccagtgtggagaacttggtgacctccaatgtggctgtcacgcaaaccgatttcgaagtgcccgatagaaatgtttcaatcgaaagagaaacaatgtcgtctccatttgcggggctctttccaccatcgtcatcgtccagagtgggacagtccggtcgcaagctgagtcccacaccgcatcctcatcgattggctcccgaggtccatgctgatcgcgatgagggaatctccgacgaggatgatcccgccgagctgagaattctcttggagcttaacgagcaggaggcctcaattctacgactcaaggtggaggatctggagaaggagaacgccgagtccaaaaagtacgtgagggaactgcaggcaaagctccgccaggacagctccaatggcagcaagtcctcgcttctcagtctcggaacatcgtccagtgcggccgaaaagaaggtgaagacgctcaacgaagagttggtccagcttcgcaggacgcttaccgaaaaggagcagacggtggactcgctcaagaatcagctaagtaagctggacacactcgaaacggagaacgacaagctggccaaggagaacaaacggctgctggcgctgcgaaaggcgagcgaaaagactggagaagtggatcaaaagatgaaggagtccctggcccaagctcaacgggaaagggacgagctgacggcccggctcaaacggatgcagcttgaggcggaggacaagctgccaccgcgcaccgccaagagggtaaacgacctgacgcccaagagccatctcaagaaatgggtggaggagctggaggacgagatcagcgaaatgcgcgtcatgctcagctccagcgggaccgatcagctgaaagccctgcaatcggccaagggagcgctggaggaggatttgcggaagtgtaagcaaaagctttccctcgccgaaggcgatgtccagcgattgaaactcctgaacggatcaagcagcaaggtcagcgagttggagcaaaaactgaaacgcggcgatgaggaagccaagaagctaaactccaagctgaaggacttggaggacaaggtgaagaagcaggaagcccaactgaagctgggcgaaacgagcaagtccacctgggagtcgcaaagcaagcgggaaaaggagaagctgtccagcctggagaaggacatggaaaaacaggccaaggagaaggaaaaactggaggccaagatcagccaactagatgccgaactgctcagtgccaagaagtcggccgagaagagcaagtccagtttggagaaggagatcaaggatctaaagaccaaggctagcaaatcggacagcaaacaggtgcaggatctcaagaagcaagtggaggaagtgcaggcctcactgagcgccgaacagaaacgctacgaggatctcaacaatcactgggagaagctctccgaggaaaccatcctgatgcgtgcccaactcaccaccgagaagcagagtctccaggccgaactgaatgccagcaagcagaaaatcgccgaaatggacaccattcgcatcgagcgcaccgacatggctcgcaaactgagtgaggcccagaagaggatcgccgatctccaggccaaggctctcaaaacggtcaacggcaatggggccgagtacgagcgcaccctgcgcaaggataacgacgatctgaatggcaagctaagcgactacaaccggattgagcaggcgcaatcctcgcttaatggacacggagcgaggcgagaggcagaaatcagggagctcaaggaacaattacagagcactgaactgcagatgaaatccgaagtggccacagttagacttcgctatgagcaacaggtgaagaatctgagcggagaattaacctcaatgcagcgccagtgcgaacgtttcaaaaaggatcgcgatgcattcaaacagatgctggaagtggcccagaagaagattggcgacctcaaggccaacaataccggaagacagagtcgcggctccatgcacagcagcgatgatgatgataagagcaagattgcctatctcgaacagcagattggtcatctggaagatcagctggtcgagtcgaggctggagtccagcaagataaaaacggagctcgtctccgagcgcagtgccaatgagatcaagatatcggagatgcagtcgaagctcaacgagttcgaggaggagcgcgtcatcggttcgggcagcacgaagctgccgggcatgaagaccaagctggagctgtcctggcagaaggagcgcgaggatcagcagcgattgctgcaggaaacctccactctggcgcgagacttgcgacagactctcttcgaagtggaacgggagcgtgacaaggagcggctggagtcaaagcgcaagctggaccagatcaagcgggccaccgaagaggaaatggaggagggccgcaagaagatcgccgagctgcagtgcgatctcttggagctccgggacgtacacgcaaagctgcggacctccaacgaaaagctgagacgagagcgtgaacgctatgaaaaggagctgatcaagcgacgcatggaggcagatggcggagaccgtaaggtgggcgcccttttgcagaccgttgatgagcttgtgaagatagctcctgacctgaaaatagttggcagcggcggatcagctcgaagcagcagcagctctggctacgacaagaacttgcgaccggagcaacccaatgtgcgccgcagtcgctcgccttcgcccactctgagcagttcccagatcaccagtgtcctggccagactggcagaagcctcggaggagttgcgcaagttccagcgggtcaacgaggacgaacaggagcgcagccgaatgaggaggagtaatctgcgtcgggctgcttcgcaggagaacgatccgcatggcagcaccagttcggtggcaagtgcggcaggatcgcagcgaggcggtggacgcttgtcccgtaactcctccaacaatggcagtctgattcggaagagcctctcacttgatcactccatacaaagagatcagaatatttggcgccaggacgatggcagcgtgtcctccatgcaatccatagactctgagctgggtggcctggtcagggactccagcttggactcgcgcctggattcgcggctatccggtggatccacacagagcgacatacctcgaggacctcgcaagaagaagaagggcatcatgggcaagctgcgcagcctgaccaaaagcagtcgcaattccgagagtgaaatttcaattcaaggatctgactcggacatcagcgtggccagcgacatgagatcgagcaagaaggatcttcgcggccgactttccggcatgttcaagcgctccggatccgcctctcgcagcgagagcatggaacgtgccggttccgaccagagacccgtggccgtcaccgtagtgggacatccagatggaccacaacctcgcgagccgccgcctgccaattcccttacaccaagacccatacgttctatccccaaaccaccgagcgccggagcacccaccacaccaacgacaagacgacgcgtagccaagtag

SEQ ID NO: 40215 - protein, 1833 aa, DROSOPHILA
MHHLYPSLKGDQLCPLGFHPQTRYPTRCKRCFRDYKEHGARRAGEEVAASSPNLSDAQSSRLVVHFNVELRKRPQSWASTPDIDEPDNVARRPPATASTSRAASSAEDQDVAVTVKLPVPPRRHTTALDIKEVEHAITPPTRVTSSPSKTSSIPDELVILSTDSLAERVRKMNLLKKQRSLNSRENSRERSVPRREEESESTATPTPVVPDRPERSKSGTSLNQLAQAEQKRAALPPKKVAVASTTTASSSNSSSTSLKTSNSTSASNEVKVVTSTSSSSTSSSSVRRKEADSVASKEIKRQTVPAASISHSNSTSSTASTASKSQDTNGMQEQMKALKLELETMKTRAEKAEREKSDILLRRLASMDTASNRTAASEALNLQQKLNEMKEQLDRVTEDKRKLNLRMKELENKGSESELRRKLQAAEQICEELMEENQSAKKEILNLQAEMDEVQDTFRDDEVKAKTSLQKDLEKATKNCRILSFKLKKSDRKIETLEQERQSSFNAELSNKIKKLEEELRFSNELTRKLQAEAEELRNPGKKKAPMLGVLGKSTSADAKFTRESLTRGGSQEDPQHLQRELQDSIERETDLKDQLKFAEEELQRLRDRERKRVRFSCGTQTEVPLEVVAFPRGTQTVATVQSDMSTSVENLVTSNVAVTQTDFEVPDRNVSIERETMSSPFAGLFPPSSSSRVGQSGRKLSPTPHPHRLAPEVHADRDEGISDEDDPAELRILLELNEQEASILRLKVEDLEKENAESKKYVRELQAKLRQDSSNGSKSSLLSLGTSSSAAEKKVKTLNEELVQLRRTLTEKEQTVDSLKNQLSKLDTLETENDKLAKENKRLLALRKASEKTGEVDQKMKESLAQAQRERDELTARLKRMQLEAEDKLPPRTAKRVNDLTPKSHLKKWVEELEDEISEMRVMLSSSGTDQLKALQSAKGALEEDLRKCKQKLSLAEGDVQRLKLLNGSSSKVSELEQKLKRGDEEAKKLNSKLKDLEDKVKKQEAQLKLGETSKSTWESQSKREKEKLSSLEKDMEKQAKEKEKLEAKISQLDAELLSAKKSAEKSKSSLEKEIKDLKTKASKSDSKQVQDLKKQVEEVQASLSAEQKRYEDLNNHWEKLSEETILMRAQLTTEKQSLQAELNASKQKIAEMDTIRIERTDMARKLSEAQKRIADLQAKALKTVNGNGAEYERTLRKDNDDLNGKLSDYNRIEQAQSSLNGHGARREAEIRELKEQLQSTELQMKSEVATVRLRYEQQVKNLSGELTSMQRQCERFKKDRDAFKQMLEVAQKKIGDLKANNTGRQSRGSMHSSDDDDKSKIAYLEQQIGHLEDQLVESRLESSKIKTELVSERSANEIKISEMQSKLNEFEEERVIGSGSTKLPGMKTKLELSWQKEREDQQRLLQETSTLARDLRQTLFEVERERDKERLESKRKLDQIKRATEEEMEEGRKKIAELQCDLLELRDVHAKLRTSNEKLRRERERYEKELIKRRMEADGGDRKVGALLQTVDELVKIAPDLKIVGSGGSARSSSSSGYDKNLRPEQPNVRRSRSPSPTLSSSQITSVLARLAEASEELRKFQRVNEDEQERSRMRRSNLRRAASQENDPHGSTSSVASAAGSQRGGGRLSRNSSNNGSLIRKSLSLDHSIQRDQNIWRQDDGSVSSMQSIDSELGGLVRDSSLDSRLDSRLSGGSTQSDIPRGPRKKKKGIMGKLRSLTKSSRNSESEISIQGSDSDISVASDMRSSKKDLRGRLSGMFKRSGSASRSESMERAGSDQRPVAVTVVGHPDGPQPREPPPANSLTPRPIRSIPKPPSAGAPTTPTTRRRVAK

SEQ ID NO: 40216 - DNA, 9232 bp, DROSOPHILA
ggcacttcgaaattccaaccacaccagccccatcgaatgagatctggatcttggagagggagctggacgcagtagatccatggaaaggcggcggtgcacgtgttcgtcaaccttttacgttcggaacttgtgtctggcgcacaaatacatcagaattaaactaccaaacccatttgctgtctctatgcttcgttcttagacattattaattaatgctaaaccttgatctaatcattatttataaacaaaagaataaaaaacactatgtgcaagatattcgttcagttgccgagagctttgaatatcttcaatgtaatcgctgtaatcgttatgaaattataaattgatctacacaaacaccaaatccacaaacagacaagttattcacttcaaaaacggttatgaaacaattgttgagacatagaatttaagcgaaagctgttggaatattcttatcgaatatacacggtgttcaatagagatcttaatcagatggaatagtacaccaaatattaaacatattcagatttgttagttgatgtgaaataaaaagtataaaagttactgaattcttttcttcgatcacttgtggcgttgccagataatcaagtaaactcaagtaagggcaactaaagtaaaggcaactatcttaaaacattttctggatttggattaagattgaatggatctgaattattcattatctctgaactgatgaatgaagttattaaactttgaatacgatcttttttctatctttatctttgctttccaccaattagtcgagtatttcaataagctttttcaactttctgtgaataaaattgaatttctagggtggaccaaaatggcgctcaaagtttcgcacagaaccgttgaattccccagtttgttggtattttttaggtcgtttcttggcgcctcgcagcggcggtatgcttccacagtcgcagtgcggtcactctcacggacgtgtttttttacatcggatcgaaaataaattaatgcaaagctaaatcacaaacgctagggatcggcgagctcgaaatcgaatcagtgcaccggccgaccgacggactttaactgcgcgcaagctaaccgtaggttaagttaacgctcagcactgcaaccactgcagttgcataaccgttgccgaaaatcaagtcgaaaagtcggagaatcgcggccaagcgaaagccccaaaagttcaaaggacaatagaaagtggcaagaggaagagaggagagcgtgctaagagcccctccccctggggccccgccccccacacctccgcccacaaagtgccttaacaatatagtgcgttttgccaaagttaaaaccaagtgcgcgtccaagtagccgcccatttcggtggagcctattccggaactgggaagacaacgaagatggcccagaacacggccgacactctcatccacctgatcgccggcgggtaagtctgcctgcctgacattctccctactgcgtcttatcgcaggtcaggccatcagcgtagaacgaaaccggtttgctcccggcctctaattgtaattgctcggcgggaacggcgcaattggcgattagatttgggctggcccacgaaggggagctgaactattttggcgccactgccaaaagggagcaaaccgaaaaagaaatgcggccagcgcagggaaacacacaacacaaactgatcttcgggaaacatgctacgttcacgtgctttgcattaaaagaagggtatttgttgttcgataaatcgcagctaaagtgagcgaaatacgcagaacatatgtaattaattaaagcgcgcctgcagcgaacaaacattcataaacagcgcatttctgggttcattttccgcaggcaatgtccacttggattcattccgattcccctggacaggcaattgctttgttgttgtttcccttatggacttttattgtggcttttatatgcggctatttttagacgcgtcgcatctgaatttatttttgttttcacctgcaccctacacacacaatggccggcacattagttcttccacattagtttgcccagcggaaaaccagtttccagcgatcgagaatcgatcccaagtcgagcccctggtcagtcgggaaacgatcgcatttcaattgaattacgctcgaaatacgaactttgttatttatgcttgacagctctcagctttaaatagtttatttttgttgatatttatatttgggatagtaaacaagtgtttatagagtttgtttataaagtatctcctagtccatgatagtttttccacagaaaatatttgctatacttcgctccttatgactgcaatccagatttccactttataaaaacaacagctcaccgtttctgacaacttttgatcgacgcgggtggccttggtgaaggcctttgatagcatgaccccccacctataataattccgctgaatggcacttctaatgccccgccacagtggcaatcaagtctctccgggcaatttgccggccggcagtgcaagtccacttatcagcgggggaaaaaagcaaccacacagttgtggcacccacccatgtccgtatgtatccatgtccgtatgtatccgtgtccgtatctaacgagtcgctgcacatatgcgtagtatatactttagtgggctggaaatacgctgcacgttgcaacctgagctggctaataccccagttgttctggccgccttccacttgtcgtcgcttgccgggtatctcgtgttggtacacgttgcgaaaacaaatcgaaaggcgtaacaaccttgcctccccgccacacaatgctatcgcagcaagtaagccgcacggcaaacaatcaaacgacatccatctaatcgggcatcagaggcctccaaggggcttacataagttgaagaggggcagtgcacattactattaaggaactgcacagctaacattgttctaagatcggaaaacagtttactttatttataatttatatccatttgtagcttagtgtttatagtgaaatatttcctactatcgccaattagcagcgttgcgaaatgtctgatctattccctaaaatctttgatttggcacactaatattgcggatttcgctatagcccacatataatatagaatatatgatataaaatagatggtgcattgtattttcctacatactagctaaaaacaattctaaattgagcttggcaagcgatttcgaatttgttttggttctcagcgagacagcacaggcaaataaactttttctgggacactgactcagttgaaggcgagtggggaatgcaacaaacaacagatcccaaggtgttcgatgaggtttttggggggataatagcaatgtcactatggctacaaggtgcacattgctctttcgattcctcgtctgcagttcaaataagatatagtaacgcgctttctcacatagtttcattattccaaacttttccatcggctggcatttgtttgtatcttgctcgaccaggtcaaaatattcaaaaaaaaaaaaaaaagtatattcctcgcccggttttcagacgtgtctctctgcacgtacgcatattttgaaaagagcaccttttttgaaaggttgcaataagcataagaaagtcacttcaatggaaatggtatattttaatctttgaactttcgatatgatattaagatttattgtaaagcccattggcgcactgaaattgtgtcaagggcgtctttttttataacactcttgatctagacacacattctgatatttcagaatatatatatatatatatttatacggaagcgagaaatgcgaatgaaaattcggtgatcatatagaagatcgcgtgccaagagttattcgaaattaataggaaaacattattattctagtctagaattagagagcacagagctcgttcgtaaccctcgattcctttgacccataaacaataacattgaaaactttccatagatttcgtaatccatctcaaagaagccaaaggcagcaggagccaaagaaaaaacgtgaaaataaaagcggcattgataagatgggagcctaggtctgcgaaatgccaaaaccattgaaaatggcgtactatatttgcgttgataaggaaaggcttcccgaaaagttgtctttatcagtcgtctatgtgtgtataatgtgtgtgtgtgtggggggctgcccttcctcgagcagttggacaaaagtcaccccagcagagctgacgcattgccgcccagcggtattatcactcaactccccttctgtatttacgtatcccccatagacgatgtctgcgggtccaaaatttccgctcttatctcggcaacgtgtgtgttttttcggcaggaatgtcaaggaacagataaatcgcacattaactggttgcaaatggcacgattctcgcacatgcgtcgccaaaggccatcgatcgggcatagctaagtgcatatatatagatctgaatatatgtgtgatcggactgaacgtacttggatgcagttgtaaaccttactaattgggccacagagaaactaagtacttgacccaatatttattgagggatttatttgcgaatgaacttatactgcgagctactttgtggagctattaatctcagctcacaagcatgactggcactcttgcctgatttattgctaaatggtatagctataggataccctctaatattcatacccctcaattctagttcatcacatgcaagtggtgaatcgattcattaatcgttccactgaattgtttgtccaactgtctgggtaaattaccttcggctcacgtggaatgggtagcagttagcttaattctcgcgtgatgtgccagccagatgctaattggaacccgttagtgcattgatcaaatgcgtatcatggtggttgggctggagcgatgaagggaagctctatccagatgaagtgaccaaaaggcagcatatggcatgttaattggccgcaggttccgcaggccgcaaagccattatgtcacagtcattatgcataccagattcgaggtggatcgggcagccatagaagtgctccgttctgtgcccggtggacgtggctcacagatagactccctggctgataagaggctgcttttgtccggtcagtgcaattcattcgctggcaggcatcaaaggttatcgagcgtggagccgggtcaattcgcaaccagttcgcaccggatttgaatagccgggaatcgcagcaatctcctacagatttgcgaaatcaaacgaggcagacgtctgattaaatgttgttatttttactattttattgctccaggattaggggagccattcgtgtctgtgcccaaagtatctgtgcccatcgatcaaacttctggcctcctttctctgtcatttcatttccacttctgagttgcataaccttttcccctttcgcgagcttttagccgccgattatgtgtacatagctatttaatttcacaattcccagttgccaactactgattcacaagttggcgatcacgagctatgcttctgcaaacatgtgctcatacaatatatttctagatagcaaacttaccctattgataaaaagctatctttttgggaaaggtcgtgtataattaattttttggggcactcttttgccgccgtgtaaacattaattattaatcttttgcgaaacgaaagtcaaggttacggtggcattagctagttcagtgataaatagtctaaattctgactgctgcaaatcatttcttcacacatttcatttgcatcttcttaggccatttcgcagttcagtaaacaatcgaccgaccttgcgttacatgcacttggaatttgcaacgcatcgaattggaaaatattctgtaattcgctcggctacttggtggacaacggctcctccttctttcatgcccgctcctacgtgattttcccagcccaaaacccctccattgcatcaggcatttggcaaaacgctactcatttccgatgcagccaatcaatggtggccaccacttaagtcgaaatggaatggaatgggacaagctactcgagtggtggtgctatactatactatactatatgcacggaatggaagcacatttttagccggcgtattgcgcaaatccaagaaatacgagtttgggaaatagatatttttctgcccgcttgattgccaaatgagatttattttcgtgttattcatagttgagcacttgccattgaaaatggggaggaatatatgtacttttttttttgttctatttaagtctttcaggcaatttaagaaacgtcaaagtcaaagaactaaaagaattgatagtgggaaatgtaacttttgtgatttattcctgcttggatgaggatttcgaagagattttactaactgggcatgttttgatgtttcattttcatccgcacagatccgctggcacagtgggtgccgttgtcacatgccccctggaggtggtgaagactcgcctgcagagctccacggcgttcatgacgccgtcgcggctggcggagaatgccggaggaggaccggcgaacggtggccaatcggagctgctgcggccggaacaacgacgtaagctaagcacaacgatattacgtaacagatcacagccacaggtgattgggggtgtgcgtagggtagtaccaacttcttttacctattctctcatcgcccatctaacccaccgccactgcatcctaacaagctaagcccacgaaatggagtggtctcgaacaacttcgatgcgtcgttgccttcatctccattgcctctagtctggatgcgactggtttactaactcacctgtttttgccttgcagatcatggccatttcacactgcggcatctcatccacaacgcccaaatccatgagcatcgtgcagtgcctgcggtaagttcaccctagcttccatcaactgccagttactataatgcatcgagctgctcctgcaggcacattgtccagaacgagggtccacgcgccctgttcaagggtctgggtccgaatctcgtgggcgtggccccatcccgtgccatttacttctgcacctactcgcaaaccaaaaacacgctcaacagtctggggtaagtctggttttggtacactgtgtgtacatctagccgagcagcaccaaattaatgcctggacttgatccccagctttgttgaacgtgactcgccactggtgcacatcatgagtgcagcgagtgccggctttgtctcctccacggcaacgaatcccatttggtttgtgaagacgcgaatgcagctggactacaactccaaggtgcagatgaccgtgaggcagtgcatcgagagggtgtacgcccagggaggcgtggcggccttctacaagggcatcacggccagctactttggaatctgcgagacgatggtgcactttgtcatctacgagtttatcaagtccaagttggtaagtagttgaatttaatgcgcactagtttccctccgacttaaaatcgctttcacaaacagctagagcagcgaaatcagcggcatacggacaccaagggatcccgcgactttctggagttcatgatggctggcgctgtttccaaaaccatcgcctcctgcatcgcctatccccacgaagtggcacgcactcgtctgcgggaggagggcaacaaatacaactccttctggcagaccctgcacactgtttggaaggaggagggcagagcaggactctacaggtgggtaaaatagatgagcagagtgaattttcaatttgatacgacattaaggcaatcaacttgtacttagggattcccttgttcgtgtagttcccttgaatccgtcttgaaatagaatcgaagggaatcccacttgcactccgacatgtatataagaaacatatacatataagctaatgaattatcataatgtgccacccacgaattcgtgaaatctatttaaattcttttgcgtcgcatattttttgtttgtttaccttaatttgattatcactctcgagcgtgctcactcgaggtgttttatatatgagagctctaccttagcaaattctcctactaattgtaaactttaccaactatttccacagaggcttggccacgcagctggtgcgacagattcccaacacggcgatcatgatggccacctatgaggcggtcgtctatgtgctcacgcggcgcttcaacaacaaatcgaacgagttctacgacttttagatgcctttcaaaggactggagaaggagtaacccaatctgtgcatatgtagacgcgactgctgcaactttatgtaattttatccctcgtttttaaacgatccaaaccaacgagcgcaaattcttagttaactagcttctaagtcagatatgaaacgaactcgatagacttaagacgttagacgttgaacgttggccaaccaatcgaaaaaaaaaaagaagcaaacaaagaaaaaaccaataatgggaaacacgcaccaggatcgaagtgcaccatccacaccctaaacccacttgctgcatgccacagaaggatgtggtatgccaccgcagggcgaaacgttatcaaaatttgaaaaggctgctatttagttaaagttacaatatatattgagtgtataaatgtggttgatacttggataatatagtgtacataggactcgattcgctcagagtgcattgtaaatagttaaagagtgagttcgctggcgtagttttcttagttgtaagcacaaaatgttgaatcggccgcagttgccagtagatgccgctaaatatatatatatatagatataaagccgaccgatccgattcgtaaactgtaaaagtttccgttaagtttcctcaaatgcgatatacgatttagttatcattactctactatattactttaactatattgatacaatttttgctgtttatttagtccattagttagctagttagttagttatcccccccccctccacgcaaaacgtatttcactgataatgagcaaagaactaaggaaaccactgtgaataattgattgcaatccgatttgatggtgaaatcaataaatacaacaattttgtttaaaaataacccactcgtttcccatttaatatatatgtacattatcttatcttaacaatcgtctgcagtcgaacatagttcatcttggctaaccagactgccgcccataaaagtgagatgagataagccgatttggccaagataatac

SEQ ID NO: 40217 - DNA, 1483 bp, DROSOPHILA
attaatgcaaagctaaatcacaaacgctagggatcggcgagctcgaaatcgaatcagtgcaccggccgaccgacggactttaactgcgcgcaagctaaccgtaggttaagttaacgctcagcactgcaaccactgcagttgcataaccgttgccgaaaatcaagtcgaaaagtcggagaatcgcggccaagcgaaagccccaaaagttcaaaggacaatagaaagtggcaagaggaagagaggagagcgtgctaagagcccctccccctggggccccgccccccacacctccgcccacaaagtgccttaacaatatagtgcgttttgccaaagttaaaaccaagtgcgcgtccaagtagccgcccatttcggtggagcctattccggaactgggaagacaacgaagatggcccagaacacggccgacactctcatccacctgatcgccggcggatccgctggcacagtgggtgccgttgtcacatgccccctggaggtggtgaagactcgcctgcagagctccacggcgttcatgacgccgtcgcggctggcggagaatgccggaggaggaccggcgaacggtggccaatcggagctgctgcggccggaacaacgacgtaagctaagcacaacgatattacgtaacagatcacagccacagatcatggccatttcacactgcggcatctcatccacaacgcccaaatccatgagcatcgtgcagtgcctgcggcacattgtccagaacgagggtccacgcgccctgttcaagggtctgggtccgaatctcgtgggcgtggccccatcccgtgccatttacttctgcacctactcgcaaaccaaaaacacgctcaacagtctgggctttgttgaacgtgactcgccactggtgcacatcatgagtgcagcgagtgccggctttgtctcctccacggcaacgaatcccatttggtttgtgaagacgcgaatgcagctggactacaactccaaggtgcagatgaccgtgaggcagtgcatcgagagggtgtacgcccagggaggcgtggcggccttctacaagggcatcacggccagctactttggaatctgcgagacgatggtgcactttgtcatctacgagtttatcaagtccaagttgctagagcagcgaaatcagcggcatacggacaccaagggatcccgcgactttctggagttcatgatggctggcgctgtttccaaaaccatcgcctcctgcatcgcctatccccacgaagtggcacgcactcgtctgcgggaggagggcaacaaatacaactccttctggcagaccctgcacactgtttggaaggaggagggcagagcaggactctacagaggcttggccacgcagctggtgcgacagattcccaacacggcgatcatgatggccacctatgaggcggtcgtctatgtgctcacgcggcgcttcaacaacaaatcgaacgagttctacgacttttag

SEQ ID NO: 40218 - protein, 358 aa, DROSOPHILA
MAQNTADTLIHLIAGGSAGTVGAVVTCPLEVVKTRLQSSTAFMTPSRLAENAGGGPANGGQSELLRPEQRRKLSTTILRNRSQPQIMAISHCGISSTTPKSMSIVQCLRHIVQNEGPRALFKGLGPNLVGVAPSRAIYFCTYSQTKNTLNSLGFVERDSPLVHIMSAASAGFVSSTATNPIWFVKTRMQLDYNSKVQMTVRQCIERVYAQGGVAAFYKGITASYFGICETMVHFVIYEFIKSKLLEQRNQRHTDTKGSRDFLEFMMAGAVSKTIASCIAYPHEVARTRLREEGNKYNSFWQTLHTVWKEEGRAGLYRGLATQLVRQIPNTAIMMATYEAVVYVLTRRFNNKSNEFYDF

SEQ ID NO: 40219 - DNA, 9905 bp, DROSOPHILA
gtctgatttggttatcaaatccgcccgatgctgctgacatgtttcttgaagcgatactatggttaacttcatagttcccagtaaagcgcgtgcatttttaaaccaatttgaagtgaacttgcgcaatttccgttcaatctgtcgctcagttgcagactccaaaaaggccacatcgttctcatcccgtaaaaagtggagcataaagttgttctccgtctcaatggtttcctcacttcgaaagcggagctcttctatcttggctcttaactgtttcacttcggtcatggctaaaaagtgcattgtgaatgaatgagttttgaaaacgagatctaaaatgcaattaacccaccatttctttcaatatccgcgacccgcttctccacctcagctgctcttttctctgccatttcggctttggccttaaaatttagtttgtagtccattccacgtcgcttttctggagcagatatgccacttatggatactagctgattcactgacatgggtatggagcgtttggagctggagtgccggctattcacgccatgacttccctgtgccgatcctcgctttgtttgcaactttctaagaatggaagtacggcgctgtctcaatcccaataacaactttggatcgtttttctcaaggaattcgaccattatgtggttctccagccttaaagtagccacatcattatgcacttgctctatggtgtggagcatgtcgatggcgtccaaactggacaatcgcagttgccgctcttcttccgtaaagttgcgaaagtcctccagatagaacttgtagataatagccacgacgtccaagtcctgcggagcagcatattcgaatacgtgaagcttgcttggatgagatttcaccgagcgtctgctctgcgtgtcggttttaaggctgtgtcctgacgtgctcatcatgagaccagtaacgttaaggaataatttatggaatttgtttgaaatatatgtattttgaccggtttgttggtgataaagggaaagtatacaatgactagattggtaacatacaacaaagtctatctagtctatccctttgcccaggcatattacaaacaaacgtgatctcattggtaaatacttttttttcagttggggccggtggtcggaacttttggagttaggacaattcaaacgaggttggcgtgatgtagacgtcgaggattgtgctcgcatcatagtaagttaaatgaaactcaaaccaaaaataaacgtgtgcaaaaaaatgatgaccaaccatgctaatattgagaaaactcaaggttttcgctgagtaaaactatcttctcaacccgctgatatgaatgtcagaaagtttatagaatgcactttacaaaagctttaacattaatattgttctattctcgcagcttctttactgcctgcaggtgtacaagggtgatgagaaaatcaagacgttcatctgggacttgataacaccgacggaggacggggaagtgcagaagattagcagggatcatagtggcctacacaacttggtgccacgaggtaggaatgccaaaggtatggtaaaagatacatttacgcacactccaactgctgcacggacgtagagagttttaaaaaaccaatacaaaagtaatataaacgaaacggtctaccagaaaaaaatagcaaacacgttttgtaaaaaaatttctttatgctatctgtactgggctctggactttctacatcattttaattgcgttcttctacttatttgtatccgtaaatgtcagatacttaaagcaagaatataatttaatttgtgtgtctaatggcctctcctccgtaaaaacttccttcaatattaaatcgaatcacccaataaagactgaaccagaacagagacataaattattgactcatatacgcgacgcgacgaaaagaagtgtgtgtatgttttgttgccatgcaaatgtatgccttttactatatcaaatctgttacttttatgtacataataaataacattttacttacataccctttaaaattcatattaactctttatatagagtagcctaaaccattttctaatttactactaatttattttttatttgctgttgttgagtcgaacaatgtgctagcttaaaaggtaacattgtaggaaagatacataatatctcgaaattttaaactatttaatttttaatatgtatttaatttttaaaatcatatatcccttgtgtatcattttcatgtataggcaatattttaaattatagccaattatattaagtacccttcaaaaacacctcttttaaacgaaaacgatcagagatccggtggtgctgtaaattcattttgattttacattttgatacctagagctttgttgtccttcagattagtgtatatatcagtctgaaggcagctagagaaatatgaatatactaatgtttgtgtaaacactacttttgctttacaggtcgcaacggtggaaagtcaaacaaagaatccacaggagtgtctactcctgctccgggctctgcatccggaagcaatagtggaaacacgactccggctcacaaatctagtgcgctggatgggtccgataaggacagcggcggcataaatgccagcgcagtagccgcggcggtcacaagcattcacgatccaaatcactggagcaagaaggagaagtacgacgctgatgcgtacttggaaggcgcctacaagaagcatttaggcagacacgccaataagtgagtcgtgtggaatcgaactcgttataagatatttccaaatttgagatggactgttgctaacaatttttttcgctctcttttccctttattttcatacattttgtttatttaatgtaaacatttacagggttttgctgcgcgtgaggatgctctattatattcaacatgaggttattggcgactttgttcagcagataaaggacaacacgcctatcaggtaggcgtggcactcggagtcatctgctaaacacttggcattcattaatcattttgtttgttgttgttgttgattgaatgattgactggctgattatcaaagagttttcattaattttgtatttaatttaaccttctgttatagatactttatagcctctttactaatgccaatttgtgtctttttttttaattattattaacccttttttttatagaactttgtgtctgctgattgaagcaatgatcagtgggcgtttcaaggttcaggtggaatgtgattctcttttattcgctatgtatctctatactgcaactctctttgtattttcgattgcttgtccattaaaatgctaacacttgtacatcttatacacgattctgctcatttgtaaccacaacatttaaattctatattttgccaactaatcttcggcgtatcgaatcttcttctatcgctgtgttttgtatcttttcgattcgtttaacaaaccttaaaaattcctaattgacctcattgcgatatctatacgtatattatataaccaccaaaaactgcagcagtacgagggccaagcagcagttggcactgaatctgaatttggaaaggtaatatccccatatattcctcaaccaccgatatcgatcgccatcgctcgtcgccctcgcttgcacgcacggtgttttccacttttaagaaaaaagctggcgaatagggaaattcacgctactcaacatctttattaacctccatacgtgcagtcgtcctcataatacaaaaaccgccaagttatacatgcaattcaataattaatttatattttttaatacgaataccaaattcaaaaaaaaaaagccatcaagaggctcaactaaccttttaaattttgctttgtatgattctgcattttgtagtggtaaatctgtagtacaaattggcaattaacaatgttacaatttttactttatttccctttatggtctcatttttgatttttgttttatttaacatcatacaaaaaattgttgaaccgagaaaattgaatttttactaaacaacgcatttcttttttcgcgcatctctcaacttccccaatccaccaaacacatttgaatgttatcgaatgtactcatcgaacgatacgatcatatgtagcgaactccccattcgcccgccgccaacgccagatcaagtgccatcttcatggtggaatcccatttgttgtgataagagcctgttggtgggaacctacaagcatggctgtgaaatgtatcgtcaaatgcgcgccgatcccaatctgtgctttgtcacccatgtgggcgccggtgcggccggtgacgatctggctgtcacgagtttgccgatgtaagtcttcaaaacgaaaacaatcaattctaaattaattcggtgtgttctaaggaatctctatttcaacgtgtaccttctgcacacacgtaacattaatattgatggtaattgataaccgttttaaccgctactgtggtgaaagaatttgagaaatgatatagaggtttttttgaacacgccggatagaaaaaacaacagatgcaaagagatataaaccatacataaacgccattgagtaattcatatacatcacactaaagtattaaaattaaaaaaataaataaatacgcttccaattagacctgaatggaaggaacgtgcaggatttgcttaaactcattttcattcccattccccacgtgcacatgcattcatctgaaagtcttggcattaaaatgtgcttcaaacattttttcagctattagcgcttaatataatattacatcaaagattacagtttggtagacagtgctatttatccatcaaatgttaaggtcataaatcataataattgttttgttgacttttaatatagactagatttaatttaaattattcaaatcaaattaaaaaagtactttcaattcacattaataattttaataatcattgtgcttgttcatcgaattctcgccgtataatttcttgataaggtattcaacgaaatattctcagatacaacagcgcaacctacggggcttccattaacgctcacattgaatgcattgatccattgacattgcgctgaatgtgtgtgtgtgcgtgtgttttgtgaattttctctcagtgttttaactgcgttgggcatggcctgcatctgatatatgatcagtaaattccattaaattgctactaacattcaaacccttttttctggaaccaccacagaaacgaagacgatgctaattcgaagcacgatgatggtgacgaggtggacgatgacggaactacaacgaccaaagactctgactctactaaactcaccgggggcgataacaaggactcgcttctcgacccggagcgtcccagttcgtctggtaagagtagcagtgaaaatgctagcggcggcaacgacaaaacggaaagcgaaaatgatgccacaaccgtttccgaatcctcatacaaatccgaagtcttgccgggcaaaggcagcgatctggatgtgtcggtcgcccagcaggacgcattatcagcaactcctgaattggcaaatacatcagatcctaaaatgaataaaaatgacgcacaagtctcagcctctgtttcctgcgatccggccgactctagttcacccgaggcggcaggaaaagctcaggggacgggggtccagactggcgatgccggagaattggacatcgaatcggagaaaaaagataacgaaaaggaaaccaaggagtcaactggtgatgctcctgctgtggaagccaaaaaagatagcgctgccattgcccgagctgaaggcgataaaacggaatcatgcactaacaatgctaccacaaacatctccaccaccactactactactaccattaccaataccaccaccaccaccaataatccatcatccaaagcggctaactctaacaacaccaccgaccatgctaactcaaactcacatttaggcttggacgaggaggagagtgtcgccggcagctatccgccaaccgtggcagccgtcgaggacgccactactatgtggccatctatgcaggaccttaacacgcgtctccggcgggtgatcactgcctatcaaaggaattacaagaaagaggaattaaaactgcagcagaaggccaaggtaggtgcaatatcctttatccacataccaacccttttcatattatcttctccattcgttgccactttaatgagagtacatatatattttatattccctttactctcagagtataaaggtatactaaattcgttgaaaagtatctaacagtcaaaattgaacgtttctgtctgtccgtattaacatcgagatctcgatgctgcaagtttgcttgagtacgttgcttgagaactgtcacgctcacgatgttttcattttcttttatttagttttgccaatttctagtgatactttaaaattagcgttttcttcaaattaaattgttatctttgagatttatattcacccacccttattaacgactatgaaaaatctaaaattcaaatagtttccgaaactgtctgttgcctaacccaaatgactattgaatcattttacattttttgttctacgtttcatgattatgttgtagtgtccaatgttagaaatatgtagttttgttgcttagctgttggctgtagttagtttcgaaccgtacaccgtagttagcgtacagaacggacagtggacattgacttggacaaagaagcggttccaaaaatgcaaccgaattcgatttacccaaagcatcaaaagctgtaaataagaaaaaatcattaactaatgcagccaacagctgataaactaaactatgtaaaacgctgacagaggattgcacttaatttctttaccatcaagaccatcttaataaaatcatcctcagcccaccctgaatctgtgacagttcctgacctttttgccgaacttgcaaagttaccaactccaccaactctttctctgtgattgtcacatttgtcccacagctccaggcattggtttcatcgacaccgccgctgtcggttcccaccactcccacccttcagtctatgcaaatgcagctgcagagcggctccggcagtggtgggtccggaataggatcctctgctcagcacgatgccagtggccggagtcttcaggcgttgatgcaatcgcagggggccagcacatccgcagcagcagccgccgccgcatcaagtgctggaggatcctgtagtggatccggccaggtgggcatgggcggagcgggagtcatgccagctatgccaaccgccgccgacataagcctaatgctcagcatactcaacaccacagatgtcaaccagctggccaacttggacatcaataaattggccatgtacctggtcagcatgaacaatgtacgttagtgatgagtacctcctctctatataaaacatttttatattataaccacttacactgccacttcgaacaatcatcccgttgcccttataagcaacccccactcaaataaatccccaacctccactcgttggctaaagcaaaaacagaaaagccacgctttgaggctctaaaagactatgaacactttaataaactccttcgaaccgatacctaaataaaaaaaaaaaaaaaacactgacaaaaaagcacgcaactacacaaaacactattaaccttactaacctgcatgtattcgtaaactatcataatataaacaaaaacctaacattttgtctaacccatatgtttaaagggtgacgtttaaagtcgtatactattataagtaaagcaattggtttttcgatttgactattcagaaaactattcgcgatatgggttcctagcagtagttctgatacccattttaacctttgtccacatactcactttgcgatggtcttatgtagaaggcacacgaaaataatgcagggaatcagcctaaataaaggacgaagtcaatacccattcccacagtggggttttgaagttttagaggagaacattttgttaactcgccttgcgactttgtatcctcccttttgtgtgtgtgtgcgttcgtactgaacgaagaatcaaaagcgagcgacgacaaaacgaacaggaggcagcgacagagctgagaaccgacagcatacacttatgcctaatttatgcaaaataaaagaaatacatacactccaatttgaacccgaatgcggtgcacacgatgttcagatggtcctctcgttggattccccgtcctcttttctcatcgcattttatctcatctcgcgaatgggaatgggcatgcgaatgaacggccaaaacggaggaaatgtcaaaccactttgcacacccggcggcagaaacaaaaacagcaacacaccgaactccttctcaaatccactgtctagtgcaaaaccgttgctttcgattccttgcctccgcttcgccttttgctgccccttgatgtggcagcaaaagcagatacaccgcaaaacagtggaaccagcaacgtgttggtcacaaggcatggggcgacatatgggaaaaggcaaaacagcgaagtcaattgtacaagctgcccttttcgatgcgcagcaatcccactgtgttggcgggctagagatgcgccaattgcaagccaaatgagaacgattttttaatatttcatattcacatatttataaatatccgagtagtccggaatcgatttgaataagggtgccgatactaaagcgatactgcgctccaatacatctgattatatatgccatggctatagaaatgtagaaattttagaaggcctaattcgggaaattccccctacaactggtcatcgctgaatgggcgacgttgccattatcaaaaggcagagaggcagcggtaaaggcagcgcaccatcaatcaaacatacaacaacaacaataacagaagtaaaaggagcgaaacaatccggtaatgtcggggggccggaagaaacggcggcagcaagaagagcaaagccaagtggttgttgctgccgttgccgatgttgttgtatcgacgaactggagttctttggtgacgatggttgctgcggctgccgcgacgtgagcagtagcgttggtggacgacttggttttattgctgtagttgttgttggccattcgatatcatcgggtggtggtgctgcctagctgcgttggctgtacttacgctgccgccgcctcgctgtatgtattagttttccatgcgagagtgcctcactctctatctctgtcccgctccctagatgtctgcaatgtgtgtttgtaattttacattttctggatttatccaatgtataattttttcctttcgtatgcgcccacccaaatgtctggggggtggttggtgctgcttctgcttctgacaccactgtttcggctactgctctcacgaactgaattattgagcgcaaaaaggagacggggataatggtgacctgttcctcttatggtttcctgttctcttctttcgcataccgcgagaattcgataaagacgcctaattgtgctcatttggactgggaatgggaattcctttgctcccccagacctccggggcggccgtcccattgcacgctgcgctgctgcttttgcttaaacctactttttgctttattctgttgattcgtttttgaagttgcaacgtaacgtgcatttgaaacacctaacatagagaagttgatggctatcctcctgtgcgtgtgattcgactggtgcgggttgccattctttttgtttccatcttcggtcccaccttcgacttgcttggaagcttttgcttttgttgctgaccgctgtcgttgctcttttttagtgacgttgttgttggtgctgccattcgatttattattttattagcatttcgctgccacttaagtgtgcacagtggagcgaatcgaaact

SEQ ID NO: 40220 - DNA, 2074 bp, DROSOPHILA
ggtgataaagggaaagtatacaatgactagattggtaacaatgaatcttctttactgcctgcaggtgtacaagggtgatgagaaaatcaagacgttcatctgggacttgataacaccgacggaggacggggaagtgcagaagattagcagggatcatagtggcctacacaacttggtgccacgaggtaggaatgccaaaggtcgcaacggtggaaagtcaaacaaagaatccacaggagtgtctactcctgctccgggctctgcatccggaagcaatagtggaaacacgactccggctcacaaatctagtgcgctggatgggtccgataaggacagcggcggcataaatgccagcgcagtagccgcggcggtcacaagcattcacgatccaaatcactggagcaagaaggagaagtacgacgctgatgcgtacttggaaggcgcctacaagaagcatttaggcagacacgccaataaggttttgctgcgcgtgaggatgctctattatattcaacatgaggttattggcgactttgttcagcagataaaggacaacacgcctatcagaaacgaagacgatgctaattcgaagcacgatgatggtgacgaggtggacgatgacggaactacaacgaccaaagactctgactctactaaactcaccgggggcgataacaaggactcgcttctcgacccggagcgtcccagttcgtctggtaagagtagcagtgaaaatgctagcggcggcaacgacaaaacggaaagcgaaaatgatgccacaaccgtttccgaatcctcatacaaatccgaagtcttgccgggcaaaggcagcgatctggatgtgtcggtcgcccagcaggacgcattatcagcaactcctgaattggcaaatacatcagatcctaaaatgaataaaaatgacgcacaagtctcagcctctgtttcctgcgatccggccgactctagttcacccgaggcggcaggaaaagctcaggggacgggggtccagactggcgatgccggagaattggacatcgaatcggagaaaaaagataacgaaaaggaaaccaaggagtcaactggcttggacgaggaggagagtgtcgccggcagctatccgccaaccgtggcagccgtcgaggacgccactactatgtggccatctatgcaggaccttaacacgcgtctccggcgggtgatcactgcctatcaaaggaattacaagaaagaggaattaaaactgcagcagaaggccaagctccaggcattggtttcatcgacaccgccgctgtcggttcccaccactcccacccttcagtctatgcaaatgcagctgcagagcggctccggcagtggtgggtccggaataggatcctctgctcagcacgatgccagtggccggagtcttcaggcgttgatgcaatcgcagggggccagcacatccgcagcagcagccgccgccgcatcaagtgctggaggatcctgtagtggatccggccaggtgggcatgggcggagcgggagtcatgccagctatgccaaccgccgccgacataagcctaatgctcagcatactcaacaccacagatgtcaaccagctggccaacttggacatcaataaattggccatgtacctggtcagcatgaacaatatggtcctctcgttggattccccgtcctcttttctcatcgcattttatctcatctcgcgaatgggaatgggcatgcgaatgaacggccaaaacggaggaaatgtcaaaccactttgcacacccggcggcagaaacaaaaacagcaacacaccgaactccttctcaaatccactgtctagtgcaaaaccgttgctttcgattccttgcctccgcttcgccttttgctgccccttgatgtggcagcaaaagcagatacaccgcaaaacagtggaaccagcaacgtgttggtcacaaggcatggggcgacatatgggaaaaggcaaaacagcgaagtcaattgtacaagctgcccttttcgatgcgcagcaatcccactgtgttggcgggctagagatgcgccaattgcaagccaaatgaaataac

SEQ ID NO: 40221 - protein, 675 aa, DROSOPHILA
MNLLYCLQVYKGDEKIKTFIWDLITPTEDGEVQKISRDHSGLHNLVPRGRNAKGRNGGKSNKESTGVSTPAPGSASGSNSGNTTPAHKSSALDGSDKDSGGINASAVAAAVTSIHDPNHWSKKEKYDADAYLEGAYKKHLGRHANKVLLRVRMLYYIQHEVIGDFVQQIKDNTPIRNEDDANSKHDDGDEVDDDGTTTTKDSDSTKLTGGDNKDSLLDPERPSSSGKSSSENASGGNDKTESENDATTVSESSYKSEVLPGKGSDLDVSVAQQDALSATPELANTSDPKMNKNDAQVSASVSCDPADSSSPEAAGKAQGTGVQTGDAGELDIESEKKDNEKETKESTGLDEEESVAGSYPPTVAAVEDATTMWPSMQDLNTRLRRVITAYQRNYKKEELKLQQKAKLQALVSSTPPLSVPTTPTLQSMQMQLQSGSGSGGSGIGSSAQHDASGRSLQALMQSQGASTSAAAAAAASSAGGSCSGSGQVGMGGAGVMPAMPTAADISLMLSILNTTDVNQLANLDINKLAMYLVSMNNMVLSLDSPSSFLIAFYLISRMGMGMRMNGQNGGNVKPLCTPGGRNKNSNTPNSFSNPLSSAKPLLSIPCLRFAFCCPLMWQQKQIHRKTVEPATCWSQGMGRHMGKGKTAKSIVQAALFDAQQSHCVGGLEMRQLQAK

SEQ ID NO: 40222 - DNA, 19707 bp, DROSOPHILA
ttttatctattgctaacccaaagatttgttttgatgactcaaagcctgtgacacaatcttatgagatcaaacagtaggtaagatatcatctccagagtttagtgacgaaagcagtagaaccagtataatttatatttaattttagctattattttcaaatttcttgctttttttgcagcgaatgtagaagtttcctgcaatccacaagcaaatagcaactatttgctgaacacagacacgttataaggaattaacacccagtccaatagaaaaaaaaaaacttaccgacaggtgccaacttgcattagagttgtatacccagcaatatgaccattttgttgaggtatttgttccggccacacagaagtatctgcaagtatgtgcaagtatctgcgtaactctcagatacttcgctccaaacccagactcctttcgagcctgctcattaacggcttagaaaagtagaagagctgcacttgagacacgcacacacaatattgaaatggagaaaaatccaaatggggagccagttggcaccgcagacaatgtgtcaaataaggcctgacgacaggaaaaaggaaaagcgttgcgaatgcagaacatgtgtgtgaaaaacgaggggcgataagtgagaaaaattgtgcagatacaaaggagcattttcgaatggggcgggacacttgcctccggggcagggaaagtggctggcagtgggggaactcccacagttgacaatgacatttgcctgacgcggcaaaggaagtcgccagtcaaggctagcctcaagaggttcttcaactgcgacagagagtcaggctcctcagcacattaaagatatacataattctagttcaggaatcacaactcgtttggaaaacgttgtatattctttagaagcttcttattataaacttagataatattcaataataaaacctgacaatacaatgaaaataagttaactatgcaaaaacatttgatgtgatcttatattgtattgctattccttttctatatgttttacaaacaaatttagcattttaacacaatgttgacttacttggattattgttggcctcacgccaatgggcggctgctctgcaaccaaatgtggttcgagataatcccttgcagcagctccacttctttccagaccacaagcccggatgatagcgatacgattttggagtattactatcctcacaaactgaaaatcaatgaatataagtaataaagattagggaatgaataatattatttattgtcaatttttgatgaatacactatttccatgatgttatatccatgtctccctaactgataaatccatctgcctttaaccacttaaaccttcttgattgctttaagttactttttcccaatttacaggcgcttcttgaactgaacacgactacttcttatcgatttcgattgatctggccaaaaacagctgcagtttggctggctcccttgccattgtgtttactgggtcatcatcaatcgagtcaatgggggctcaccttggcggatggcgcggatccactcgctgcgctccttttcgctgttggcgatcacgtagagtgtgtactgtggcaccgctcgtccactctgctgaccctcgattccaacgccactaccaccgccgttgccgttctccagctgatgcgaattggccgacgcagagatctcacagtagcccacttggaacggataaccctggtgatttgaacgtttgttaatgaaacatattttcccaaaccatttctggctactcacatccggtgcaaagggatcgccgccctcgccactgaccgtcgcctcctccaccaggcgaacgcccttcaaatgaatgcgaccacgttcgcgtctccgctgaaagtgaatcaaatgaatgacaaagttgtagttattcgaataaactagataagcacttagcacgtttatgttcatgtatttatgagtaaaacaaataatagtgatatctaattcaacctatttaggaactataaaagaaacccaccccccttctaagattctactccaaattacactttcttccaattaaaagtaaattaactttaattacttccaagcgtatcaaattccctaataaatagttcgctgtgaactatacgaatcgattaaaaatatagttctgctccaattcattctaattaaattccaccacaaatgcggaagttcgttttcgttttcaacaaacaagaaacatttcgagcaacagactttctttccattacagcataccctcgataaattggcttcttcaatcatcatcatcggacccattagcagccccatgttcattggcattatcatctttgccactccatcgcacaaactcacacattagcagcgccaatttaacggatcgcctagtggattttcctgctcattttcgagtgaagtgcgagtttcaatttcaattctcaattggccgccaagttggcttttcctaccccacccccttccccacacacacatgcacacacatatacgcattttcaatttcattacgaatttgaagttgaatttgagtttctgctggctcatggttccgtcttccccactcgctccctctttttccatccaaccttttagcttttggcttaacccaaataggttttgactttttatgcacaagttttacagtacacaacgaaaaattgatcaaaatatccaccgaatgcacagtgctaatcaaccttaaactggtttttataatcactttttttcagtgttgtattaaaggattgtatttctataaagtatgcttcaatatctcaaccttggccaaaatataaaaacaatttaaactcgttttttttcctctgcacttctttaacaacttgaagtttcaaaaagccaagaaggaagttcaatttctttcttgaatttcagtttttgttttttactaccctccccctccccatcccctttgtttgtgctttttttctgtacagcttttgtttttatttatttttttcttattttgaaattgctgcttgtttatttgaggtctttgtgtcaacgctgttgttgatgaggtttttatgttgcgtctgccgttgcttgcctcactttgtgtttggatagattttttatttctgggttgctgcgataagtaggggccaaaagctaacccgacagccaacaacgtgcttatcagccggtcctcaaagatttcactctccaaactgcctgtgtgttccaccttacgacgccccgaaagttatgtacgtcttagaaggcaagcctttgttggccgtcggagtcaattaggccaattacgttgacttaattgagctggcagcgctttaaggtcttccccaattgttgcaccgtcttggctgggactttgccccttccctctcccccaccaaagttgccgtcaagtggcggcacacgtgcaaaaattaccccttgcgcacaaaaaaacaaaaaaaaaagaagaaggatgttgacgacgttgctcaagtgccgtcaagtggaatgccaggacgatgccgaaaaaaaggagcgaaacgagcttaaatggcgcacatttttcggcatccagttaacttggtttattgggcctgtcagcgtacggaaatgatatggatagcagggaattttttagaaaaattggttatattgcagttagtagttaaggggttgtacacgaacgtatcgttaccaaagttgggtttcaatgaagtagtaatatatagatttgagaaatctctaaacatgttttgcacttttaccttttatcttgaattaaatagcagaaataataatataacttaatttctggagcgctagagatacctcattcttactttaatctgtaaatgttatctatataagtaatattgcaatctgcaaccaagaatgccttattagctaacgcagttcatgccccgtttccttagaaaccaaaaagaactttccgtgaattccgtgaaaaatcctacgtaaatggagtgggcgaggcatggtaccatcatcaataggagcaagaagcagaaatgatggggtggggggaaaaaataggaaaatagtccgacagctagatgacatccggcgtctgtcagcccaattcaacccagtttcagtatagttggccagacgatgcttcctgaacacgccaagttagcttggttggaaatggtgaaggcggaggagtaggggagttgcagaaggagcaggaggagcatgtcgtgccactttctcgtgaatagccaactaactgaactgagttgagctgaactgaaccgaaatggatgtagaaatgaaaagtagaactactacataactgctagttatgctttctgctttgatatcagcgaacaaagttccgactttgagatgcttccctttgatgaaaaggtcaatgcacttgcagatacaaatgtatctgtatctgtgtctgtatctggagctgttgccaaaggttgcgcaaatgttgagcatgtgttccgacatgtggcatcaataagcgaaatgtagatgcagctgctactgattccgagtgaaaacgagctaaaaattgccggcaattaaattgagatctttcaaacccgtatggaaatttcctttagctaaaaacgaaaaataaagcggaataccctgtaaaacaggttggccaaatacttctggttaaaacaacagcaacaaataatataccctcgtttaacgaaatggaaaggcccggacaaaatgaaactccgccaagtgaaagtcaattagggcaacattaatcaaattgattaaccaaaatgcagtttggctctcgaacatttcagaaattgcctcaagccaaaaaaatagcgtcataaaaacacagaatgaatatggaaatggaatggtttatgtctgaacctggtttacgtcgtcgaaagttggtttaaaaaacagagtgaggaacccactccctttgggcttattctttaatacattagaatattatatttaattattctctgcttgttaaaaacgcatttttcttgcataatttacttcactctgaaaatgccaaaggaatttccggaagcaagtgaataaaatgccgtcgagggaccaccaaatgtaacacaatatgccaaaaaggacaacaggttgaaacacgaaacgcacctgtaaaggcaccactatgcatccttatttaattctattgttaaagggaaaaacggggagggttgggaaaagagcgtcctaatggcacggcaatcacctgtgcataattgagagagctgtcaaagcaaaatgcaactcaggtaagcaaaaaaaaaaacaaaacataaaagaaactaggagaaaatacgaaatataatgaaaaataggggagccgccgaaggaaaacgcaacaaagtcccggaaaattgagcaccagcagcataaagaaaaacgattaagtgaaaattgccattgccgagggtcaaagtggagtgggttagcagaaagagagagcgtggaaactgaaacgataattgaagaatgaggtgagttgagtataagtggaaaatgtaattaaaataagaagctaatatatatacacatccaatagaattatactgcagattttaataaactcgcaatgatattcaagctcgttttataaaataaaacctattgcaaatgaagttaatttatatctatggtagaaacactacccaaaattgatattcccacgatgtcgactagaagtgctcttaaatttagaatgatataaccccgattaaaatgccagatgcactccactggacagttggacagagttgaatgtatgccctcccactctgtatctaaatcgcccactcaagtgcatcctcgaggttgaagagtggaacctttacaatgttgattaatgaaaacccaactgcctcatgtggcatgttaaaatgccatttcgtttcgactttgagccgcgtaacgaatcgggcaagatatgtactgtgtacacacatgttcccttcgattgatcgagggaaactacatgtatatatatatatattttttatagagtgggggaaccccctgacaattcccatgattgattgcaactgggaaggagcgcttcttaaactgaccgcatgtggagtgcgattgaaaaatcgcctcagataaattataactgtaataaagagaaaaccgggcatacaaaatgcctcggcgtaatggtttttcaatttccccaacctagtcggttttttttccgtaattattacaatttcacgcgtaggagcggcgacgggcgataaatttcagttaaaagaagtatgtaaacaaagacagccaagttgtttccttgccttgcatctcattccccagtttcgtggaaaatttatgcatttttccaatgaaaacgaaaattttcctatgccatagttttagttgttttcgctggtctttcggtgctcgttcccagccatcaaaaggacatggttggttgactcggatgttctgtattgttcttttctggtcaagacgaagtaattaattttagtgtgggtaatttgtgctaaatcattccatgttcatctatgtcggctgtcttcgcctcttcctgtcaacagaaaaactttacttcctctgcgtggttttatcgctaaatttgcattaaactcaagccgtacatcacattgaaaattatatctatgcagattaagtattgtggaaaatatggtatggtatttaaaagagtgggagttaaaacaatatttggtttaatatgcaatatttataattacatgtgtatcatatcatatcagaatgatatcatatcataatatatatattttgaacaatgagtattaatatcttatctttgaacaatttcactaataaattattgtgtttgtgaattacttttattttttagatgttttgttaaactttagtgaacttaaaacgtcctgagaagagtcaccaaagcatgaaatgccatttcgctggaattccccagcacatgggagtgatccatcattgggtcgcagaatgaaagaaataaccatggaaatcttgggaaaaacgaaaaagcgtcggcgatgtaattaacgataagacaaagttcaaagttgtcttcgggcaaccctaataattaaatttatagaaaagcaaagaatacaacgacagagtggagaagaaaaatcgaatgcagataggcatcaagaagagcttgcacatccacatatacatacatacagctgatcaatcagcgatcccccccccccgctttccaccgcttttccccgacaaactctataaatatgaaaatcgtgacttgaacgcttaaaaagcgcttaaaacgtattaagcaaacacacatatggaaaacttgtctgccgcggagacaaaggaaaagaggaataattgaaaagtgagtgtggggaacaaagtgcgatagcaggggatccaaaaagataaatgtgctaaggaaattgtcagtcataaggtcagcgtggagaacccccaattccaaaaattcctatccctcgaaatctacccaaatatcaagcaattacacgcaagaggaaagggtatttcattgacagctgtggaaagcgaaggaaaagccaaagtggaaagtgtacacatgtatgtacataaatatgtatgtatacccctacgcacggacattctcaagcattttcctctgcttggttagctgtttaaatatatatgtatatatgcacatacaaattccttcttttcgttatttttgaggccaacatttggtcgctgcgccctttgtctattttcgaagcaattcgtgtttatttttatgttttgataaatgcatttctccagccgcatcccattcacagacatcggcgaatcgttgaggaggtcgttcactgcatttcatttgcttttccatctgtcctgaatgggaactctaattgggatatcaatatgaaatcggattaattttcgaattcaattttgagcggagctcatttaaaaatttcatggtctaggcttttcataaaatcctagaataatattactgattaagcaatgccggaatttcgatgcaggtaattagatttttattcggttataatattcgcttgtttgaatttttctaaaaatacagcagtgcaattatgcatatgcatacaagtgtaaaaacatcaattctttaaatagaaacgaaataaagtaatgatcaaattcctgctttataaaggacatactaaagtatttaaataagttttaaatataatacatgtagagaaaagtaatactttttacaattaatgatagaacaaacaacttaaagagagagtacagaatggcagagcgccagaattgttctcttgattttggcaagctttgctcttattgcatttttcgcgagcctgttgccatctgcccgggtagctcagtcggtagagcattggacttttaatccaagggtccagggttcaagtccctgctcgggcgaaacatcatttttttccactttttaacttttttcagcgcagactaattcatttttataaatatttttcattcgtgtgggaaagagctggaggctgtgattcattcataaaaatgtgcatgtgcaacaacataattaggccaggaagagggcgttaagctttgatttaacgtgaagcttcgataaaacgaataattaaagatacaaatggtgaaagaaagaactcccaataataaatgcactgagtaagagtcaacaagaccaaagttgtttggctacgttttgccataaaggtccttttatctgggtaacactgtagcttggactggcgcaaccgcatactggagcagtgaacacaagcaacggccgccggggcaatttgtctgggtcgaaactctgcaatcctcctccttctgacagaaacgcagtgtctgcgccaattcctgaccgatgactgcgaaacgcctcccaaaactaaaaatggaaaaagaaagagccacgacggttgaccactccgcaatggcgggtgaaagagctgtctgggaaactgtaatggaaaccggaaatggggtggattccaagcagattgaatcactggacatgcctgcatgtgatcctatgctgctgcagtcggtaaaagtcggtacaaaaaaaagtgttaagttgccggctgcattttcatatcgggatcttttacacgacaaattcgagggaatttggatttggcgaaattgcactggaagcggaaattagttggagtcaaaagcggcaaaacggcgaaagtcatttatcattttggacatttttcaggcggtgtgtgaatattttgttgcccattttgttgttgtttggacaattgctagcatgattttacagttacgcatttaataagaatggcttgatgaacagtggtaaagatggctaatttcaattgcaacaaaagtaagaaaacaaatttgtatatttttgtttgttacaatcctaattgcctaagatagcaatcgatttttgtgttgaaagtaagttaataagtacatttaatagctttcctactttgccaaaatggcacaaagctattgaaaacgtaagctccttgtgttaatgatttatgccgagtcgtaaatgttcaccgagttgaaaaagtaattttgaacattcgctgtaattacattttttcccacatgtccgagagcatattttttttttactgtccgagtttacgtttcgttccatagtactctagcaacggcctttgtgtgggccaaaaaaaaaaaaaaaaaccggaggaaagtaagtatcacacgcagcttaaacagaaccgaaacgacaacccacattgagttatgaagctaacccatccttgcccccctaaccccatccccctctccgtattgcgatccaccgcccctatttcgccgccaaaaaggccataaagtacaaaacagctaacaacttatggcgatcgctgctgaggcggctacagatgatgctgctgcggctgctgaagaagagaaatatgtgttttttatgatgactcacggggcgagcgggccgcgataagatcaatcatcaacaaccacaaaggaggggaaatgggggaagttacgagcgagctctcgacaatctggaactcggcgaccggagtcgcgtttgcggtctgcgtctggccattcagaccatctctcatgataacactattgaatacgaaagtagacaagttttcggaatcattttcagatacagtgcgtttcgaaaatgtacgcaacttggtttagaatacaaaaaaaaactgcataattaatatcttgacttaattcattgaaacaactataaaacttgtctaagcttaacttatttattttattattttccagcttatttagtatttatgataacgaaccgcactgtcccacacatgctcacacatttggatgaaaccggctttgatttctaattattggggatcggtttgtttttttcggggtctgcggtgttttttcttatttttgatatttgattcgatggctcgtgagctttaaattaacagcggaaatagctaaagcgataatgccaataaaaacgcttaagacttttagtttttccatagaaaggcgtttattttcgaacttaattccaattaaacgatggtttattgtctctggccgataataaggcgtaaaaggtatttaggcttaggcccacttgctgtgggagcaaactgattggaactgggctttatgtttacggccaacttggttgtctgccctgtctggatgtaataactcaatgtcagctcgtgggcgaaggaaaacaaaggcagccaccggaggacgaataggagagattcattcaaggcagcataatgaagcatgaaaagcttaagcttcaacagacaatgcgacgtctggagtcccaggcacaaaggtatgaaatatatatacatatattcctaggtccgctgctggctcttccttctgggatttacaactcattagacgctgcaaaaccttcatttggcattcaagacacgacggataacaccaaaaaaaaaaaaaactccaccattcatcgaatgaatcatcatctcgcggtcttaaatccgttaataggcaaaccatgtaccaaccgaccaccaattgtccaacaggttttccttataattttattaccatcatgctcggttcgagttccagttcgaatccgaatccgagtccgccgtagctggagtgagtgttaccttttcgattgtgattcataattgttacaagtgcttacgaaaagggcttggtctctgcacaattgaaatgtattgagcatatgtgcatatgtaaatggttcgagaagtgcttgtaattagtcagcatatgtcgggctgtcacttggaaagagggaatcaaatttgagattattgtttccaagaatttttaataccctcctaaattgattgcttgtacaaaaacttgagtaaatatcacattacgttcaaggttataaaaagagttgttatccttatataccctgcacatcaagcggtagcatccttaaacaagtaactgtaatcaggcttaaacttctcggtcatttagcctgcggtcatgtgccactgcaactggcaaccgcaagagcagtcaggttgtgttccaaggtccaggagcaaccaggagtcatgccatccgatcattttcggatctgaaatgaaggctaacatatgtcagagtcaagttgcaaaccccccaaccccaagccaacggaagacgtggcttatcagaaacattttggctttggcgccaatttcgtgttaaataaaatgcagcgcgaagatttataaaggcataaagacggcgattggaaacgggaccacccaacatatttaaaaatattcagcttcgctcgctaatttgtcagcattggtagagatggtggagggggtgaagccagagaagggggaagacgagcgatgcgggttttgtaattctacgaaatcagctttaagccattcggcgctggcctcccaaaggtgtcaattcgtgaagaattttaaaatgcatgcgatgagtaataatccccaacgacagacacatatttttctttcaccgaagcggcttaaaaaacggggtagaatatgaaaaaaaaaaaacaaaaaaaaaaaagttgcccgcccgtaaagtgataaatttgaacgtctaattgggcatggctcacaattgtggtagattgatcagcagctctaggccgcgttctcatactgcaaaagatacttttgagtgcaggccgtaaaaagataaaaactccccgaaaagtcgtaaaaaaaaatgtttttcgctgcgttgccggctaccggacaggaggattagtcctcgcacattctcacaggcaaacatcaataatggtgaaagcatttacatttacagcatttccatttacgagccaaggtggcaaggaactccagcccaacaaccatatgccacatggcacctccattagccaaagggcagtggccatgggctctaaaatagatatggggaaagggtatattatatgcacattatatctttcatctttcgatgctataaatacatccagccattggtagccaggaaaaatgtctttaagttcagataaaaagtgttaaatggaacatatcattgtaaggtttgtttttaataactccgttgtcatatgatttatatattgctagtttgttaactatattattgcttagcttgcttctaattttcttgacatctctgatggaaagtgcattcccacattcgttattcacacttcgcccccaagcacatttccccatttaacgcggattgcgtggcgacccgcctcctttggaaaattgttatttacagccttaatctgtgcgaaatgtatttgagagcagaacgaacgcattgccatggagcggcgagtgtagagaactgcaaagtgttggcaaacaaaaagtccagcttcaattagcataccacggcggtgagccatagaggatggttaggctctacagcccccagaccaccagaccccccgtatccagcctgcccaactcttcactcgtgggactgcgactgtaactgggacctggcccaagctgcgatttttatgacaggttaatgacacaactacgacaatgaaggtgctgctgatgatgatgaagaccaggcgggagtgcaatacccaccaatcaggaaaaatacaaacaaaaattctagtacattactttttaattaagcaatgaattgaacattaaacaaacaacgaaagtagcaagaaagtgatctaaaactaaagctcagggatttgtgtgatgaaaatgaaatcatttacagatttgcctttttgacttagatattgatccactttaaaacaaataacttacttgctcggttttttgctagtgtataggtgcaatgactggttggctactcggatgagttgttcggctcagcttgttgctggctagccattaatcagcccgccctgcgtccaaagggtctgaccccaataaacatgacaggctcggacattggattacaaccaggcaggaagacggacagactgaagagtgccaggcagctggattcatactcgactttagttgaaatggggtgggtgggagctcacacaaagaagccaccgcgaatcaatcaattaattgcacatattttctacacgagttcatcgaacccccgaactccgcagcagcccttaaaatagggacaaaagaaaagtgccaaaggaaaaccagcgaaatgtataggaaaatgatgggatcgagtgacaggagtgattgacaaccgacagtgtctcctgaaatttgaaaggagcttaggaaggtccctttgacgttcaagtagatggaaaatacttaaaatgatatatctatcatttgattttaatgaagtaatgatgttttatcagagaagtttttcttcgtgttgtgtttatataatgtaatcaactttttttttcaatttccataaatttcaatcaggcataaaatgtatatatttattgcataattttaggcgtattccctacaaggaaaaccccatctaattcaattacgatattcaaacttggcacataaaactagtaactcccgtgggcatttctccctttcagttcaatgcttacctacgactaaatatgcgtccttttgggcgtcaggataatccttttaattttaggcacaggcacacgaaattcgaaattcggggtgcggcaaaagtagcaaaagcaacaacaacagcgacaacaacactaggactcacgcacacacacaaacgcaccacgcacgcacacaaaggccgcttggatacacttgaaaaacttttgccttgggtggggcgttttcttctctcttttttttcggttagattcgcaaaaaattttccaacgacgccatggaaaggatttgcgatttaaatgttttatttgggtgttttcctattttcggctatctttgtaggatgcactgcacttttcgaatcatttatatgatttagtagagatagaagtttgtttaaatacagttagtaagagggtaaataagggtggtttcacttcaccgctgaaaaccaaccgaattttcaagggtagcggccggcgcattagaaaaatgtttgtaatttgaaaagtattgcaaataaacacgttactcgaaactttaacgcacacttgtgtttattcgtaaatgtcatgcaaatcagatatattttttttaagcaactaaaacacagtctttgggcttaataaaatattaaatgcgaaaatctaacgaacgtccacacgcgacgaggccaggatagaaactcctgccacggttactgaacttcatccaggatattcagagggaaactcaagggaaactccgcttccaattggaacggcataacgggataggacgacaccgtagtctacacccaaggactgtcgagggtgggtttccacacacattgtgccggctaacagctgcttttgtgtgtgtattttccaacccccacagtgcttactttccagccggagactggattgaacggtggtacatatacgttccaagccgagcgcactggagacttttttcctccgaaaaccacatttgttttgaaacgaatgcagccggtcgccggagcagagtaagctgagtttcccgggcgccggatggtgaaaattttgcgagcccgttaggtgccgtaatagcgacgcaataaatgacgtagccacgacgacaagatgagacgcccacttgaacatgcataatgaaaggaccctcctcaattcaccattttggccaattccaaagcgggcccagttgccggtccttcgaatcctgagatctttcattgtcagccggaactgactaactccgatgtgcattttgagtagcgtattcatattatttttacaaaatacaatgtagcatacagatatgaatcttttgaagtattagttagcaattacttaattgctatagtatggtgtataattgctatagtatgtataacaccatttgcagattatccatgaattattttcatattatctaccaatagataagctctatttattgattctaccgatcagaatcgaataaaaatacgtagcagcttctcataatatttttgtttttttcgctgttatctacattctcattttgtgttcgctaatttagcttaaattatgtcgattcattattttggctgaattagttttggccaaataaaacctgttggccgaaatgcgtacagcaatttgcatgactcacctccacattttccacatcgaagtagctgaaagttcgcttggtcaactcaaaccatcgatgtttgtaattcacgggggtgaaacgcttcttgttttgagcccttttcaccatcgatccacttttcacgacatcgtacagcctttcggacatcagatccatttttgcttgaaaggatttgctgctcgatcgcagcgatgatgatgacttaatgctgccattgacatgcgagtttcgatgcttagtgcccatcatcttgacaagaaaaagtgtctgaaaagcaaagaaacatattagctaaccaaaagttaatgttaatatttacacgcatgccaaaacgtttttaacccttcgaaataagacatatttgtattaacccaagggtttttgtctgtgctttgattatagccatgcatacgtatgaacagacaatatttaatcatacatttatttatcccattggcaaaataaagatttttaaatagtttaatggccatttagtgggacgtcagaatggatgtcgcattggcaaacagagggttaaaattagaagcgctcgcccaaaaagattggttacaacacactctgcagaggcaaggccataaatctattttggggggcgtgggcgtgggcgtgcgaatcttttttgcagcgcccctcgaggcattgaccgtggaacatggggccaccaaaacattggagcactgggagttacctggttgactaattgccgtgggcgttccgcttggcatcaatcagtatgggatggcgaaaagtggatgaaaataaagttattcatttacagatactgtatactgcctattaatggagaagtgtggagccaaggaagggaaaatccagtggacagacgagtcggtcagcaaatcgaacgattaaacgaacaattaattagcccccgagcagacaggagatacatataggttggtatacactagtaaagatcacttgctgaccttgaagtcgcgcacagcggattaaaggattagcccccaaagcggcatattccccatttccttgccaccttgtccccacaacttccatttcgcaaaacgagaagcgtgtacgcaaacaaacgggccgttgaaaaggtggctccaagcggaggagcagccaccacacgatctctggcattatcacacttcaacaaaagctaacaagacgcaggaagactccaggagcgaagtgctctgaattcgggaatggttgagttattgatttatttaaacatcttactaaggatgattttaaaaagagtttgtttaataaaaaaaagttttagttttctttactctgacgatatgattttctttatctgattcacaaatccgcttctgatcatcaaggaacatgaacggacgcgtctgcaaaaaagggaaacaaagctaaggcgacaaatgctcgtgcgacaacaacaattggctggatctcctgatcaactcttcctcctcaccgtctcctgacgccccccaccccccacgcgctttaatcaagcagagccgctacaaaaacaggagcggagtgcgggggcatgggcgaacggagcgtaaaaagagagggcgagagaatcagaatcttcagcgcaacgcgcatggccataagtaataaaataaacacggaccgaggcacagaaaggaaaaaaaggatggcaaaaaggcagaaggcgcaatgtgtacataaatctttttggtggagcgagaggcccaaagacctgggctataagcacatcaatatacatacatatagtatatatgtatatatacatatagcgggcgtggcctggcaactcgtttttgactttgaatttcgccacgcaaatggtcgcgcttagtttgtattcttctttgcatttaatttttgtttattgtcgcgctttttctagtggaagaggaagactggagaatctgcgaccttagcaagaatttcagtctaatttgaaatcaatttttgagttactttatattccaaaaagattgatttttaatttaaaataagttaagcaactatgtaaacgatatttttttagcagtacttctatttgttattattacaacaacaaaaaatttcgtgtaattagtttctattgtgactttaagctaaagtcgccataagctgattaataaaatcagcacagcataattatttatattaactttgatttgtttttttttgcgttgcacgatgccttaaaatgaaatgcattcagaaaatgcaaaagcaagggcgtctgattagaatgcgtcgagcacagagttcgcctttcttatcagaatacaatagtttcaagcgcagcttgctgggcaattgaataaatgctgataagacaaagaacaaaagaagtatgtatgtaattcgatagcgataaaaaggggacggaaaggaggaataaaattgataactgtgccagttcaccagcttaccacaagtgccgttgattgagcaatttgaagcaatgacccgaccgcatagcaacaacaataacagcaagtacaacaacaacaccagcagcgcacaccactaacaaatcacaattctccaattggagggggcagacgcaacgggtaacgcaacaataacaaaacactttcgtttgcgcggcgacgagagtaaatacgaaatatcaaccgaccggcttgttcagcatttgcatactgcgaaaaaatctttataaacaatatataacgcaggcacagctgagacgctcacacagacgagcagacacccgcacacacctgcacgcaattttggagagcgggagaggagcaacaggcgcaacgtaggattcctggaattccttacttagcggcgcccatggcagttgcactcgcgatcctacgctttaactagaatcttttccgtttattcacgtggcagctgtatctatgtttgattggtttgtttacactaattaactgtaattaaatagtaacgatttaatacgaaactaaacgcgccgccgcaacttctttgcagtgtgaccgcacttcgagtggggagatacaccgatatgaaaataactactcttaaaataccagaagaatacaaaataccacacatactgccttttattttattttcccgcgtatttcaatatttcaaaaaaataactagtgattttaattatttcttcgttccaaaattaaacaagcaatgtgacgaaactttatatatttaaagcgcaatatactaaaggaagacgacttggtatagttactttttttagattactaacaatttagaaccattgccgcgcaattttattcaaatcaattattttttatttgaaaaaatactgtacttaagtacttaactagctagaattcgttacactttatcaggcctacaaaaatagagtttagagttaaaagagttttggtaatgcacgacagcggagtaagttcgacacaaaatgctagttaatattgggaatgagatgccctccaagtccacatcacttttccttcttctgtatggaggcaatccgccaggcgcccaccaaatatcgcacccagatcatgaacaaatccctgcccatttgcagccacgaccaaaatggtgtcagtttcgaaccatcgatctccgtccatcgaacggcaacctcggacattggtagcttcaaattctcagcgaggtacagcagctcaacatcaaaggcccagcgctccacatgcagactggtgaagagtttcctggccgtcgttcgggtgaacagcttgaagccacactgggtatcgcgaatggagcgcacggcaaacagccagacgaggaaatgaaagccgtgcatcaaaattgttctgtggcaacgcagatcagtatttggtcagctaataaatgtaggattttatcttacctgaagaaactccttgttgcaatcgcatcgttctccagatgtgctctcgatccaatggcaatgccatcgtctcgccattcgggagctaattgcttgagggccacctccagtttatcgtag

SEQ ID NO: 40223 - DNA, 1183 bp, DROSOPHILA
caaagaagttgcggcggcgcgtttagtttcgtattaaatcgttactatttaattacagttaattagtgtaaacaaaccaatcaaacatagatacagctgccacgtgaataaacggaaaagattctagttaaagcgtaggatcgcgagtgcaactgccatgggcgccgctaagtaaggaattccaggaatcctacgttgcgcctgttgctcctctcccgctctccaaaattgcgtgcagattttttcgcagtatgcaaatgctgaacaagccggtcggttgatatttcgtatttactctcgtcgccgcgcaaacgaaagtgttttgttattgttgcgttacccgttgcgtctgccccctccaattggagaattgtgatttgttagtggtgtgcgctgctggtgttgttgttgtacttgctgttattgttgttgctatgcggtcgggtcattgcttcaaattgctcaatcaacggcacttgtgatgatgggcactaagcatcgaaactcgcatgtcaatggcagcattaagtcatcatcatcgctgcgatcgagcagcaaatcctttcaagcaaaaatggatctgatgtccgaaaggctgtacgatgtcgtgaaaagtggatcgatggtgaaaagggctcaaaacaagaagcgtttcacccccgtgaattacaaacatcgatggtttgagttgaccaagcgaactttcagctacttcgatgtggaaaatgtggagcggagacgcgaacgtggtcgcattcatttgaagggcgttcgcctggtggaggaggcgacggtcagtggcgagggcggcgatccctttgcaccggatggttatccgttccaagtgggctactgtgagatctctgcgtcggccaattcgcatcagctggagaacggcaacggcggtggtagtggcgttggaatcgagggtcagcagagtggacgagcggtgccacagtacacactctacgtgatcgccaacagcgaaaaggagcgcagcgagtggatccgcgccatccgccaagtttgtgaggatagtaatactccaaaatcgtatcgctatcatccgggcttgtggtctggaaagaagtggagctgctgcaagggattatctcgaaccacatttggttgcagagcagccgcccattggcgtgaggccaacaataatccaaaaaaggaatag

SEQ ID NO: 40224 - protein, 233 aa, DROSOPHILA
MMGTKHRNSHVNGSIKSSSSLRSSSKSFQAKMDLMSERLYDVVKSGSMVKRAQNKKRFTPVNYKHRWFELTKRTFSYFDVENVERRRERGRIHLKGVRLVEEATVSGEGGDPFAPDGYPFQVGYCEISASANSHQLENGNGGGSGVGIEGQQSGRAVPQYTLYVIANSEKERSEWIRAIRQVCEDSNTPKSYRYHPGLWSGKKWSCCKGLSRTTFGCRAAAHWREANNNPKKE

SEQ ID NO: 40225 - DNA, 2689 bp, DROSOPHILA
ccgaacacacgcacttgtgcgcaaccaggacgatggggaccacggcaaggacatgggggtgctagaatttctgcacgcaccttcattccaacttccggctgggaatgctagcctaggctatttaactacacttttttggcactaaaaatgctacaaaatgccggtgatagcccacgtatgcaatgtctaacatatatatgctatatatatgtataaataattttttcttcggccggctctcctttaattcgcatttcgtgtgagttgacgcgtagccttttgccatatgcgcaaaagttttgcttttgagccacgcatgcctgccccttcaagtggtgggggttaggctccaaaaccacatattctcgcactccgtggccaaatgcattttgcattaaattgcataacttttgtgcggcaattagagttctctggctggccaagacggttgggaagtccgggaaatgcagccacaatgcaaacatacaaatctatcaattttccactcgcacacatttcgtattcaataattacgcatacgcagcgtgtgccccctttaagtatagtgcaaccgtcacaattttccatttctttttcgtttcagtcttctttttttcttgcatgcatttttctcctatacttagtggcattgcatttcaattaagtaatttctgtctgctaaaattcccaggagcaatacacaaatagggtttgggtcaacagaagaagtaaaaaagtggtttattaattgccaccactaggcaaattatagtttattaagccatgcaactggcgtagcattcttgaactgcccagaaactttttttttgaataattaatgtagtggagtttagtctttgatgtgtttcgtttgctatattttcagatatttctgctctgttttggttagtttaatgttttgtactaagatctaatgatcagtgacctatattaacatttatattttcttcattttagccctagaacgcgttgctgaagaatgtatgggtcgcaggcaatggaaacattatcaagacaaactgacgtgcagccacttgaatatcgaggagcaacagcccatagcaatagccggttccgaggacgagccatcgcaatacaaccacagcagcaaggagatcagccagagcaatcccaaccactgtaagacagagaaccaccgtctggagcagcaacacaacggcagccagctattggaagaagaagattctgcatagatagaatttcaaagtcaaacgaaatgtagatacgtcgaaaggagggccaaagttttggattggggggggtttaactgtgtaaatatgttttgctctcctgtaaaagagtgtgtagagtgtataagtacatttaaatatatttagttgctcaaaatgatcatgtgtttggtttgaggtatacgcgtagtgatgaagacacacacatacataaatatacaaatatatatcatatggtatatagtaatataaagtctttatatatttatgctttcttacttttggtggttaggcgactgtacatgaaatgtgtgttctcaaaatttgttttgtttttctttttgtctctctttttacttttaagccgaaatcttgaaattttgttttcaaatttccgttttaaagcctaaacacagatatatatatttttgtaattttttcttttattttttatttttaacaccgaaacactttaattttgattactttatttgaatatgtgtgaaattttttttcgaatgaaaataattttgaatgttttggggtgtaatattttgtattcttaggttttggaatttttcaaaataaaaatgtaatttgggactgatatttcggaaattgtttgatttttttgctttttactctgcgtttgcgtttcatttgaattattattttgtgtgctttgtctcgctttgcttactaatttatttaatttgtaaatgtgaaggcagctttgtttattgatttccgttttgtattttcttcttttgaaatcataaaaaatgttgaatttttgtggataattttgttttggttttttgattgttgtttttcggtttatatttttgaatttttgaattttgctatttcattgtttcatttctttgtattgtagagtcttgtattattattgcttgttttgctggttgttgttattgatcggatattgctgttgttgttgcttgttatggttgttactgttgttgttgttgttgttatggtctctttgctgtagttattgttgttgttgtagttgctgttgttggctatactcattgtgtctatgtcgaggacaactgcctggtcattttttttttggttttggccctgtctgagctgcggctctaactgctctagaaatttgcgtatgaaaactacaattatatggaacataagagtatcttatggaatgtgcgaaaatcgcagctcaaggtccagaaacctgaccaaaacagaagtcgattaagttgttggcttgtaagtgctatatatttctgctatacatatattttcccattggactgtttcatttactgttcagtaaaaaatatgctcaacacaaaaatgcggttcgaaacgaaatgcaaaatgaaaatggttcttggtttttgctcagtattcgttttttttcattttttgttttttttggtcttaaggttttagatttgttttgttgt

SEQ ID NO: 40226 - DNA, 3879 bp, DROSOPHILA
atgtatgggtcgcaggcaatggaaacattatcaagacaaactgacgtgcagccacttgaatatcgaggagcaacagcccatagcaatagccggttccgaggacgagccatcgcaatacaaccacagcagcaaggagatcagccagagcaatcccaaccactgtaagacagagaaccaccgtctggagcagcaacacaacggcagccagctattggaagaagaagattctgagaacaaccaaacatcacacgattcatcacgtacaccaacaccgggagccaccagtacaccatcaccaccgccagaacccatcgattggagaccgtcggccaagtgcaacttctgtgttaacggtcgcctgctaacggttaacgcccagggcaagttggtggccgagtcagcagcaactgccactagtagtagcactagtaatagtcacattcatcagcacgacagtgacagcaactcgagtgcatcactgccccaccacatcagcagcagcagcagcagcaacaacaatagcagtggcaacagggcacgccacattgctgctgcaagtgcaagagcaacaccagcagcggccacacccgccaactcccttgaactctacaagctgctgacccagcgggcagccaaaatgacatcgatggactcgatggccgcccagctggcgcaattctcactgctggccgacttcaatctgatcaactcgctggccagccaacagcagcagcagcagcagcaacagatcgctagtgcggtaacgccaactacctcagaagtatctgcagccgcaatcagtcccgcactcaaagatacacccagtcccagtgtggatgcaccgctcgatcttagcagcaaaccatcgccgaactcatcgattagcggcgatgtgaagtccgtcagagcctgtgccacgcccacgccgtcgggaagaagggcgtacagtgaagaggatctgagccgggccctacaggatgtggtggccaacaagctagatgcccggaaatcggctagccagcaccatgagcagcgctccattctggacaaccggctgttcaagatgaaacaccatgaccaggagcaggatcatgatggcgacgagctcgaggactccaacgatgatgctgaggcggaagtggacagcaatgcgtcgacaccggtgtatccggcagagtttgcaagggcacaactgcgcaaactgagccacctgtccgagcacaatggcagcgatctgggcgaggatgtggatcgtggatcgccgaaaatggggcgacatccggcctgtggcaatgccagtgccaatcagggcgcaccgccatccattccgctggatgccaatgtcctgctgcacactctgatgctggctgctgggattggtgcaatgccgaagctggatgaaacgcaaacggtgggcgactttatcaagggtctgctggtggccaacagtggtggcataatgaacgagggactgctaaatctgctgtccgccagtcaggagaacagcaatggcaatgcctcgctgctgctgcaacagcaacagcatcagcaacaccatcagcaacaccatcagcagcagcagcagcagcaacatgtcgccgcctaccggcatcgcctgcccaagtcggagactccggaaacgaactcctcgttggatccgaacgatgccagcgaggatcccatactgaagattccgtccttcaaggtcagcggtccggccagcagcagcagcctgtcgccgggcggactggttggtggtcaccaccatccgctgaacaacaacaacagcctcagcatcagcaacaacagcaaccacagcagcaacagccatcggaacggcagcaatcgcagcccgcattccgcatcgcccatgctggccgcggccgtggcccaaggtggctactccgccggcaacagtttgctgacctcatcctcgtctagcatacagaagatgatggccagcaatatccagcgccagatcaacgaacagagtggccaggagagtctcaggaacggaaatgttagcgattgcagcagcaacaatggcggctcctcctcgctgggatacaagaagccgagcatttcggtggccaagatcattggcggaacggacacctcacggttcggagcctcgcccaatctgctgtcccaacagcaccattcggctcaccacctgacccaccagcaacagcagcaacagctgagcgcccaggaggcattgggcaagggaacgcgaccaaagaggggcaagtatcgcaactatgaccgcgacagtttggtggaggcggtcaaggcggtgcagagaggtgaaatgtcggttcatcgagcgggtagctactacggcgtaccgcattccacgctggagtacaaggtcaaggaacgtcacctgatgcgaccgcgcaagcgagagcccaagccgcagcccgatctcgtcggcctgaccggaccagccaacaagctgcagctggacaaactgaaggcgggaccacatggtggctccaagctgagcaatgccctcaagaaccaaaacaatcaggcggctgcggcggcggcggcggcagcagcagcagcggccgctgccacgcccaacggcctgaaactgccccttttcgaggcgggtccacaggcgttatcctttcagccgaacatgttctggccccagacgaacgccacgaatgcctacggcctggacttcaatcgcatcacggaggcgatgcggaatccccaggcctccaatcaccacggcctgatgaagagtgcccaggacatggtggagaacgtgtacgatggcatcatcaggaagacgctgcaggcgagcgagggcaatggcagtgcggcgggtaatggcagcaacggtagcaatggcaacgggcatgggcacgggcatggccatggacacgccctgctcgatcagctgctggtgaagaagacccccttgccgttcaccaaccatcggaacaatgactacgccgccacctgttcgagtgccagcggggagagcgtaaagcggtcgggcagtcccatgggcaactatgcagacatcaagcgggagcgcctgagcgccgacagcggcggcagcagcgatgaggagcactcggccagccacatcaacaacaacaacagcgatttggcgcacaacaagaacaagagcggcggcggcggcggcggcggcggcaatggccagaccaatgggaacggcaggagcagccggatgacgtcgcgggatgattcccaaacggatgccagcagcttgaagagcggggaaagtggcggccagcaaaaccacaaaatgatggatctcaatggcggcagcagcagcagcagtcacatcaagtgcgaatcggaggcggccaccggacatcacagtcctggacaccacaccacgtccatactgcacgagaagctggcccagatcaaggcaaaataaaaaataaaagaaaaaattacaaaaatatatatatctgtgtttaggctttaaaacggaaatttgaaaacaaaatttcaagatttcggcttaaaagtaaaaagagagacaaaaagaaaaacaaaacaaattttgagaacacacatttcatgtacagtcgcctaaccaccaaaagtaagaaagcataaatatataaagactttatattactatataccatatgatatatatttgtatatttatgtatgtgtgtgtcttcatcactacgcgtatacctcaaaccaaacacatgatcattttgagcaactaaatatatttaaatgtacttatacactctacacactcttttacaggagagcaaaacatatttacacagttaaaccccccccaatccaaaactttggccctcctttcgacgtatctacatttcgtttgactttgaaattctatctatg

SEQ ID NO: 40227 - protein, 1140 aa, DROSOPHILA
MGRRQWKHYQDKLTCSHLNIEEQQPIAIAGSEDEPSQYNHSSKEISQSNPNHCKTENHRLEQQHNGSQLLEEEDSENNQTSHDSSRTPTPGATSTPSPPPEPIDWRPSAKCNFCVNGRLLTVNAQGKLVAESAATATSSSTSNSHIHQHDSDSNSSASLPHHISSSSSSNNNSSGNRARHIAAASARATPAAATPANSLELYKLLTQRAAKMTSMDSMAAQLAQFSLLADFNLINSLASQQQQQQQQQIASAVTPTTSEVSAAAISPALKDTPSPSVDAPLDLSSKPSPNSSISGDVKSVRACATPTPSGRRAYSEEDLSRALQDVVANKLDARKSASQHHEQRSILDNRLFKMKHHDQEQDHDGDELEDSNDDAEAEVDSNASTPVYPAEFARAQLRKLSHLSEHNGSDLGEDVDRGSPKMGRHPACGNASANQGAPPSIPLDANVLLHTLMLAAGIGAMPKLDETQTVGDFIKGLLVANSGGIMNEGLLNLLSASQENSNGNASLLLQQQQHQQHHQQHHQQQQQQQHVAAYRHRLPKSETPETNSSLDPNDASEDPILKIPSFKVSGPASSSSLSPGGLVGGHHHPLNNNNSLSISNNSNHSSNSHRNGSNRSPHSASPMLAAAVAQGGYSAGNSLLTSSSSSIQKMMASNIQRQINEQSGQESLRNGNVSDCSSNNGGSSSLGYKKPSISVAKIIGGTDTSRFGASPNLLSQQHHSAHHLTHQQQQQQLSAQEALGKGTRPKRGKYRNYDRDSLVEAVKAVQRGEMSVHRAGSYYGVPHSTLEYKVKERHLMRPRKREPKPQPDLVGLTGPANKLQLDKLKAGPHGGSKLSNALKNQNNQAAAAAAAAAAAAAAATPNGLKLPLFEAGPQALSFQPNMFWPQTNATNAYGLDFNRITEAMRNPQASNHHGLMKSAQDMVENVYDGIIRKTLQASEGNGSAAGNGSNGSNGNGHGHGHGHGHALLDQLLVKKTPLPFTNHRNNDYAATCSSASGESVKRSGSPMGNYADIKRERLSADSGGSSDEEHSASHINNNNSDLAHNKNKSGGGGGGGGNGQTNGNGRSSRMTSRDDSQTDASSLKSGESGGQQNHKMMDLNGGSSSSSHIKCESEAATGHHSPGHHTTSILHEKLAQIKAK

SEQ ID NO: 40228 - DNA, 4491 bp, DROSOPHILA
ccgcacacacagtacctacctatcgtcagcggtgggcgcgtgaggcgataacttctcgattagctagagctgtgtcacggcagccaggggaggatacaaaggaaaaatgtcaaattacttatttacaatttggcatagaattgttttattttgttttttatttatattaagccaattaacagctttgttgtacgtaatttagaaatcacggccaaccactatcgatataatttagcgaacgagtcacgacattatggatgtagcccatccctatttacttgtcaaaacagcaaattttcattcgggccaagaatcgactgaaaatatgtccgctattctaaaccacgcaattcgccgccaattcggcgcttctgccgcccggaatatgtccggcaccgccgccgtggccggcgagcactctggtaagtgaccgtccagcgtcccaattgccaaattcatccccttttgtaaggttaaggttatgtaatttaccattgggcaagatcgattggtggagaaggattcgctcttataacacatcctttcatgctcatctcatctctcatccttcaggtggctacaaggtgtggaagcgcctgtccttcttcgtggccgtgcccgccgtgggactgtgcatgctgaacgcctacctgaagcaccaggaggagcacgacaagccccgccaggagttcgtcaagtacgactacctgcgccgccgcgagaagcgcttcccctggggtgagggccagaagagcctgttccacaacccccacgttaacgccctgcccgacggctacgagcactaggtggccaccgtctccggttccctctgcgggatgtattcgttgtttggtagtgatagacgttaatgtaaactgaactttacgcggaaatacacagaaaacacatatacccaaactccagttggcgcttcaataaagatcaaattagagcgaggagagatcccataaagaccatttcaatgagcgacagcggaattctggtgaggagtttatttaaaaggccttcggttaaaggaaaaattaaaagttacaattaaatagaatttaaatttaagcataagcacggatgcacttttcgcatgcaatatattcaactactatcattattttgcggatcggcgattcttaaggttgcgttccagtttgtgatgaggcttgccttcgttctttcctgtcttctgagtgattctttgagcatcccgactgcgagtttggcgcacggattgctgggcatccttgggaggattggttttacgctgctttggaggcggcggcgtgaaggattcgtcgctatcgtctaggtggtcctcatagagagcatcgtcttctaagtattccgtcacgaattcttcctgcttcacattgtccatgtcttcaaaatcgtcaagatgttcctccttctcatcgacgccgccttctccttcgccgtcgtcttcgaactcgttctggtacggctccatttccaccacatgatcgtcctcgatgtggcgctgcaggcatttctgcgtcaagaagatgtggtcacagaactcgcaggcatggcgctcgctctgcttgtgctggtccatgtggctctcgacactgtcgatatcttcgatctgcttgcgacacatgggacatttcaggctggcggtggcatgaatgagcgcatgatccagtaggtcgttatagttgctgtacgacaccttgcactcactgcacacgaacgaggcgtcggaagtctgcgtgtgcgtgcgcaggtggcgcgagagatgatgcgacagcatgtaggacttgtggcagtacttgcagggataggctctcttcccggcgtgggcaaccaggtggcgggccagcttggaagcggtggaaaagcttctctcgcaatgctgacaggggaagggaagattggtggagtggactgtctgaaagtggacataatcgttagccggggcaatcccaaatatgcttgtcaacccacctcatgacgctccaatccctgcttgaaggcaaacgacttggtgcagacaccgcattggaacggacgcttcttctgatgtcgctcggcgtgcttctccatctcctggcgcgaaaggaagggcttctcgcagtacacgcagatgaacttgggtacgtccgtgtgggtgcgctcgtggcgatggagcaatgccttccgtgtgaaggctttcgagcagatggcgcacttgaatggccgctcgccggtgtgcacaaagttgtgcttggccaggtcgtacttggagaagaagctcttctcgcacaggagacactggaagctgcgcgagcgagtgtgattcagccgatggatctcgagcagctgctgcagcggaaaggagcgttcgcaatcgggacaggggaacacatcggtggccaccttctcggcgttcttggtcggatcatcttgatcgtccaatggcagatccgagtccagaacctctgtcactatggccacattgccactatcatctcgcttgactttgggtgtggccaggcgcggttccaccggagcggcgggtcccttgttcaagatcctaatcgaggacttgttcagcaccttcggcttgacgggtgatgccttctgggggatatcggggaactccttctctagctcactggccatatcctccagcatgctctgcacatcgtccatggacagctcctggttgttatccaccttcagctcataggcgtgcgaacgacgtggcactggagaggaaccggctaccgtcctgggggtcaccatggcgctctccagcacctggacgtcctcgatgatcacctgactactggatttggccattgtgttcagcagctttttgggcgtttcgcttggctcggctgtctttgctggcacgaccaacaacttcttggaagccaccatcgtcatgggcgcacggggcttctccagcggcgatggccagttacccgtgagcggatactggcgcaggagggtctccgcccgcttgcacatctgcttgaagcggtagcagtgctcgaagaggaggcggcactccagacagatgtgccccggcattccgtcgccggcgtagacctgtttttaatgttagattagataaatgtgtgagtgactaggaagctacatttattcggggaagtccgtgcttaagccaaataataaggtaatattcgtggaacacccctatatgtttttcgctacataataaattaaacgccataaatgtctctttcccttaaaatgaacaatataatgttagagtttaaatttaaacaaaggcgccgaggaccagaacaccctctacaaattaatcgatggccaccaatcgatgattagtgctatcgacgagcggccatcgccgcttggcggcaagtgcatacacacgactacatgcaatcgcagtttgttttcgccgctcagagcacgcttaacctccgttaattgattgattaaacacgtccgactgtgagccataaaaggacattcgctcgatcgaaagccgacaaaagctggctgagaagcgcaaaacagctgcgctgcgcaaagtttggccaacgcagagcaatagaaaacagaagcagtgtcagaataaaacaagaatcagaccaaaaagggcgcaacaactgcggagagagaaaaggaaggaaagagcagcgcgtgagcgagggaggagcaggagggagcgaacaaaaggcaagaggaaacacaaggagaaacgcaaacaatcaaaacaagaacttaagcaagaaaaggggcgcaagatgaccgacgagtgcgtaaccagaaactacggagtaggcattcgcagcccaaatggatcggaaaatcggggcagctttataatggctgataataccgatgccaagggctgtacgccggagtctcttgttgttggtggtgcaactgcagcgaggtgagtccatgtgcctcgctctctccctctcccatctctctctttatgtttctgtgttttgttatcaatgcaagtactggcataactgctatatcctagtttcaaatgcagcatataaagctcttttttttttatttattccattttcattccacaatctattatttttatattatttatactgtctattgccaacatttaaaatcaatgtgtcaatctgtctttataatgttgttaaaatggctgaagtcacaaagtttgaaagcacttgactttaattctattgttctatttagtcttattcacaaatatatttgaaaataattacataaataaatacccaatcatcgattatttcgccgattaccttatcttatcatgctgcttcccaaatggctattataattctgatttctttttccccagccccttgccggccaacaagtttgtggctcgaatgcccgtggaacgatatgcaagcgaatacaacatgagtcacaagcaccgcggagttgcgctgatcttcaaccacgaattcttcgacataccctcgctgaagagccgcaccggaacaaatgtcg

SEQ ID NO: 40229 - DNA, 2435 bp, DROSOPHILA
gatcgagcgaatgtccttttatggctcacagtcggacgtgtttaatcaatcaattaacggaggttaagcgtgctctgagcggcgaaaacaaactgcgattgcatgtagtcgtgtgtatgcacttgccgccaagcggcgatggccgctcgtcgatagcactaatcatcgattggtggccatcgattaatttgtagagggtgttctggtcctcggcgcctttgtttaaatttaaactctaacattatattgttcattttaagggaaagagacatttatggcgtttaatttattatgtagcgaaaaacatataggggtgttccacgaatattaccttattatttggcttaagcacggacttccccgaataaatgtagcttcctagtcactcacacatttatctaatctaacattaaaaacaggtctacgccggcgacggaatgccggggcacatctgtctggagtgccgcctcctcttcgagcactgctaccgcttcaagcagatgtgcaagcgggcggagaccctcctgcgccagtatccgctcacgggtaactggccatcgccgctggagaagccccgtgcgcccatgacgatggtggcttccaagaagttgttggtcgtgccagcaaagacagccgagccaagcgaaacgcccaaaaagctgctgaacacaatggccaaatccagtagtcaggtgatcatcgaggacgtccaggtgctggagagcgccatggtgacccccaggacggtagccggttcctctccagtgccacgtcgttcgcacgcctatgagctgaaggtggataacaaccaggagctgtccatggacgatgtgcagagcatgctggaggatatggccagtgagctagagaaggagttccccgatatcccccagaaggcatcacccgtcaagccgaaggtgctgaacaagtcctcgattaggatcttgaacaagggacccgccgctccggtggaaccgcgcctggccacacccaaagtcaagcgagatgatagtggcaatgtggccatagtgacagaggttctggactcggatctgccattggacgatcaagatgatccgaccaagaacgccgagaaggtggccaccgatgtgttcccctgtcccgattgcgaacgctcctttccgctgcagcagctgctcgagatccatcggctgaatcacactcgctcgcgcagcttccagtgtctcctgtgcgagaagagcttcttctccaagtacgacctggccaagcacaactttgtgcacaccggcgagcggccattcaagtgcgccatctgctcgaaagccttcacacggaaggcattgctccatcgccacgagcgcacccacacggacgtacccaagttcatctgcgtgtactgcgagaagcccttcctttcgcgccaggagatggagaagcacgccgagcgacatcagaagaagcgtccgttccaatgcggtgtctgcaccaagtcgtttgccttcaagcagggattggagcgtcatgagacagtccactccaccaatcttcccttcccctgtcagcattgcgagagaagcttttccaccgcttccaagctggcccgccacctggttgcccacgccgggaagagagcctatccctgcaagtactgccacaagtcctacatgctgtcgcatcatctctcgcgccacctgcgcacgcacacgcagacttccgacgcctcgttcgtgtgcagtgagtgcaaggtgtcgtacagcaactataacgacctactggatcatgcgctcattcatgccaccgccagcctgaaatgtcccatgtgtcgcaagcagatcgaagatatcgacagtgtcgagagccacatggaccagcacaagcagagcgagcgccatgcctgcgagttctgtgaccacatcttcttgacgcagaaatgcctgcagcgccacatcgaggacgatcatgtggtggaaatggagccgtaccagaacgagttcgaagacgacggcgaaggagaaggcggcgtcgatgagaaggaggaacatcttgacgattttgaagacatggacaatgtgaagcaggaagaattcgtgacggaatacttagaagacgatgctctctatgaggaccacctagacgatagcgacgaatccttcacgccgccgcctccaaagcagcgtaaaaccaatcctcccaaggatgcccagcaatccgtgcgccaaactcgcagtcgggatgctcaaagaatcactcagaagacaggaaagaacgaaggcaagcctcatcacaaactggaacgcaaccttaagaatcgccgatccgcaaaataatgatagtagttgaatatattgcatgcgaaaagtgcatccgtgcttatgcttaaatttaaattctatttaattgtaacttttaatttttcctttaaccgaaggccttttaaataaactcctcaccag

SEQ ID NO: 40230 - protein, 574 aa, DROSOPHILA
MTMVASKKLLVVPAKTAEPSETPKKLLNTMAKSSSQVIIEDVQVLESAMVTPRTVAGSSPVPRRSHAYELKVDNNQELSMDDVQSMLEDMASELEKEFPDIPQKASPVKPKVLNKSSIRILNKGPAAPVEPRLATPKVKRDDSGNVAIVTEVLDSDLPLDDQDDPTKNAEKVATDVFPCPDCERSFPLQQLLEIHRLNHTRSRSFQCLLCEKSFFSKYDLAKHNFVHTGERPFKCAICSKAFTRKALLHRHERTHTDVPKFICVYCEKPFLSRQEMEKHAERHQKKRPFQCGVCTKSFAFKQGLERHETVHSTNLPFPCQHCERSFSTASKLARHLVAHAGKRAYPCKYCHKSYMLSHHLSRHLRTHTQTSDASFVCSECKVSYSNYNDLLDHALIHATASLKCPMCRKQIEDIDSVESHMDQHKQSERHACEFCDHIFLTQKCLQRHIEDDHVVEMEPYQNEFEDDGEGEGGVDEKEEHLDDFEDMDNVKQEEFVTEYLEDDALYEDHLDDSDESFTPPPPKQRKTNPPKDAQQSVRQTRSRDAQRITQKTGKNEGKPHHKLERNLKNRRSAK

SEQ ID NO: 40231 - DNA, 4963 bp, DROSOPHILA
gttaacaccacataaacaacatgaacattaatggttttacaaatttattatcagtttattgtaggagaatatgaaataagacaaaatccctgcaatttcgtgtgtgtaaaactacaaataattgttataagatgtgtgtgagtggtgctggtccaaaatggttcaaattttccaatacatgtggctgttttccaaacgcaaagaaatgggtaactgaaactgttgcttaaaatagttagctcgttgaggcgtacaaaaattcatgcctactatcttataaaaagagtacaaaagaatgattatacaaatacatatctgtaatctgtatcaaatgtgattcatcttcagcgttgcttgcctgatctgttggcacttgtgattgaaatcggaattaactggattaattacaacattttgattgttcaacaaataatagttctttcaacaaattgctatggctattgttggattcatttcgggggttgcggggataaggtacttgtggtgtgtgtgtatatataatttctatatttaaatatatatttgatatatattgtttggttgtaaaacttgtactattgcagcgtatggaggaagtttgttgggaggtcttttcgattgcggttgggatcgggatggggatctggatgcggatgaggatgggtatgggtatgggtaaggataagggtatgggtatgtgaagagtgcgtttcgggctgtggtaagttttcaaatactttaagtaattgtctgtgtgtgagtttggaaatttttctgttgtgaatttgggtttctcaggctggcttcagttaattcgttcgtatgcgtacaaaatggcgagatgtcaacaaaaacaattgttaattactttgaaatattcaaaaagcaatcgtcgtgcgtcgtcgactgcagctgaaagcagattcgccatccgagaacgtctggctgggatggctggctttcagccccagacttttgttgtaaaattaacctggcggccaactctataacaaaggcgcacttcaggcttagactactaaataactaattgaggtatgtgtgtggcgaggctgtcctcgtgctgaactagctggatgcgtggaaattttgacgggccaaaagctggctgaatttcgtaaaccggtctattgcataaaattgcaggtcttcgtccgccgcccattgcccattgggcacggacaagtaaaaaagcgtagcaaactagttgggcaacggaaaaggatgtggctgctgcgatggcgatggcgatggccaatggcaattggaattgcaaggacaacgccaacggctgctgctaggcactgctatgccacgaaatcgagcggccggttgaagccacccttgcgattcatgtactggcggtactttcgcttgaggattacatgcacttctccgacatcgttgccctcgaccttcctgttcttggtggtgtcgaacgtgcagaatcccattgtcttcagcatctcgacctcttccggcgatttaccctccaggtccgcctcgttgatcttgggccggtcggcagctgtggccgccgcattgttcctcgtcgtccttcgcgacgtcgatggtccggagctgctgttgccgccgctgcttccgccgccgcctcctcctcctcctcctccggcgaccctcgaccgcgatctgcaaattatgaatgtgtgtgcatagtgagtggtgagtgttctatagatttcgtttgagtgacaggaccgaccagttgattgcattcgaattgcaacgagcctgggaaataactggggcgaccttgggcgttgtgcacccgattgtgcaatatgaagttttaattacgcgaaatgcgacacttctcaaccggtcggttggcttcattaaagaccatatttacgtctcgattttggcaatcatctgaagacccaaaataaccggcttgtatatgcatatgctagagaatttcattctaagatttaaaatcaagctcaagatccctctaaaatccattctgaatccatttatatacctaacagacaatattcctctattcctctagcttatatctcaaaaacttccattggaaaatagctaattgatgcttgcagctcccagactttgttttagtttcgtgttttgtatttcttaaatgaaatgtagaagataacagataatccttatatcaagtagaaagtggggaaagtttcgcttaggacatgtcctcgatgagggccgcacgcagcttggtcgtcactgtggcgggctgtgcctggttaagcttgaagacgctctcgatcacggagatctctgtggccgtggtgttcatgcccacgaaggagagccagtcgttgacgaccatgccggcggcgagtacttcgctgccccggttcactgttccggccacgaggggaacctgcagcagggacgacagttcgtcctggtcctgaatgctcgtcttgggatgcaccatgccgccctggttgctcagcacggcgtaagagcccaccagtgagttgtcggcaatggtctggcggaagacctctactttgagcacgtccgcgatgatctcctcggtctccttgtccagatccgggtgcaccagggccacataatcattgcaggcgataacgttgcccagcgcggacaggcgctcctccacacgataaatcttcacggcgtctggcaggctgttacgcaggtgttgcagctcctcgtcggtggtggagttgggcaccagcaggccgttgcggttgcccacggtgaggcggccgatgatccggcagccgcccacattcgcatgcaccaccgggatggtgtcgcccagctccgcctcgaaggcgctgtagaaggtctcggatccaccgatggccaccaggcagtatgtgttggttagtttagtgaagacgccgatgtcgtcgttgttctcgaattggacgcgtagagccattttctctgtatttacgtggatcctcttttcctgctggttactctcttttcggatttactggcctgactgagcctgctgccggatgagttctggattctgtttatatgtccggaaatcaatttaaatgtcgtgatgaaattcgcacaatttcgcttcacgtggtaatttttttttgatgttgggacgccagagctgcatagccatcgattggctgcctatcgaagtgtgggtctatcgatactcgtgggtaaataaacaagttctgaacggcgatttcgggggtttgaggggtcaattgtcccctgtgttggaatgtgttcctaaatctacacaaacactccctaagcttatcctaaacttataaatattggttgctatttaaaccccatttcacggttatccagcacgcccctgaactgtgacccacatccccgattttagtgactagttttatacttatcgtggttggcatttggtacactacactttcttattcacctagatcgccgactccgcgcacggtcgcgctcccgttcccgctcccgatctcggctgcgactgcggtcgcgatcccgttcccggtcgcggcgaccggcgcctccagatccggatcctccggctggcgctactccgatggcctcccgctcccgggaacggcgctccctgcgcttcttccgctcggatcgctccttctcgcgtctcctgtgcgccggcgaggcgggacttcggctgcggcccatggctccgtttcggtctctgcttgtgtggcggtttgagtgattgatgatggtttgcctgcagtggatttgagcggatgttagactccatgtactccaattgcaccgcacgcatcccgcttaccgttgcactaggctgtgtctagcattatttgggcgacaccggcggtgggtaaaaacgcgctaacttaaaactaaaaccaaataaacaacgcgcgttatctcgccgcgacgccgaaacggaatgaggaatgcagaatgcggatgatgatgcgagggatgcgatgcaagggcaaaacatggccacctatcggatatcgattgatggtcgattttatcttcgataaaaatgtatcctatgtatatcgcataccgaatgtttaaatcgatctgtttccttttgaatatgaactatgtatatatattaattaatattttttaatagcattacctatattatatttcaaattatgcccggactatgataaatttaacaaattcataattacaaatctttcgtcaataccacttccataaatagtttaaaatatcaaaatattacgaactttgccaatataaacgttatattttctacatttacacagtttcttctttttttttttgaagctattaaaccacatatttgctcacgatcgcagctgaaatgaactactatgttggatcttctagttcgatcttcaagaccgattcattttccaagtcgcgggactgccaactcccgcgaaatagaaagaaaatgcatcttgaagattaagatacacacaacaatccgtaagtgcgtcagaattttcagaacccgcggttcgctggaactctcgaaataaacaactaaatgccactgtacatctgaagctatcgcaagtggatagcgccgtagatatagaaaaacagcgatcgcaaccgatccgtccaaaacacgaaataatgtcgggactgcgaaacacctcggaggccgttgcagtgctcgcctccctgggactcggaatggttctgctcatgttcgtggcgaccacgccgccggccgttgaggccacccagtcggggatttacatagacaacggcaaggaccagacgatcatgcacagagtgctgagcgaggacgacaagctggacgtctcgtacgagatcctcgagttcctgggcatcgccgaacggccgacgcacctgagcagccaccagttgtcgctgaggaagtcggctcccaagttcctgctggacgtctaccaccgcatcacggcggaggagggtctcagcgatcaggatg

SEQ ID NO: 40232 - DNA, 1126 bp, DROSOPHILA
tcgcatccctcgcatcatcatccgcattctgcattcctcattccgtttcggcgtcgcggcgagataacgcgcgttgtttatttggttttagttttaagttagcgcgtttttacccaccgccggtgtcgcccaaataatgctagacacagcctagtgcaacggcaaaccatcatcaatcactcaaaccgccacacaagcagagaccgaaacggagccatgggccgcagccgaagtcccgcctcgccggcgcacaggagacgcgagaaggagcgatccgagcggaagaagcgcagggagcgccgttcccgggagcgggaggccatcggagtagcgccagccggaggatccggatctggaggcgccggtcgccgcgaccgggaacgggatcgcgaccgcagtcgcagccgagatcgggagcgggaacgggagcgcgaccgtgcgcggagtcggcgatctagatcgcggtcgagggtcgccggaggaggaggaggaggaggcggcggcggaagcagcggcggcaacagcagctccggaccatcgacgtcgcgaaggacgacgaggaacaatgcggcggccacagctgccgaccggcccaagatcaacgaggcggacctggagggtaaatcgccggaagaggtcgagatgctgaagacaatgggattctgcacgttcgacaccaccaagaacaggaaggtcgagggcaacgatgtcggagaagtgcatgtaatcctcaagcgaaagtaccgccagtacatgaatcgcaagggtggcttcaaccggccgctcgatttcgtggcatagcagtgcctagcagcagccgttggcgttgtccttgcaattccaattgccattggccatcgccatcgccatcgcagcagccacatccttttccgttgcccaactagtttgctacgcttttttacttgtccgtgcccaatgggcaatgggcggcggacgaagacctgcaattttatgcaatagaccggtttacgaaattcagccagcttttggcccgtcaaaatttccacgcatccagctagttcagcacgaggacagcctcgccacacacatacctcaattagttatttagtagtctaagcctgaagtgcgcctttgttatagagtt

SEQ ID NO: 40233 - protein, 194 aa, DROSOPHILA
MGRSRSPASPAHRRREKERSERKKRRERRSREREAIGVAPAGGSGSGGAGRRDRERDRDRSRSRDRERERERDRARSRRSRSRSRVAGGGGGGGGGGSSGGNSSSGPSTSRRTTRNNAAATAADRPKINEADLEGKSPEEVEMLKTMGFCTFDTTKNRKVEGNDVGEVHVILKRKYRQYMNRKGGFNRPLDFVA

SEQ ID NO: 40234 - DNA, 4264 bp, DROSOPHILA
acggcctttgtgtgcgtgtaaggccacgtaaccacttgacatgaaggcagtgcagcgaggcaaacgatgggtggtcggtggtttggtgggtggggtggtacagtggttggctgatgggttgggtggttgggcacgtgccgcgtggattacgcgtggcacgctgctgcgaagaaatatgaaagggaagcagcgtgaaatatgtgtagcataagacaaggcgcataatcaaaatgtaagcaacaacagcgcattgcaacagcagtagcaacaccaatggttgcacatgccacttacacaagtgcaaagcatcgccccacatcttccctgtgtccccctcgttttcggctttcgaaagcagcaggctgtcgtcccccctttttttggccaaaaacaaagggcgccgcacaaaaatcttacgcccgagctgccagttgatgtagcgcaccattatttcaggggattttccaagtgggtgttgcttgtattgggccagaagcactcgacatatcgatcatactttctattgcaggcgaaatcgtgcgaaagtctttaaatgattcagccgaaagcgaatgattgaaaaggatactttcaacacatgtgattgaatttatgaacttttaatttgagctctaaaaaataaaagtcgtaaaggaagagcaaagggtgatttgttttaggaaaggataccctatgaatgaaatgaaataatttaatattgttgctaccggaaattttcaagatggaaactgttcaaaaagctttaaatttaagatggtagctgacaaattttagtaatcgcaatttctggaaatccaagccaaacccaaacataatccccagaacaatttgcatggaccttgcttatgtactcaaatgcaaattctagcccaaattctactactccacttagagttttcagctgccaagagaagtttgcgcgactttccaccgatttatgcaatatttcagtatgcaggactctgtattccccaagctgtcacttttgtcgcatttcgctgctggggccagatccttttcgtttttgcccgcccaacgctatctttatctgcagctttttatttcgtatatcttttgggatggcggaatggaagctgtcactcacctcttcctcattgctggccgtattcacggagtccatgctctgcgaaagtcccaacggggccagagccatctgattctccattatggcgttgctgttgctgttgctgctgctgctgctgttcaggttgttgttgctgtcgctaacggccgatgttgctggtgtgccagttgctgctgctgttgctgccgcgcttcctgctgctgcggctgttgctgttgctgtgggggcggcgctggtgacgctgcctgccggcgagggcgtggtcggcgcggaggcggtcgcggagttggactcgtgcgagtgcgattcgtgggcgggactgtccggcaagctgccgccggtggtcgggacagcagcaacggatgttgctatgggcacagccgcagatgctgctcctgcactggtgttgctgttgttgttgctgttgtgcttgctgctgctgctgccgctgctcagaaggatgtgctgctgctgctgttgcggtgcgtatctgtgcagctgatagccgccgtagtgggccagagattgctgctgggcttggtgttgctgctgctgcgcctggtgttgctgctgcaagtgctgattcaggagagctgctgctgccgcctggttgaactgggccagtcggtgttgctgctgctgctgctgttgctgcaactgtggtgaggcggcaactgcgtaggcaacttgttgctgctgcacggcctgctgctgttgctgttgcacggcctgttgctgctgctgcgcctgctgttgctgctgctgctggtggtgggcggcaacggcggccgcgaactgcgtgggatgggcgaagctcagctggtggtggtgcggatgcgagatcggatgcgagtgcgagatctggtgtgtgtgggcgatctggtgtgtgtgcgagatcgggtgacctttgaccgagacgggcacgggcacggaaacgggcagcggtacggacaccggaacgggcacgggaacggtcaccggcagcacggagacggcggcggcacactggcgcttgggcgacggcgacaacacctgtggggcacttgctggcgtctgcggcagcgtcggcctgcgttttatcgcaatcgacgaaatggtgatggctttttcgaacaccgcctgctggttgttgttgctcggatggctgctgctgctgatctgattgatcgggccaatcgaattgataggattgctaataactgctggtgtcgtcggcgctgctggcaacaggtgttgcagttgcagttgcggttcggcggctgctgcagcggctgcggcggcggtggcggctatgagcagttgatgatggctgcccaacaggtcctggtagttggctattttgacgagtcagttgaactgcgaaagagcagagcagagaagaaattaatattttcaataaataccatgtcatctgtacaactatgtatgtattacatatatgtatttccctaaatattagttttcgcaagtaatcagaatatgtagccctcccaacgcttagacgcgctgaatttgtgacgttaaacagaagtcaaatatttggccatcgtgtgagctattgttttttcgtagatgtatgcaaataatacttcgatatgtcgaaatactttcgggtttatttagcataatgcaaatgtttacatgagaggcaacgggagcacgaaggtcttgaacaacactgcataaatcaaaagtaaatatgacgacaaatgtgttcgatggataaggggtgagatgaaaaagcaactggcaagcattgagattcaaaatgtactggaaatttcaaatatgcaaagcttatcggtgtcgcagataaatcaaacttatggagtgccacttgcttaactgataactgataatcaaagcaatacaaactatgaaagttaaatgtatctcagcttcgaacccaaaacatttcgattcagcagatgtttgtccaaaccatctgctattaagattgcctacatatgcaaatatgcaaagaatgcacataaacatagtgggccagtgcaagcaaacacagagggctcttgttctttctttcagtgtatagcacactcacacactcgcacacacttactcttatcatagtgagacatcagcagcacagcaacaacaaggccagctggcaactccattgcgtagttgggtacgaaaaaaaatttaaatacacagaggcgagcagcagcggcaaaatgggaataacagcaaccgcaaggcaaacagaacaaacaaacaaacaaaacccccatatactcagggcagactatccagaactcacagtaaggaggtggggttgctgagggggaaaccaacttgaaaattgagctgacaacaaaccgaaattgtattacaaacgctcgcttgagctggcaaaaatatgcacataactaaagttcagatctcgaagatatgtttcgggatctccatatgcatatggatgtgagttgatgtgtaaatatatgcgggttgctatacaaacagggctttcaattcggattataatggagcaaggacagaatcgaaccaccaccctccccacattgctccacattgacgcctgtgaattgtatctatctatctgaatcagtatctagcgaatgattctatgcagctcgctcggataattccgcatagtttgcatatgacaaaatatgcaggcgataaaacaaactttcgggctgctaagacctcatcagctttgaagaggaagtccattcaagacctaatgcgagtttaatacgaccccgccgccaatcaacgatgatttgaggatggcagtcgcactaatcctgtatgattaataattgatcaaaaaacaagcgtggcaaccgcacaatgaatttaaagtagacaatggagcacccagttatgtgtgggcttatataaataagtgggtatatttaaaagtgtgttcggtatcgagtggcatgagatttatggccaaaacttgcggacactgtgcgattaatgagcgggcggtccactgggcgtatgcgcaatggccaaaaaaacatgcggcaaacaattataacacaaacgtatggcatacgcattaatatttgccaattatagcattgatcattcagttgagccaatgatataaatgaaattgatttccataggaacaattaatta

SEQ ID NO: 40235 - DNA, 1518 bp, DROSOPHILA
atggagttgccagctggccttgttgttgctgtgctgctgatgtctcactatgataagaccaactaccaggacctgttgggcagccatcatcaactgctcatagccgccaccgccgccgcagccgctgcagcagccgccgaaccgcaactgcaactgcaacacctgttgccagcagcgccgacgacaccagcagttattagcaatcctatcaattcgattggcccgatcaatcagatcagcagcagcagccatccgagcaacaacaaccagcaggcggtgttcgaaaaagccatcaccatttcgtcgattgcgataaaacgcaggccgacgctgccgcagacgccagcaagtgccccacaggtgttgtcgccgtcgcccaagcgccagtgtgccgccgccgtctccgtgctgccggtgaccgttcccgtgcccgttccggtgtccgtaccgctgcccgtttccgtgcccgtgcccgtctcggtcaaaggtcacccgatctcgcacacacaccagatcgcccacacacaccagatctcgcactcgcatccgatctcgcatccgcaccaccaccagctgagcttcgcccatcccacgcagttcgcggccgccgttgccgcccaccaccagcagcagcagcaacagcaggcgcagcagcagcaacaggccgtgcaacagcaacagcagcaggccgtgcagcagcaacaagttgcctacgcagttgccgcctcaccacagttgcagcaacagcagcagcagcagcaacaccgactggcccagttcaaccaggcggcagcagcagctctcctgaatcagcacttgcagcagcaacaccaggcgcagcagcagcaacaccaagcccagcagcaatctctggcccactacggcggctatcagctgcacagatacgcaccgcaacagcagcagcagcacatccttctgagcagcggcagcagcagcagcaagcacaacagcaacaacaacagcaacaccagtgcaggagcagcatctgcggctgtgcccatagcaacatccgttgctgctgtcccgaccaccggcggcagcttgccggacagtcccgcccacgaatcgcactcgcacgagtccaactccgcgaccgcctccgcgccgaccacgccctcgccggcaggcagcgtcaccagcgccgcccccacagcaacagcaacagccgcagcagcaggaagcgcggcagcaacagcagcagcaactggcacaccagcaacatcggccgttagcgacagcaacaacaacctgaacagcagcagcagcagcaacagcaacagcaacgccataatggagaatcagatggctctggccccgttgggactttcgcagagcatggactccgtgaatacggccagcaatgaggaagaggtgagtgacagcttccattccgccatcccaaaagatatacgaaataaaaagctgcagataaagatagcgttgggcgggcaaaaacgaaaaggatctggccccagcagcgaaatgcgacaaaagtga

SEQ ID NO: 40236 - protein, 505 aa, DROSOPHILA
MELPAGLVVAVLLMSHYDKTNYQDLLGSHHQLLIAATAAAAAAAAAEPQLQLQHLLPAAPTTPAVISNPINSIGPINQISSSSHPSNNNQQAVFEKAITISSIAIKRRPTLPQTPASAPQVLSPSPKRQCAAAVSVLPVTVPVPVPVSVPLPVSVPVPVSVKGHPISHTHQIAHTHQISHSHPISHPHHHQLSFAHPTQFAAAVAAHHQQQQQQQAQQQQQAVQQQQQQAVQQQQVAYAVAASPQLQQQQQQQQHRLAQFNQAAAAALLNQHLQQQHQAQQQQHQAQQQSLAHYGGYQLHRYAPQQQQQHILLSSGSSSSKHNSNNNSNTSAGAASAAVPIATSVAAVPTTGGSLPDSPAHESHSHESNSATASAPTTPSPAGSVTSAAPTATATAAAAGSAAATAAATGTPATSAVSDSNNNLNSSSSSNSNSNAIMENQMALAPLGLSQSMDSVNTASNEEEVSDSFHSAIPKDIRNKKLQIKIALGGQKRKGSGPSSEMRQK

SEQ ID NO: 40237 - DNA, 6835 bp, DROSOPHILA
acgctctgttattaaaaattaaataaattgttggactttccattggctagtaataatatttatggcagctcgggcatgctcacccctcgatatgcaaattgattttcaaacaacctacaataaagtaaagtacagaccatgccttgaacaaaagtggtttaaagcccgaacgtttaatgtggttgggttaaattggtggggcagtagtcaagtgggttatgtgtatggcaatataggtgtggcatgctgcgtttaattttgcattttttataaagctgctgccactgctgccgtggctttttcttgcagcaaattgaaaaaacatatttatgtggccgtttggcatttgaagtacgtgagtcaaagcccacgttgtgcggacatagaatggttggcggggcagtctcccagcggaagctggcatttaggaaacggatgtctatgaggaagtcccagcagcaccttctctggacccgctccatttccccttcccccaacctcgttatgactgccaaactgttcgtttgctacaatttgtgtttaaatgcggctccaattgtaatggctaagtgagtgtgcgagtgcgattgcgctccggtgttcgggccaaactcatatggttttggccatcccttaggtaggttcttacttgttgttgctgattgttgcttgattgttgcttgctgttgatgctgctgctgttgctgttgttgttgttgttgttgttgtggtgttggtggtggaggtagcatgcaaagtaaacgggcaagcttaacaataacaatttgcaaaattttataaatagttaatgggggggggggggttctccttttatatattttggatttgggtttcgggttctgtgttttggtttagggtcatgcatatatctacgagggacttttgggcctgtgaaaagctttttgcggattgaaaggcttattctaatattaatgggccaagggctaagcgtgtgtgcagtttagtggagcaacttatatcatgataatgatggggttagattacgctaaacagacatacatagaagaaacttggttcatttggttcacccagaataatacatacgtctctaaagagatgattttggtggtgctgatttggatgatgaagttggtggtgctgtagtgagttaacaacaacgctagtggtgctgctgtgggtggtggtgcttgctgcagtgcagggtgctgccacggtcaattggagttgctgctgctgttgatgttgctgctgcaggtgcatctgctgttgcagttgctgcatctggagttgctgctgctgctgctgctgctgctgctgtgccgacggcggtggtgctgggaccagcaaatgctcgacccccccaccgccgttcaggatgtacatgggtgctggcggtggcggtggtgcaacagtagcagcaacagcagtgggtggtggtggtggcggtgccttggtgttcattatggtcacctcgttgatcattttgctgcgcgcaaactcgatgcggatggaaccgcgatcggagctgagcagatatttaccctgcagctgctgcatggcctgagacgcggtcggtgggtccttgaactcgatgaatgccaccggatgttgctgcaccgcagcgctgttgtggttgctgttgctgctgctgccactgccgttactggtggagcagcttgagccagttgctgttgccatggctgatggttcaggagcaatcacagtcgcagacgcagtcgcagatgtggttgttgtggagtaggaagttgaagttggtttggttgaggtcagagttgaagacaaagtaataggcatagaatttgtgattgggtgcataccttttgtgtgcattcgtaggcgacaaaagccaggcatactgtgcatattatttatcatagttgattatatataatttgttgttagatatatatgtcggttatcatgtatcatacaagaagagtgatcgggtgggatggtgggcaacaaacgaaccaaggaagagaacgcaaaagttttcggttagtaatcggttaagaaagttcacaaagtgccatcaagagtggtgattgttatggtggttatgtgtgatcgtgatctttatcgtgatcgggtggtttatactgtggtggtgatgtggtggtttccagtgatcccagtgcagttttcattgtgtctcaaaaaagattacaaagtacgattggcattattcgtgtgcaatttacctagagaacacctccttcagctcgtgctccgaaacgaattgccccagattggccacaaacagcgtggagcagggcgcattggccgcgatctgtggattgcccggatgactggcgttgttcgtagatccagccgggctggccaacgccggactcgacagatagtggtgatgtgatgcagcagcagctgcagcggctgttgcagcagcactttgcggtgccgcagcagcggtggccgctcccccacctccgccggcagctgcagctgccgcagccgcagccatgtgagccatcgcagctccgggatgaatagcagttgtctgatgatgtggcggcatggtcatttgagtctgcaaagtggagtaagaagagtattaataatctttctttcttagatgtttctaagatttatgtgcgttccacttacttgatgcatcggctgctccattactttgtctgtatttagtcagagataggagcgcactggcacctgcggatgcagggccggatgcactagcgttgcatgctgcagtgcagcagctcctggcaattcggcggcggcggctgccgaataggctagcggatgatgccataactccggtccgcccggaaagaagggaccgcccaaatctgcgagtcgagaagagaaatagtggggtaaatcagatggcagctcacctaagtggtgtactaattgagtattaaacactggttttagttgacaaaaatctaaatggtaaaaacaagaacggtttccaaacgaaaaaaaaatatatatatatattaagaaatgattttatttgcttaaagttcgttgcctcagtctttcgttaaaacagctaagttgtcaatgactctaaaattaatctcggtaagttcattaattgttttaatcattttttaggatgaagatataaaagcctatttattcagtactaactttagctcttctttagctctttttttctattttttgtaggcgtgtatggtcttttcgtgtgtgcgttgcacaaagtgtggcaagtgatcaaagtgcagtacattatatatagatgttgtagttatcgtgactgtaacctaattgggaatataaacataacgcaatagcgactcgaagtatgcagagataacaacttgatatggtagatatagcatacaaaagaatttacgatatatatttgctgttatatatatatttatatatattttaagttgtgtgcacttgaagctagttcgtttccatatataacatattcaactgctcaactgttggattgatcggtgtaagagtgtgcgagtgttcggtgtattcgctgtgtttgtgtgtgattttgtcaatagttaggaggaggtgctcgagtacgccttcggttcggatttcttgtacccttaaacatacaatagtattggtatttcatagatctcaactacatacacaaaaggaaaacaaaacaaactcaaagaaattagcagctgctgagttctcatatagctatttggttttgcttttgataatttctcgttatttatttattttttgttcagtttttttttttttttttacttacgtccagtgagtgggtgcatcaatgcaggatgtgaggctgttgtcgctgtattgggctgtggtttgggtttgctcactttcgtgttactcttggcgaattccaagcgaattgtttggggcatatcgggatcgaagcgtacaccctgctgtaaatgatcagatcaaaatacagcggtttgtattttccattgttttctcttttttattttttcaagtaatttattctttcggcaaagttcaaaggttttgtgggagacttttcaattagttcttttgcaacaattcgccaaaaataattttgaatgtcgcgtgaaagtaacgttaacaaaaaacaaaaaaaaaaactgtgttcaaacttgtgttactcattttttgacttgaagagctattgcttggggttttcgggggggcgggagacattcaacgcgtttgtatttgtattacgtggtgcctgctcggtaatctgagttttggttttggggatcgtgacagctttggttttggctaagtgttgctatggattggggtctttggggaaaatcacttgaatcgttaaaaatcctagcaatttttcaatatttttcaatcacagtttagaaaatactaagaaaaatcctaatactgcccttataaaactaggttctaataaagccagaatgatttttgtaaaaaattaaacaatcaatacaaattgttttcttcctttagaaaagtttgtaaaggtatctttgaatgaaatattattttctgctcttagttttatttcaaggcgaactataaaatgattcaaaaatgctttcagcttgagggggcgtccaggatctccaaggataattaaaagttgtttcaaggaactttagtgtgctcttccaggggcggttggcttaaggggggggggggcgtggctgggggacatgcaccacaggcttgagacgttgcttttcgtttgttggtgctttttgctttgccattttgcagattttttttgccagagatgtaggtgtgtgtgtgtgtgtgtggttgtgatgagtgtaccagtttacgtgtgtatttgtgttctctgcgtgtcaaagagttttcgtagaatgagcaaataataggagggatgcagataccaaaaacaataagacaactcaatggcaagttagagagagatatatagaacgacagaaatggagagatagatagagatacatagagagagagagagcgggacagcaaaggctagacagagagggaaacacttaatgcgatttggtgaattttaagattctttctttcaaatgcaagcacgtgttcgtgtggatcgttgtttgtttgtttgcttgttcgtattttgttttgctatcatttgttttttgtttggtgatttttgatttttgggtgatgcaaaaggagctcgaagctcgatttttgagcagcggcaacaggggcctaaaggtatttaagccaggcaatacgagtatacaagtattttggttattttcgtagtttcagtactttttcattgggtgctttacagttcttatgttatgtgtgtaggtttcatttgctcttgtcgctgagaaaatatttctggcattttctcttttgtcgcattgctcatacaaatttgctaaatcattttagtgttctttcgattataaaaggtacagagatatatgtgtatgtgatgtgcatatttacctgcagatcctgtttagctgcctcagctccagctcttgtatggaatgtcacaaagccaacgggctgtaaatatttttggaaaattattaatagactgaaaggtaaatcgaaaaacaaaataatttcaggatatatgatttaaaaataaagaaataatgtgagaacttctatttagatgaaaacctttactcaccgatgcagttttgccatttttgctagttactttcaaaagagatccttcatagccctgttgttgtgtaaatgttgtattaagaaattgtttaacttactttaaatatatgaaaaactcacctcataggctctgaataacaaatagagctcgcgcggcttggcgtccatgggcaaaccactgacgaaaagtgtgcgaacctgcaatgatgacaagatagatagagaatcgttagatgattgctagttcgcaaaaccaatttcccatgattacataattaagttgaaactgtcacgttgtcgctgcgaaaacacaaatacaaccttcagcctcaattttcaacttcaaatgtttgtaatgcgctttgtgccccagcaaacccgcttgtgccactcatttggccaaaaagttcatgacaccaaacgcacacgacattgcaaagggacacccccccccccccccccccgggtggcaaatgggtgtgctggtgggggtcacatgtacccactgataatgaaaccaaatggaataagcgccataaacgctgaattcattatgacaacgccagagacgtgactcttgttcgtcggacgcaggggggatggttggagtagataggggcgtctttagggggtggtgggtaggcgctcaggggaatatgtattacaggtgagtcaggtaaaaccaacatacacacacacacacacacatacacatgtgctgcagggactaaatgagtccccagttctgacagctttttatttttaacacctaggcgaaaatgtttgagtcgaggtggcgagcgttacttttgagcgatgtgactgtgaatgtgtgcaactgggttacatttccacaccctctccttaatttcatcctttttttttcgggctggcattttgtgctgagcgggtaaatttactttgttgctggcctttaaagctgtagcgtcattagcttaaaggtaaaatgcataatggtttcaggggcatgggaaacgtggcagtctaatcaagaaacgcatgtagtcttgcactcagcttaattgaaatattttctagcaaaaaatacttatttgagaactaactagcttatattctataaatttcatttactcctttctattcaagtttatttctgattccgatcatggtcacgactggcttttta

SEQ ID NO: 40238 - DNA, 1422 bp, DROSOPHILA
atggacgccaagccgcgcgagctctatttgttattcagagcctatgagggctatgaaggatctcttttgaaagtaactagcaaaaatggcaaaactgcatcgcccgttggctttgtgacattccatacaagagctggagctgaggcagctaaacaggatctgcagcagggtgtacgcttcgatcccgatatgccccaaacaattcgcttggaattcgccaagagtaacacgaaagtgagcaaacccaaaccacagcccaatacagcgacaacagcctcacatcctgcattgatgcacccactcactggacatttgggcggtcccttctttccgggcggaccggagttatggcatcatccgctagcctattcggcagccgccgccgccgaattgccaggagctgctgcactgcagcatgcaacgctagtgcatccggccctgcatccgcaggtgccaactcaaatgaccatgccgccacatcatcagacaactgctattcatcccggagctgcgatggctcacatggctgcggctgcggcagctgcagctgccggcggaggtgggggagcggccaccgctgctgcggcaccgcaaagtgctgctgcaacagccgctgcagctgctgctgcatcacatcaccactatctgtcgagtccggcgttggccagcccggctggatctacgaacaacgccagtcatccgggcaatccacagatcgcggccaatgcgccctgctccacgctgtttgtggccaatctggggcaattcgtttcggagcacgagctgaaggaggtgttctctagctgctccaccagtaacggcagtggcagcagcagcaacagcaaccacaacagcgctgcggtgcagcaacatccggtggcattcatcgagttcaaggacccaccgaccgcgtctcaggccatgcagcagctgcagggtaaatatctgctcagctccgatcgcggttccatccgcatcgagtttgcgcgcagcaaaatgatcaacgaggtgaccataatgaacaccaaggcaccgccaccaccaccacccactgctgttgctgctactgttgcaccaccgccaccgccagcacccatgtacatcctgaacggcggtgggggggtcgagcatttgctggtcccagcaccaccgccgtcggcacagcagcagcagcagcagcagcagcagcaactccagatgcagcaactgcaacagcagatgcacctgcagcagcaacatcaacagcagcagcaactccaattgaccgtggcagcaccctgcactgcagcaagcaccaccacccacagcagcaccactagcgttgttgttaactcactacagcaccaccaacttcatcatccaaatcagcaccaccaaaatcatctctttagagaccgtaatctaaccccatcattatcatga

SEQ ID NO: 40239 - protein, 473 aa, DROSOPHILA
MDAKPRELYLLFRAYEGYEGSLLKVTSKNGKTASPVGFVTFHTRAGAEAAKQDLQQGVRFDPDMPQTIRLEFAKSNTKVSKPKPQPNTATTASHPALMHPLTGHLGGPFFPGGPELWHHPLAYSAAAAAELPGAAALQHATLVHPALHPQVPTQMTMPPHHQTTAIHPGAAMAHMAAAAAAAAAGGGGGAATAAAAPQSAAATAAAAAAASHHHYLSSPALASPAGSTNNASHPGNPQIAANAPCSTLFVANLGQFVSEHELKEVFSSCSTSNGSGSSSNSNHNSAAVQQHPVAFIEFKDPPTASQAMQQLQGKYLLSSDRGSIRIEFARSKMINEVTIMNTKAPPPPPPTAVAATVAPPPPPAPMYILNGGGGVEHLLVPAPPPSAQQQQQQQQQQLQMQQLQQQMHLQQQHQQQQQLQLTVAAPCTAASTTTHSSTTSVVVNSLQHHQLHHPNQHHQNHLFRDRNLTPSLS

SEQ ID NO: 40240 - DNA, 12294 bp, DROSOPHILA
cagcagcgtcagaaattaaattggcaagcccccaacaagaaagcgcggggatgaagtgcagcaaacgttgcctgcaacattgaacgcctttgacatattcacgcaacttgtcctcggggcgcaacgacatcctcctccgtggagcaacttcctcgaagaagtcagattctgcggcgtcgaattgtctgcggcataatcgtatattctccctggcttcggtacttattatttgcttggttctgcgcttctttctggttctttcgttttggcaaatcggcaggaagcccttctaaattatgtcttgtttatgtggcattgcatatttatggtccgtgcgcgcgtcgcataataaaaaaatgttaccgaagaaattgcaaattttacttgaccaagtcccattcttttcgccacccagtggtaagggaatccaccgcctatcccgccacagatttagccgcaaaaacaagttcaatgtttgcttgctctggccagtgagcataaacaagttcatcatgctgtcgccgcgaagccccacaaaagtttgtttgtgccccttcgctggacgcagacccaagtcttttgagaaagtccccgtcgaagttggtgactcccccgccagccagctaaccagccagagtgagccacccagcctgttgctcctctaatgagtctgagtactcgtgtgtccacaggcatgcggcgaagtcaacaaatacatggctatatatgtgcaacaagtcaacacgtgacttcggtcctatgattttaatgaatggtcgagttgggcgagattatgtctgggtggcgtttaattaaattgcctacttcgctctccacttgcagctcaactgccttggtagcattcattgttctggccagcattcatgattcccagagcagattcgtaagtatgcagcggatatcctgaaggtacttacggctaatccactgagcccttttccagcctggactcagacaaaaaagacaatatggggcgaacatgtacttgccggagagctcggtgacgcccggcggcgagggtaacgatcccgatgagtggacaccttggagctcaccctcggactgttccaggacctgcggcggtggagtgtcctaccagactcgggagtgcctgcgaagagagtgagtatacaagacctgccgtaaaagaaaacaaccctattccatccctatcatagccgaatgttatattaggaaagagacctctagattgccaatagttttaaatctcttacatctcttaccactccacagtgatcgtggcgaggcagtctgcagtggaggcagtcgccgttacttctcctgcaacacccaagactgtccggaggaagaatccgacttccgggcgcagcagtgctcccgcttcgacaggcagcagtttgatggagtcttctacgagtgggtgccgtacacgaatgcacccaatccctgcgagctgaactgtatgcccaagggcgagcggttctactaccgtcagcgggagaaggtggtggacggaacccgctgcaacgacaaggacctcgacgtgtgcgtaaacggggagtgcatgccggtgggctgcgacatgatgctgggtagcgatgccaaggaggacaagtgccgaaagtgtggtggtgatggcagcacctgcaagaccattcgcaacaccatcaccacgaaggatctggctcctggatacaatgacttgctgctccttccagagggagccactaacattcgtatcgaggagactgtgccctccagcaattacctggcctgccggaaccacagtggacactactacctgaacggcgattggcgcatcgacttcccacgccccatgttcttcgcgaactcgtggtggaactaccaacgaaagccaatgggcttcgccgctcccgaccaactgacctgcagcggtcccatctcggagagcctcttcatagttatgttggtgcaggagaagaacatcagcctcgactacgagtacagcattccggagagccttagtcactcgcagcaggatacgcacacatggacgcatcaccagttcaatgcctgcagtgcttcctgcggcggtggctctcagagtcgaaaggtcacatgcaacaatcgcatcaccttggcggaagtcaatccatcgctgtgcgaccaaaagtccaagccagtggaggaacaggcttgcggcacggaaccgtgtgcaccacactgggttgagggagagtggtccaagtgctctaagggctgcgggtccgatggcttccaaaacaggagcatcacctgcgagcgaatctcctcttcggggtaagtctttcttgattcagaagagttaaatgatgaacaacaacgtgtggcttttcaatttagcgagcatacagttgaagaagatgccgtttgcctaaaggaggtgggcaacaagccggccaccaaacaggagtgcaaccgcgatgtaaagaactgccccaagtatcatttaggaccttggacgccgtgtgataagctttgcggcgacggaaagcagacacgaaaggtgacctgcttcatcgaggagaacggacacaaacgagtcctgcccgaagaagattgcgtggaggagaagccagagacggagaagtcctgcctcttaacgccttgtgagggcgttgactggataatctcccaatggagcggcgtaagtattgcacttgtctgtgaaattaaaaggtactgaattcctgtgtattctagtgcaatgcgtgtggtcagaataccgaaacacgtaccgccatctgtggcaacaaggaaggtaaggtgtatccggaggaattctgtgaaccagaggtacccactctatcccggccgtgcaaatcccccaagtgcgaggcgcaatggttctcctcggagtggagcaagtgctctgctccttgcggaaaaggtgtcaaatctcgcattgtcatttgcggggagttcgatggcaagacggtaactccagcagatgatgactctaagtgcaacaaagaaacgaaaccggaatcagaacaggattgtgagggcgaggagaaggtttgccccggcgaatggttcactggaccttggggcaagtgcagcaagccttgtggtgggggtgagcgagtccgtgaggtcctgtgtctttccaatggaaccaagtcagtcaactgcgatgaagaaaaggtcgaacctctatctgaaaagtgtaactctgaagcctgcactgaggatgagattttacctttgaccagtactgataagcccatcgaggatgacgaggaggattgcgatgaagatggtattgagttgatcagcgatgggttgtcagacgatgaaaagagcgaagatgtgatcgacttggagggaactgcaaagacggaaactacgcccgaggccgaagatcttatgcaaagtgacagcccgacaccctatgatgagtttgaatcgactggtaccacatttgagggatcgggatatgattcagaatcaaccaccgacagcggcatttccacagaaggaagcggtgatgacgaagaaacgtctgaggcttccactgatttgtctagctccacggattccggttccacctccagtgactctacttccagcgactcaagctccagtatttccagcgatgcaacttctgaagcaccggcatcctcagtttctgattcaagcgattccacagatgcatccacagaaaccacaggagtttctgatgactccactgatgtctcgagctcaacagaagcctccgcctcggagtcgaccgatgtctcaggcgcatcagattccacgggctccaccaatgcttccgactcaactcctgaaagctccacggaagcctcaagttccacagatgactccacggactcttcggacaattcttcgaacgttagtgagtcatcaacagaggcttcttcctcatccgtatctgattctaatgacagttctgatggatccaccgatggcgtatccagcacaactgagaattcatcagacagtacttctgatgccacttccgactcaacagcatcttcagattctacggactctacttccgatcagacaactgaaactacccctgaatcatcgactgattcaacagaatcgtctaccctggacgcatcctcaacaacagatgcctcatcgactagcgagtcttcatcggaaagctcaacagatggatcttcaactacatccaactcggcatcaagcgaaaccaccgggctgtccagtgatggatcaaccacagatgcaactacagctgcttctgacaacactgacatcaccactgatggctcaactgatgaatccactgatggttcctctaatgcctctactgagggctctactgaaggcgcaagcgaggacaccacaatctccacggagtcctccggatcaaccgaaagcaccgacgccatcgccagtgatggttcgaccaccgagggaagtaccgtcgaggacctgtccagttccacaagctctgatgttacatctgattctaccatcaccgactcctcaccttccactgaagtatctggttccacagactcatcctcttccacagatggttcctcaacagatgcttcctccactgaggcttcctctaccgatgtcactgaatctacagatagtactgttagtggaggtaccagcgacactacggaaagcggtccaacggaggaaagtactaccgaaggctccactgaaagcacaaccgaaggatccacagacagcacccaatccaccgatctggacagcaccaccagtgatatctggagcaccagtgataaggatgacgaatcggagagcagtactccttactcctttgattctgaagttaccaagagcaagccccgtaaatgtaagcctaagaagagtacctgcgccaaatccgagtacggttgctgtccggatggtaagtccactccgaagggaccgtttgacgagggctgtcccattgcaaagacctgtgcggatacaaagtacggttgttgcttggacggagtgtctccggctaagggcaagaataacaagggttgtcccaagtcccagtgcgctgagactctctttggctgctgtcccgataaattcaccgccgccgatggtgagaatgatgagggatgtccagagaccactactgtaccacctacgactaccacagaggagacacagccagagactactactgagatcgaaggatcaggtcaagactcgacgacttctgagccagacaccaagaagtcctgctccttctccgaatttggttgctgtcccgatgcggaaacatccgccaagggccctgacttcgagggatgtggtcttgcgtcaccggttgccaagggctgcgcagagtctgagaacggttgctgtccggatggacaaacacctgcaagcggtccgaatggcgaaggttgctctggatgcacacgtgagcgctttggatgttgtccggactcccaaaccccggcccatggtcccaacaaggagggctgctgcttggacactcagtttggctgctgccccgacaacatcttggccgcgcgtggacccaacaacgagggctgcgaatgccactacactccgtatggctgctgcccggacaataagtcggccgcaactggctacaaccaggagggatgcgcctgcgagacgacccagtatggctgctgtcccgacaagatcactgccgccaagggacccaagcacgagggctgcccttgcgagaccacccagttcggatgctgtccagatgggctcaccttcgccaagggaccgcaccaccacggatgccactgcactcagacggagttcaagtgctgcgacgacgagaagaccccggccaagggccccaacggcgatggctgcacgtgtgtggagagcaagttcggttgctgtcccgatggagtcaccaaggcgacggacgagaagttcggtggatgcgagaatgtccaggagccaccgcaaaaggcctgcggcctgcccaaggagacgggcacctgcaataactacagcgtcaagtactacttcgacacctcctacggaggatgcgctcgcttttggtacggtggctgcgatggcaacgacaaccgctttgagagcgaggccgagtgcaaggacacctgccaggattacaccggcaagcacgtatgcctgctgcccaagagcgcaggtccctgcactggcttcaccaagaaatggtacttcgatgtcgaccgcaaccggtgcgaggagttccagtacggcggatgctacggtaccaataatcgcttcgatagcttggaacagtgccagggcacttgtgctgccagtgaaaatctgcgtaagtgggcatctgttccttattccagagccacgattatcggcattcttccaatgtagctacctgtgaacaacctgtggagagcggaccatgtgccggaaacttcgagcgttggtactacgacaacgagacggacatctgccgacccttcacctatggtggatgcaagggcaacaagaacaactatcccacggaacatgcctgcaactacaactgccgccagcccggcgtgcttaaaggtttgagatcagatttagtatgctatggtgccttgagttgggtaatgagactagttgtatgcaatattttgcttgggttaatgagttattttaagcttaaacctcctggtttttcctggctaacggtatgttcttcccaaacgttccttctcccccaaaaactgcttggttactatattgtatgtgcatgattgcttgttacttgctatgccgactttccgaatctgcacccgcatccgaatctcctcctgcaccaaacaccttcaccatcccacaaccccagaccgctgtgcgctccctaagcaaactggtgattgcagtgaaaaactggccaagtggcacttctccgagagtgagaagcgctgcgtgcccttctactacagcggttgtggtggcaacaagaacaacttcccgaccctggagtcctgcgaggaccactgcccacgccaagttggtaagctttaaatgtcgcctgctccggaggctgctttcaatgtgttcctgttttccgctacccaaacccccgccctactgacactctttcaatccctcaacccaactagctaaggacatctgtgagattccggccgaggtgggcgagtgtgccaactacgttaccagctggtactacgacactcaggatcaggcctgtcgccagttctactacggcggctgtgggggcaatgagaaccgcttccccaccgaggagtcctgtttggcgcgttgcgaccgcaagcccgaacccacaaccaccacccccgccaccaggccacaacccagtaggcaggacgtctgtgacgaggaacccgctccaggagaatgtagtacctgggtcctcaagtggcacttcgatcggaagattggggcttgccgtcagttctactatggcaactgtggcggcaatggcaatcgcttcgagacagagaacgattgtcagcagcgttgtcttagccaagagcctcctgccccgactcctccacgagcacctgctccaaccaggcagccagatccggctcctactgtcgctcaatgcagtcagcctgctgatccaggacagtgcgacaaatgggcgctccactggaactacaacgagaccgagggtcgctgtcagtcgttctactacggcggctgtggcggcaatgataaccgctttgccaccgaggaggagtgctctgctcgctgctctgtcaacatagacatccgcattggtgccgatcccgtggagcacgacacgtccaagtgcttcttggccttcgaaccgggtaactgctacaacaacgtgacccgctggttctacaacagcgcggagggactctgcgacgagttcgtctacacgggctgcggcggtaatgccaacaactatgccaccgaggaggagtgccagaacgagtgcaacgacgcccagaccacatgtgcactgcctccggtccgtggacgatgcagtgacctctcccggcgctggtacttcgatgagcgcagcggagaatgccacgagttcgagttcactggatgccgcggtaatcgaaacaacttcgtgtcgcagagcgattgcctaaacttctgcattggggagcctgtagtggagccttcagcgccggttagattgttcttcttttcatgtgtcttaatctttatgcgaatattatcttacagacctattcggtgtgcgccgagcctccggaggccggcgaatgcgacaaccgtaccaccgcgtggttctacgacagcgagaacatggcctgcacggccttcacctacacgggatgcggaggcaatggaaaccgcttcgagacccgcgaccagtgcgaacggcagtgcggcgagttcaagggagtgggtaagtttggggcagccgggctgggtacttgtttcagatgctataatctcttgtgtcagacgtttgcaatgaaccggtgaccacgggtccgtgcaccgactggcagacgaagtactacttcaacacagcgagccaggcttgcgaaccgttcacctatggtggatgtgatggcaccggcaaccgtttcagcgatttgttcgagtgccagactgtttgtctggctggtcgtgaaccgagagtgggctcggctaaaggtaacatatacagcgggcgggtctcgacttgggggtcaccatggagtcgccgggctaactggttcttctcttgcgtaagtagaaatctgcctgctgccggtggcgacgggccgctgcaatggaccttcggtgcacgagcgccgttggtactacgacgacgaagcaggaaactgtgtgtccttcatatacgccggctgctccggcaaccagaacaacttccgatccttcgaggcatgcacgaaccaatgccgacgtaagccccacctacagccacttatgcaccacaaagcactgtgcaccacagagctcacagcacctcaattagcacccacccacccacaaatgcaccttgcaatctgcccacacccaaatcgcttgctctcgtagaaactttgaagtagcatctatagtagttgcgttagtgcaccttcactaaacttaagtctgcacgggttcttgggaatggagtgtctcactgaaaatgccctcttggctgactcgcaatcccctttcttgcagcggaacccaacaagcaggacaacgaaattggacaaaatccgtgcgataccttcgatgcggagtgccaggagctccgctgtccatacggcgttcgccgtgtggccgccaggtcccagccagagtgcacgcagtgcatctgcgagaatccgtgcgagggctacagttgcccggagggccaacagtgcgccatcgatgtggccagttccgacgatcgccagtttgctccagtgtgtcgcgatatttataagccaggagagtgcccggctctttcagcgaatgccagtggatgtgcccgggaatgctacaccgatgccgactgtcgtggagacaacaagtgctgcagcgacggctgcggacagctgtgtgtgcatcctgctcgtccaactcagccgcccaggactcaggctccagtggtctcctatccgggcgatgccagagccgctctggaacccaaggaggcgcatgagcttgatgtccagacagccatcggcggcatagccgtgctgcgctgcttcgccaccggcaatccagccccgaatatcacctggtcgctcaagaacttggtggtaagcaattgggagattctgttttttccattcgcctgagtgcattattgtgttctttatagatcaacacgaacaagggacgatatgtgctgaccgccaacggtgatctgaccattgtccaggtgcgccaaacagacgatggcacctacgtctgcgtggccagcaatggtctgggagaacccgtgcgtcgtgaggtcgccctccaggttacaggtgcgtttctaagaccgccttcaatacatttgtgttttttgttattattacttaatgctatgaatgttaagatctcaatatatacataagtaggaaattaatgaatcggattaccgattctgctattcctaatatccactgatactttatacactttggtgatggctatgtaactaactgctttatattgaacactttgcgcatgttgcctgctttccgtaattgcttgcttgaatcttggtggcggtagaacccgtaagtcagccagcttacatctacggagacaagaacgttactcagatcgtggagttgaaccgtccggcagtgatccgctgcccggccggtggcttcccagagccgcatgtcagctggtggcgcaacggacagatgtttggcctgaagaacaacctgatggcccgcgactactcgctggtcttcaactcgatccagttgtcggatcttggcctctacacctgcgaggtgtacaatcagaggcgtccggtctcgctgcgcgttactctgaaggcggtgggtcctgtccggcctctgagtcccgaggaggagcaatacatgcagtatgtgctcaatccggccacccgtccggtgacccagcgacccagctatccctatcgacccacccgaccggcctatgtgccagagcccacaggtaagtactgcacctttgcatgttttcgctgggctggcatggtgttggattttttttattgtttatgtatgttctggtaacaaaaaactaaccacttctttacgtgatttatagttaatgttcatgccgtgttggctctggagccgaagaacagctacaccccaggctccaccattgtcatgagctgctccgtgcagggctatccagaaccgaatgtcacatggatcaaggacgacgtgcctctgtacaacaacgagcgtgttcaaattacatgtaagcagttatttaataatattatttcgatctatttaaaaaaaaaataaaatcttatgtaactgcagaccaaccacatcgcctggtgctgagtgatgtcacatccgcggattccggaaagtacacttgccgggccagcaatgcgtacacctacgccaatggagaggccaatgtgtccattcaatgtgagtttggggttctaaaatcgaatctaggggatactaatagtagttatatttccagctgttgtaccagtgtcgcccgagtgcgttgacaatccgtacttcgctaactgcaagcttatcgtcaagggcagatactgttccaatccgtactacacccagttctgctgccgatcctgcacgttggcgggccaggtggcctcgcctcctctgcatcccaatgcggtgtaattccacggagcgagatagagcagagtaattttgtttagttttcggattgaattgagtttaaacgcaccacacaagaataattggatcgacattcgcggacatcccatcatccaaaagcagagagaccaaaaagccaatcgttgcttagccatagccaccatatatatacctacatatatatagcctaccgatcaagaacgaacgaacttctattgtagtattttactctcttccaggacaaaagcaaatagtattagtgattttatgtttgtgttcctatttattcttgataacgagtaaccttaaattcaatcgaggaaagaaaagcggctaaaacgaatttgccttctactttttagtttctacgacatttctgtgcaacgagtaaagcatttaagcctaaaaaccaataattgtaaataaattaaaactacataataaagagtgcatatgtataaaagattaaactcaggggatggcccacaatttgaaaatgccaccccatctggcaacgctttcgtggcaaggggttattgattttccaaagttttcccagcagcagctgttcgtggagcctgcgccctaaactctggggttgattggagttctggagtcgtgcagaggaagacaataaaatttgtttgtgttgtcatcgcgtttaactcgcttctttaaacattgtaaagtttaattttaaaactatggaggatagcggcatcgatagcgaggacagacaatccaacatctacgaggatggggctgcgggactcttggtaagtgcattggatcaacaacaacagctgagcggggaaaatgcaatttttcacggctaacgtcaatgcagaaaacggccagcggagcacccaaacatatgtcagatctggagtttgaggtggcattcaggggtgccggcaaggtctatgcccccacgaccatagaaatcgatgaagaggaggaagcgaccgcaggaagcggtcgaggccacgagccacccaacacc

SEQ ID NO: 40241 - DNA, 8577 bp, DROSOPHILA
atgtacttgccggagagctcggtgacgcccggcggcgagggtaacgatcccgatgagtggacaccttggagctcaccctcggactgttccaggacctgcggcggtggagtgtcctaccagactcgggagtgcctgcgaagagatgatcgtggcgaggcagtctgcagtggaggcagtcgccgttacttctcctgcaacacccaagactgtccggaggaagaatccgacttccgggcgcagcagtgctcccgcttcgacaggcagcagtttgatggagtcttctacgagtgggtgccgtacacgaatgcacccaatccctgcgagctgaactgtatgcccaagggcgagcggttctactaccgtcagcgggagaaggtggtggacggaacccgctgcaacgacaaggacctcgacgtgtgcgtaaacggggagtgcatgccggtgggctgcgacatgatgctgggtagcgatgccaaggaggacaagtgccgaaagtgtggtggtgatggcagcacctgcaagaccattcgcaacaccatcaccacgaaggatctggctcctggatacaatgacttgctgctccttccagagggagccactaacattcgtatcgaggagactgtgccctccagcaattacctggcctgccggaaccacagtggacactactacctgaacggcgattggcgcatcgacttcccacgccccatgttcttcgcgaactcgtggtggaactaccaacgaaagccaatgggcttcgccgctcccgaccaactgacctgcagcggtcccatctcggagagcctcttcatagttatgttggtgcaggagaagaacatcagcctcgactacgagtacagcattccggagagccttagtcactcgcagcaggatacgcacacatggacgcatcaccagttcaatgcctgcagtgcttcctgcggcggtggctctcagagtcgaaaggtcacatgcaacaatcgcatcaccttggcggaagtcaatccatcgctgtgcgaccaaaagtccaagccagtggaggaacaggcttgcggcacggaaccgtgtgcaccacactgggttgagggagagtggtccaagtgctctaagggctgcgggtccgatggcttccaaaacaggagcatcacctgcgagcgaatctcctcttcgggcgagcatacagttgaagaagatgccgtttgcctaaaggaggtgggcaacaagccggccaccaaacaggagtgcaaccgcgatgtaaagaactgccccaagtatcatttaggaccttggacgccgtgtgataagctttgcggcgacggaaagcagacacgaaaggtgacctgcttcatcgaggagaacggacacaaacgagtcctgcccgaagaagattgcgtggaggagaagccagagacggagaagtcctgcctcttaacgccttgtgagggcgttgactggataatctcccaatggagcggctgcaatgcgtgtggtcagaataccgaaacacgtaccgccatctgtggcaacaaggaaggtaaggtgtatccggaggaattctgtgaaccagaggtacccactctatcccggccgtgcaaatcccccaagtgcgaggcgcaatggttctcctcggagtggagcaagtgctctgctccttgcggaaaaggtgtcaaatctcgcattgtcatttgcggggagttcgatggcaagacggtaactccagcagatgatgactctaagtgcaacaaagaaacgaaaccggaatcagaacaggattgtgagggcgaggagaaggtttgccccggcgaatggttcactggaccttggggcaagtgcagcaagccttgtggtgggggtgagcgagtccgtgaggtcctgtgtctttccaatggaaccaagtcagtcaactgcgatgaagaaaaggtcgaacctctatctgaaaagtgtaactctgaagcctgcactgaggatgagattttacctttgaccagtactgataagcccatcgaggatgacgaggaggattgcgatgaagatggtattgagttgatcagcgatgggttgtcagacgatgaaaagagcgaagatgtgatcgacttggagggaactgcaaagacggaaactacgcccgaggccgaagatcttatgcaaagtgacagcccgacaccctatgatgagtttgaatcgactggtaccacatttgagggatcgggatatgattcagaatcaaccaccgacagcggcatttccacagaaggaagcggtgatgacgaagaaacgtctgaggcttccactgatttgtctagctccacggattccggttccacctccagtgactctacttccagcgactcaagctccagtatttccagcgatgcaacttctgaagcaccggcatcctcagtttctgattcaagcgattccacagatgcatccacagaaaccacaggagtttctgatgactccactgatgtctcgagctcaacagaagcctccgcctcggagtcgaccgatgtctcaggcgcatcagattccacgggctccaccaatgcttccgactcaactcctgaaagctccacggaagcctcaagttccacagatgactccacggactcttcggacaattcttcgaacgttagtgagtcatcaacagaggcttcttcctcatccgtatctgattctaatgacagttctgatggatccaccgatggcgtatccagcacaactgagaattcatcagacagtacttctgatgccacttccgactcaacagcatcttcagattctacggactctacttccgatcagacaactgaaactacccctgaatcatcgactgattcaacagaatcgtctaccctggacgcatcctcaacaacagatgcctcatcgactagcgagtcttcatcggaaagctcaacagatggatcttcaactacatccaactcggcatcaagcgaaaccaccgggctgtccagtgatggatcaaccacagatgcaactacagctgcttctgacaacactgacatcaccactgatggctcaactgatgaatccactgatggttcctctaatgcctctactgagggctctactgaaggcgcaagcgaggacaccacaatctccacggagtcctccggatcaaccgaaagcaccgacgccatcgccagtgatggttcgaccaccgagggaagtaccgtcgaggacctgtccagttccacaagctctgatgttacatctgattctaccatcaccgactcctcaccttccactgaagtatctggttccacagactcatcctcttccacagatggttcctcaacagatgcttcctccactgaggcttcctctaccgatgtcactgaatctacagatagtactgttagtggaggtaccagcgacactacggaaagcggtccaacggaggaaagtactaccgaaggctccactgaaagcacaaccgaaggatccacagacagcacccaatccaccgatctggacagcaccaccagtgatatctggagcaccagtgataaggatgacgaatcggagagcagtactccttactcctttgattctgaagttaccaagagcaagccccgtaaatgtaagcctaagaagagtacctgcgccaaatccgagtacggttgctgtccggatggtaagtccactccgaagggaccgtttgacgagggctgtcccattgcaaagacctgtgcggatacaaagtacggttgttgcttggacggagtgtctccggctaagggcaagaataacaagggttgtcccaagtcccagtgcgctgagactctctttggctgctgtcccgataaattcaccgccgccgatggtgagaatgatgagggatgtccagagaccactactgtaccacctacgactaccacagaggagacacagccagagactactactgagatcgaaggatcaggtcaagactcgacgacttctgagccagacaccaagaagtcctgctccttctccgaatttggttgctgtcccgatgcggaaacatccgccaagggccctgacttcgagggatgtggtcttgcgtcaccggttgccaagggctgcgcagagtctgagaacggttgctgtccggatggacaaacacctgcaagcggtccgaatggcgaaggttgctctggatgcacacgtgagcgctttggatgttgtccggactcccaaaccccggcccatggtcccaacaaggagggctgctgcttggacactcagtttggctgctgccccgacaacatcttggccgcgcgtggacccaacaacgagggctgcgaatgccactacactccgtatggctgctgcccggacaataagtcggccgcaactggctacaaccaggagggatgcgcctgcgagacgacccagtatggctgctgtcccgacaagatcactgccgccaagggacccaagcacgagggctgcccttgcgagaccacccagttcggatgctgtccagatgggctcaccttcgccaagggaccgcaccaccacggatgccactgcactcagacggagttcaagtgctgcgacgacgagaagaccccggccaagggccccaacggcgatggctgcacgtgtgtggagagcaagttcggttgctgtcccgatggagtcaccaaggcgacggacgagaagttcggtggatgcgagaatgtccaggagccaccgcaaaaggcctgcggcctgcccaaggagacgggcacctgcaataactacagcgtcaagtactacttcgacacctcctacggaggatgcgctcgcttttggtacggtggctgcgatggcaacgacaaccgctttgagagcgaggccgagtgcaaggacacctgccaggattacaccggcaagcacgtatgcctgctgcccaagagcgcaggtccctgcactggcttcaccaagaaatggtacttcgatgtcgaccgcaaccggtgcgaggagttccagtacggcggatgctacggtaccaataatcgcttcgatagcttggaacagtgccagggcacttgtgctgccagtgaaaatctgcctacctgtgaacaacctgtggagagcggaccatgtgccggaaacttcgagcgttggtactacgacaacgagacggacatctgccgacccttcacctatggtggatgcaagggcaacaagaacaactatcccacggaacatgcctgcaactacaactgccgccagcccggcgtgcttaaagaccgctgtgcgctccctaagcaaactggtgattgcagtgaaaaactggccaagtggcacttctccgagagtgagaagcgctgcgtgcccttctactacagcggttgtggtggcaacaagaacaacttcccgaccctggagtcctgcgaggaccactgcccacgccaagttgctaaggacatctgtgagattccggccgaggtgggcgagtgtgccaactacgttaccagctggtactacgacactcaggatcaggcctgtcgccagttctactacggcggctgtgggggcaatgagaaccgcttccccaccgaggagtcctgtttggcgcgttgcgaccgcaagcccgaacccacaaccaccacccccgccaccaggccacaacccagtaggcaggacgtctgtgacgaggaacccgctccaggagaatgtagtacctgggtcctcaagtggcacttcgatcggaagattggggcttgccgtcagttctactatggcaactgtggcggcaatggcaatcgcttcgagacagagaacgattgtcagcagcgttgtcttagccaagagcctcctgccccgactcctccacgagcacctgctccaaccaggcagccagatccggctcctactgtcgctcaatgcagtcagcctgctgatccaggacagtgcgacaaatgggcgctccactggaactacaacgagaccgagggtcgctgtcagtcgttctactacggcggctgtggcggcaatgataaccgctttgccaccgaggaggagtgctctgctcgctgctctgtcaacatagacatccgcattggtgccgatcccgtggagcacgacacgtccaagtgcttcttggccttcgaaccgggtaactgctacaacaacgtgacccgctggttctacaacagcgcggagggactctgcgacgagttcgtctacacgggctgcggcggtaatgccaacaactatgccaccgaggaggagtgccagaacgagtgcaacgacgcccagaccacatgtgcactgcctccggtccgtggacgatgcagtgacctctcccggcgctggtacttcgatgagcgcagcggagaatgccacgagttcgagttcactggatgccgcggtaatcgaaacaacttcgtgtcgcagagcgattgcctaaacttctgcattggggagcctgtagtggagccttcagcgccgacctattcggtgtgcgccgagcctccggaggccggcgaatgcgacaaccgtaccaccgcgtggttctacgacagcgagaacatggcctgcacggccttcacctacacgggatgcggaggcaatggaaaccgcttcgagacccgcgaccagtgcgaacggcagtgcggcgagttcaagggagtggacgtttgcaatgaaccggtgaccacgggtccgtgcaccgactggcagacgaagtactacttcaacacagcgagccaggcttgcgaaccgttcacctatggtggatgtgatggcaccggcaaccgtttcagcgatttgttcgagtgccagactgtttgtctggctggtcgtgaaccgagagtgggctcggctaaagaaatctgcctgctgccggtggcgacgggccgctgcaatggaccttcggtgcacgagcgccgttggtactacgacgacgaagcaggaaactgtgtgtccttcatatacgccggctgctccggcaaccagaacaacttccgatccttcgaggcatgcacgaaccaatgccgaccggaacccaacaagcaggacaacgaaattggacaaaatccgtgcgataccttcgatgcggagtgccaggagctccgctgtccatacggcgttcgccgtgtggccgccaggtcccagccagagtgcacgcagtgcatctgcgagaatccgtgcgagggctacagttgcccggagggccaacagtgcgccatcgatgtggccagttccgacgatcgccagtttgctccagtgtgtcgcgatatttataagccaggagagtgcccggctctttcagcgaatgccagtggatgtgcccgggaatgctacaccgatgccgactgtcgtggagacaacaagtgctgcagcgacggctgcggacagctgtgtgtgcatcctgctcgtccaactcagccgcccaggactcaggctccagtggtctcctatccgggcgatgccagagccgctctggaacccaaggaggcgcatgagcttgatgtccagacagccatcggcggcatagccgtgctgcgctgcttcgccaccggcaatccagccccgaatatcacctggtcgctcaagaacttggtgatcaacacgaacaagggacgatatgtgctgaccgccaacggtgatctgaccattgtccaggtgcgccaaacagacgatggcacctacgtctgcgtggccagcaatggtctgggagaacccgtgcgtcgtgaggtcgccctccaggttacagaacccgtaagtcagccagcttacatctacggagacaagaacgttactcagatcgtggagttgaaccgtccggcagtgatccgctgcccggccggtggcttcccagagccgcatgtcagctggtggcgcaacggacagatgtttggcctgaagaacaacctgatggcccgcgactactcgctggtcttcaactcgatccagttgtcggatcttggcctctacacctgcgaggtgtacaatcagaggcgtccggtctcgctgcgcgttactctgaaggcggtgggtcctgtccggcctctgagtcccgaggaggagcaatacatgcagtatgtgctcaatccggccacccgtccggtgacccagcgacccagctatccctatcgacccacccgaccggcctatgtgccagagcccacagttaatgttcatgccgtgttggctctggagccgaagaacagctacaccccaggctccaccattgtcatgagctgctccgtgcagggctatccagaaccgaatgtcacatggatcaaggacgacgtgcctctgtacaacaacgagcgtgttcaaattacataccaaccacatcgcctggtgctgagtgatgtcacatccgcggattccggaaagtacacttgccgggccagcaatgcgtacacctacgccaatggagaggccaatgtgtccattcaatctgttgtaccagtgtcgcccgagtgcgttgacaatccgtacttcgctaactgcaagcttatcgtcaagggcagatactgttccaatccgtactacacccagttctgctgccgatcctgcacgttggcgggccaggtggcctcgcctcctctgcatcccaatgcggtgtaa

SEQ ID NO: 40242 - protein, 2858 aa, DROSOPHILA
MYLPESSVTPGGEGNDPDEWTPWSSPSDCSRTCGGGVSYQTRECLRRDDRGEAVCSGGSRRYFSCNTQDCPEEESDFRAQQCSRFDRQQFDGVFYEWVPYTNAPNPCELNCMPKGERFYYRQREKVVDGTRCNDKDLDVCVNGECMPVGCDMMLGSDAKEDKCRKCGGDGSTCKTIRNTITTKDLAPGYNDLLLLPEGATNIRIEETVPSSNYLACRNHSGHYYLNGDWRIDFPRPMFFANSWWNYQRKPMGFAAPDQLTCSGPISESLFIVMLVQEKNISLDYEYSIPESLSHSQQDTHTWTHHQFNACSASCGGGSQSRKVTCNNRITLAEVNPSLCDQKSKPVEEQACGTEPCAPHWVEGEWSKCSKGCGSDGFQNRSITCERISSSGEHTVEEDAVCLKEVGNKPATKQECNRDVKNCPKYHLGPWTPCDKLCGDGKQTRKVTCFIEENGHKRVLPEEDCVEEKPETEKSCLLTPCEGVDWIISQWSGCNACGQNTETRTAICGNKEGKVYPEEFCEPEVPTLSRPCKSPKCEAQWFSSEWSKCSAPCGKGVKSRIVICGEFDGKTVTPADDDSKCNKETKPESEQDCEGEEKVCPGEWFTGPWGKCSKPCGGGERVREVLCLSNGTKSVNCDEEKVEPLSEKCNSEACTEDEILPLTSTDKPIEDDEEDCDEDGIELISDGLSDDEKSEDVIDLEGTAKTETTPEAEDLMQSDSPTPYDEFESTGTTFEGSGYDSESTTDSGISTEGSGDDEETSEASTDLSSSTDSGSTSSDSTSSDSSSSISSDATSEAPASSVSDSSDSTDASTETTGVSDDSTDVSSSTEASASESTDVSGASDSTGSTNASDSTPESSTEASSSTDDSTDSSDNSSNVSESSTEASSSSVSDSNDSSDGSTDGVSSTTENSSDSTSDATSDSTASSDSTDSTSDQTTETTPESSTDSTESSTLDASSTTDASSTSESSSESSTDGSSTTSNSASSETTGLSSDGSTTDATTAASDNTDITTDGSTDESTDGSSNASTEGSTEGASEDTTISTESSGSTESTDAIASDGSTTEGSTVEDLSSSTSSDVTSDSTITDSSPSTEVSGSTDSSSSTDGSSTDASSTEASSTDVTESTDSTVSGGTSDTTESGPTEESTTEGSTESTTEGSTDSTQSTDLDSTTSDIWSTSDKDDESESSTPYSFDSEVTKSKPRKCKPKKSTCAKSEYGCCPDGKSTPKGPFDEGCPIAKTCADTKYGCCLDGVSPAKGKNNKGCPKSQCAETLFGCCPDKFTAADGENDEGCPETTTVPPTTTTEETQPETTTEIEGSGQDSTTSEPDTKKSCSFSEFGCCPDAETSAKGPDFEGCGLASPVAKGCAESENGCCPDGQTPASGPNGEGCSGCTRERFGCCPDSQTPAHGPNKEGCCLDTQFGCCPDNILAARGPNNEGCECHYTPYGCCPDNKSAATGYNQEGCACETTQYGCCPDKITAAKGPKHEGCPCETTQFGCCPDGLTFAKGPHHHGCHCTQTEFKCCDDEKTPAKGPNGDGCTCVESKFGCCPDGVTKATDEKFGGCENVQEPPQKACGLPKETGTCNNYSVKYYFDTSYGGCARFWYGGCDGNDNRFESEAECKDTCQDYTGKHVCLLPKSAGPCTGFTKKWYFDVDRNRCEEFQYGGCYGTNNRFDSLEQCQGTCAASENLPTCEQPVESGPCAGNFERWYYDNETDICRPFTYGGCKGNKNNYPTEHACNYNCRQPGVLKDRCALPKQTGDCSEKLAKWHFSESEKRCVPFYYSGCGGNKNNFPTLESCEDHCPRQVAKDICEIPAEVGECANYVTSWYYDTQDQACRQFYYGGCGGNENRFPTEESCLARCDRKPEPTTTTPATRPQPSRQDVCDEEPAPGECSTWVLKWHFDRKIGACRQFYYGNCGGNGNRFETENDCQQRCLSQEPPAPTPPRAPAPTRQPDPAPTVAQCSQPADPGQCDKWALHWNYNETEGRCQSFYYGGCGGNDNRFATEEECSARCSVNIDIRIGADPVEHDTSKCFLAFEPGNCYNNVTRWFYNSAEGLCDEFVYTGCGGNANNYATEEECQNECNDAQTTCALPPVRGRCSDLSRRWYFDERSGECHEFEFTGCRGNRNNFVSQSDCLNFCIGEPVVEPSAPTYSVCAEPPEAGECDNRTTAWFYDSENMACTAFTYTGCGGNGNRFETRDQCERQCGEFKGVDVCNEPVTTGPCTDWQTKYYFNTASQACEPFTYGGCDGTGNRFSDLFECQTVCLAGREPRVGSAKEICLLPVATGRCNGPSVHERRWYYDDEAGNCVSFIYAGCSGNQNNFRSFEACTNQCRPEPNKQDNEIGQNPCDTFDAECQELRCPYGVRRVAARSQPECTQCICENPCEGYSCPEGQQCAIDVASSDDRQFAPVCRDIYKPGECPALSANASGCARECYTDADCRGDNKCCSDGCGQLCVHPARPTQPPRTQAPVVSYPGDARAALEPKEAHELDVQTAIGGIAVLRCFATGNPAPNITWSLKNLVINTNKGRYVLTANGDLTIVQVRQTDDGTYVCVASNGLGEPVRREVALQVTEPVSQPAYIYGDKNVTQIVELNRPAVIRCPAGGFPEPHVSWWRNGQMFGLKNNLMARDYSLVFNSIQLSDLGLYTCEVYNQRRPVSLRVTLKAVGPVRPLSPEEEQYMQYVLNPATRPVTQRPSYPYRPTRPAYVPEPTVNVHAVLALEPKNSYTPGSTIVMSCSVQGYPEPNVTWIKDDVPLYNNERVQITYQPHRLVLSDVTSADSGKYTCRASNAYTYANGEANVSIQSVVPVSPECVDNPYFANCKLIVKGRYCSNPYYTQFCCRSCTLAGQVASPPLHPNAV

SEQ ID NO: 40243 - DNA, 15773 bp, DROSOPHILA
acgcagggataggcctttccgccggccttctcgatctcctccgcagccgagtagatggtgcccggcagcttgggatgcggttccgccgtcttggccgccaccacaatgttggctccatcgcgggccgcctttagagcaatctccttgccaattcctcgagaggctcccgtgatgaacagggtccgtccggctagttttcctgtgttgatcatcctgtccaaagtttaaagaccgttcgctgtgagatctggattcacaccggtaacggtgacagtgttctcaatcgaagattccaagagaaagtccaaagtgcagattcaaccgatttgatccacacaacaagtcgtcgagtttcatgcacgcacacacactcaccactccacacgcacactgtcttctcctgtgcccggtgtggcaaccttcgcctttgacttgcaaaaatatggcagcactcgacatatttatttgaaaaataaacgcactgatagtggcgaatttttatgttagttaaagttaattcgtagataatttgcaagaaacaaaaaaaagattaactagtaaatatttcaattattatcagtttttataaattcacaactagcaaaatcatgttttttgtccgaaaactggttcgaaaacacgacaagtgatcacatctctaagttcgatactgatagccggtacttatcgataagccgttggtagctgagtgtagccatgtcatcaaattcaaattccagcgccactttttacatcgtcagtacttctcatcaaaaatgcggagtaaaacttagaacggctaccaagtacttttattagttctaactctacctatcttatacaaaaatggcacacaatggaaaacaacgattcatctataaaactcaacgcccaacaactaccttctgctgcatgtttaactaagtcctccaaagtccttttaataagtgcaaccatatgggttctaaagttcgtaggcccggtcgccgttctgtgattgttaaatgagggtgtcctcgtcctgtccctcgaagaccattaatagcgagtgctgcgagggtgagcggcccagggtcaacccacccaaggatccatccggcgagagcaggccagtctgcaggctgttgttgtcccgatagccagaggtggaggatgtctgtgaaacggagtcccaggaaatctcgcccagggtctttgcctgcgcctgcggggcctgctcctcctgcgaggtgacctttgaaggacatatgtatgggaatttcagggctaaaacatctctggtccacttacaatgctgggtggttccatgggcgtcaggcgactgcgcttaagtctaaaggtctttcggctggcggccttcgatcgctgcaggcgtgagcgggtatgatcgccggaactatcctccgccgggctctccggcgagagcggtgtggtggatgtctccccggatgagtgccggaactccacggacgaaacgaagcgcagcttgggtggctgggccttgaagggagcctgctgcaacgactgcgaatgcgagagatgcgagggtacggcggaggctggcaccggtaccaataccaccgcccgatccatgtcccgatccgctcggcgtggcccccaccagcgtgggcgccgatcctgcgtccgcctcgccgctctggctctcgctggtcgtcgtgtgcggatcccggcccgtggagctgctcgagagcgactcccgcggcgggtgcagcgtctgctgcgacagcgtgtcgctgggcgtgcagatcccgccggatccgctgcgcgagtcgatcggcacggcggagacgtgggagtgcgaggcctggcccgtggtggttcctgtgaagatagatatgagtgaaggtctttgctgcgacttgtgggcttcagccgcactagttgccgccggtgtgtcgctcttcttctgctcggaactctcgcgatctgtggagactgaaacatgagtgggtgtgtggcgtaaggatttggattccgtccgctttggcctcttaccgtagcgtttctcctccagctcgtcgcgcaggtcccgcagctccctggccagttccagcagcagagctcccttagacttaatcccgccctgcggcggtgttccgcgcaatcgttcccggatgataaactgcatgtgtcgctcgtgatccccaatgggtggctgcgatatctggaagatatcaatcgttaatgtagttcgattcgattaaattagaagtatagttttggggcatagaagtgcaggtcgaaaaactacttgagggtatcaaaggatattgtaatcggtttacagatatgcaccataagaaattataatagtaagttaatcaagaaaggaaacttgtaactcggtaaggggaacttgggttcatgttacccatggcacaataagtcatcactccattatctaaaagttatccctttaaacacgattactgcaaagatggttaatatgcttggggtcaacagcagtgaccatacacccaaggctaaatccttcgttggggtcaccaaagtagaaatgtatttcgaagacccctcatttctcaccttgtgcagaatgaagggcagcaggacaatgtagagtggcgttcggtgggtgaccacaaactccataaagctccagagatccggcgcagcctcgttgcgcctgccgagatccctcatcacccgaacgatgcgcggccactcgttggagagccggctctcgaagcagatgcacacgatgcgcagggctaagaaggcggcctggtagagggacccggagatgcgggctgggcgcttggcatcccgactgccggtgaaggtgagtgagccggcgcgtaggtcgccggtcacccggttgatctgggacacggcttgcccggtacgacccgccggcggactcatcgcattcaacacggcagtcagcaggaaggaaacgtccgacatcttcaactcgcccacgtcggaaacgccgcggcccgagcaaaccttcagacacagtggcattatcagatgcattagaaagccctcggccttttcctgcgtggcaaattcggagctcccgccgcatatctggaccagggagaaacagtccacggggctgaccacctgcagggccaccaaacgcaccacggccgagcagaaaaaggccggcggattctgagacatgagcgctgctcctgcgctggagacgccctcgggaatgccgggctcgttgacgatcagattctgcaccgtgctgatgagcgttttcatctgctgccagtgcagcacgtacgagtgccgtatgatcgtctcgtggatgcccttcagcagtccggcggccgcctcccagtccgtattcctcctgattgatggcttctttgagatcttgaggaacaccttgtcgatgcgccgtagaatggtgaccagtgcgttgcgcaatgtatcgttggaccactccgcccgcggcaaaaccgcctgcatatagcgttgcagaccccgacaggccatggactccggatcatagggcgacacctttagcagggaatgcgcgatgtccgccaaacgaatgtgacacttggcgtccagaacctcggtaggtttcgtatcactgggcatcttcttggccagttctgctagacgtacggtggatttcgtgaggaaatcggccaccacggagagcaacacgtctcgtggtcttcggtattcggtgcgtatcatttccgaatcctcggcagagtccatcatgttcttggtgcgagcatcggtcatatacttgggatgcgtttcctcttcaaagtccaggccgggtgaacagggaggtccacggctgcagttgcgctgcgaggaacccttgtgctccggactgttacgatagggtccattgtagctcttggccagaccctcacagttgtgcaccatggtgcgaatggccaccgccagctggaggattatatctcgctcagactttccctgcaacggaatatagctgggcgattggatctgctgcagataacagggcagaatggcctccaaaattatctgaaaggattaatgattagtaggatttatatcacgatcataaggatggactcactagcatttggtatcctcgtgtactctctgcggagtaggagacgaccatgacacataaggtaatgcagtccaaaacggtgacgtcgtcatcctcatcatggtaacaaaagtcaatggccttgagcggcttgggttccttgaccagctccgcaatgtttaggggatccggcgagggatcctcgagactgagtagcaggttaaacagacagctcgactgcaccttgtgggcttctccgtacgtgccatcctcatccgtatcgagaatggcggaaacggaaccaaacatttgcaggataaatggcttccggttgagcagatagaactgctttaccgcatactcaatggtggtggtgatgagcttgttagtctgatgcagggaatagacttgcagcagtgtgggcataatcataaagtatccgttcgtagagaagatgttcttaaagttaaaggcggcgttgatgaaggtggccatcacatagcgcatgatgcacgaatcttcggcgtgcagaatggaggcgccggaaaggacgttcagaaagagttggatgtccgctgagtaggcgaaattcccagccatggcctcgaacatgcgggcgatcagtcgcacccacatgaacttgtgcaggacgtccaacccgagcagcacctttccgtactcgccaccatggtgcagatccagatccacctcgagtgccttgcgcgggaaggagggcagcttcatcagctcctcgtgcaggaataccacccgctgcacaaccatgtccacgttcttcagaatagcccatgtcaggtgcacctttccgatttccacaaacttcttggtaagctcttgcttctggagtgccaggaaggattcctccggacgcataagcatcagacgcacctcagggtattgagatctcttgaagaagtacagatcacgaatgtaccaattgggattgaggattttacctgaaagagttcaagaagtataagtatgatctaacttgaatgcaagttatatccaacttactgctcttgtagtctactagacagtagtgactggtgttcttctcatcgatgggatagtaatccaatgcctccttgagcaactggcagaaaagagtatcctcctggacgggaaactgagagggtatgttgtagtcatcatccgctggtccgtgcacaacaatctttttggcagcgggcacattggccgttagaagaatggatgcatcgcactgctcctttcgcagaatctgcttgagatccttgaacataattccatgcaccgagtgcaccaccatccacagcacagataaggctgagccaacgagctggaaagagaggtttgatgagtaatctttttatgctcctgaaatgcagtacccacctcttgcttcaattcattggatgatctgacgtagaacatgatgtatcctataatcgagttgtagagcgcaaatgccgcctgttggggcagacggggcacgaatcggatgaggtgtcgcaggagcttgaacatctgatcctgccgatcgcgagtcagccgctcaaagacatagcgcaaaaacagagctgactcctccaccaagcaaacccagatcacctggtacgcaatctcatatacggcattgccatccgatccaatggccgcatcgtccaggcagccaacgatctgcattacggatgagcagagaacggaggggaagagggagtgggcgtggtgcaggtgcgaggacatgcgtgtgccatcaaggtcctcctcgatctcatgatcctccagcttctccattccgggctcatgggaggcctgttgacttatgggtatcatggtgatcaggaaactgtggcgctccgccctctgtttatccctctgctggcgcagagcattccggatggcctccgtctgttgcatcttgcgactcttggttgcggtgaccaaggatcgctgaaagacaaaaatgagacattagaccataaacacagataccctcccgaccagtacataacccagggtctccgcggccttctcactcacatgtctatcttggtttagggttacgtccatgtcctttgtctgctggactggcatccagggtggatccaccaccggcaggctttcaatgccaatcttgggcgacggtagagtgaactcgatgccacccggtggcaccttgaaggtcacatcgtgggcattctcctccattcgaggccagacatggaaacgacacttccataacaccagatagcgctgaatggctccaatccttatgtccggatccttgtgcttcaaagcccgctgcatgatgtcgaaggcaaagttctgggcctttaccgaacccatcaaaaatacggccgcacttgaggtggccgtatcgtgattagtttctaggaggagttcccaagcggcgggcatggcctcgatgaccatctcctcggtgagcacaactgcaccctttagcaaggtggccagtggaaaatgaaacaagttacgtatgtgaatgcggataaacttcaggatgggtggttcctcctgcatcttcttttccttctcctgtcgaaaagctttggccaacttctctgccatttccagatcaggatcgtcacttatcctgtgagcatgtatatataagctatgttttggctaactatgaatactacccaccgatctttgcgtgacaagctatcctttcgcttggacggagatgtctgagtggaactctgctccgatacttttctagtggagcgagctcgagaagtatgtggcttactggaggtgatgatagtgggctccacattcggatggtctgcatcgaaggtgaatccaaactcctcgccataaacctaggaaacaatcgaattttttggcttaagtttgacttccgtaaatggtatcttacctttctggtggctttgaccaagcgagtgcaggatcgcatgtgccgtttatagcaaaatggatggcaatatcctttatgggtgcagtagtagttatagctggacataagatcgataattgcctttagccacggcatattcttggccgtatcatcgttttcattcgagtccgttggtgactccggctgctgatcgtcactgagaattcctggtgattcctcgccaccactgatcatgccctgttccgaggtgtcactgcgatcggagagcgaggacaccttgcgacgtgattgcatattgactggagttattaaaagataagtttcagataatattaaaacaaactatacgttttacatacaatcagtttcaatgtccttgctatccttggtgttgcgacgaagcttcagcgagcggcgcttgaaggatcctccagttgtggtggcagtgcctcgtctcagcaggaatggtcgtacagccgatgttgtgggtcgacgagctaggaataatagtatatagtatatatagtttataaataatagtttgtagatgttaccttcttcgccctccttggtcagcgttgtgttgctgctattctccgactcattgtccggttcgtggagcacgaacgatatctttcgctccgactggccggcaccatcgttcccggctgctatcgactgcaagctctgggcggaagtctgcgagtgacccatggagctgagggccatggaccagcgccgattggcctcgcggtaaaccttctcccatggcgccggtttgtcgcgatggatcagcttggatgtctttggtagcatcaggtaggtgtcccgcaaaaatgccgtaatctcgaagagcagcacacaggcgatcagctttaaggaatgtgggcaatcattgccgtgcggattgaccgatgtttcgtcaaggaagtcctcctcctcgtcctgttgcagcaactcgcgctgcttctcgggatccgtgagactcgcattgaccgcttcgtactgcagtcgctccgtaaacagaatctcctccagcctggcgcccaccatctctgcccactggtggaacatctttccggctgcccgttggagtatgtgggtgcgtctggcgctcgtttggctcacctgctgcttcatctgattgagattgatgtttgcgcccgaggcccgatagctgcccacgttctgcttcatccaggcgggccactgacccttgttgcacaaatggacaaagtgggcgcactcaagcaggaaggtggccctagccacgagtggagcttgtggctgcagaacaaaacggatagttaaggaagtgactcccaatgatgtaagttatgtactgaccaaatccagaacggcggccaccagctggggatcgggaaaggagccgggggcacaggtctccagcagaaaggaaagccgaagcatgcccacgcgcaccggttcggtgggcaccagcttgcgctccttgaggatgaccacctccgactcccgcggaccgtcgcacatgtccgaggagctgcggcgactgaagtccgccgtctcctcgatgccgcccaccttcttcttgcccttcacaatgccgccgaaacggttcagccgccgctcgacgcgtcgcttggcgcgctgaatggaccgcccaatgccatcgctcgaccgcccgcgctggatcttcagcgaggcgtgcctcatgaacgtggaggagatctccgggttgagtgacccgatctccagatcaatggacgatgcctccttgggcgtaccgcggaaccagcgcaccaagccgctgagccgtcccagcgaattgcgttccgagctggacgtggagtcggataacaaggcgcgttcgctgtgccgcggagtcaacgtgggtcgcaccccagtggtcctccgacggaagttgctcagtggcgactggctggtcttgtagtgctcctcgcaagcctccgtctccagcaggctctgaaatataggaggcgggaatgagcttcagattgagatttaaggatgctgctcaccacggcgcaggcggacgaagtgctgcgtttcttcaggagaagacgtcgctgggaacggttgtcgtcgttttgcagactctgatttgcattggcctgcggaatgtgtctgcaatatgggatttggatcaataatcctcctgctatatgatttcggttactcacctgataacacgagtggtctgcgccgaaggaccctttttgtgtggcctcggagtgacggccaggatgccactgagggcgaccagccgaaacggaccgccatgggcgccctttacataggtgaccagctgccggatgtcaccgtagagggctatgttctccggacccttcagatccttgctggcctccacaaagcggctgaccagcggcttgaagaccgctccaaccacctgggcctcggctccgccgctcatgccgccgctaaaattggtcgaatagccgccctgacctggtacgccgccaatatcggtgttagcatttttaaatccactctgacgtttatgagctattgcatcatttcatacatacatacatacatatatatatatatacaacgtattggtggtgacagtaaagaatcgggagggacaactcaaaagcattagcaaaattcttggcatgcataatgggaaaatagaaccacaaacagcatgggggatgcggattccggtcggaagagcaaatcaaaagtcgaatcaaagggaagcccaactcaaaatggccaatggaactcataagtctggttggatcgattattaaatgggggatttggtgcgcctacagatggttggcatccaagcccatcatttgcggtctagcatctggccagcaactaagttaacacttactcagtggcgacagcagggagctgggatccacgcagaaggccaggaaggcatggaaatagtcgatgagttccggcagcggtgaagtcttcaccatctcctgcataaagcgcttcgtcctttgaccagcctgccgcaacattctcgacaggatcttctggcactggttgcgcagaaagtcagcaggtggccctcgaacacctagaagttagttaattatcatcaatatatatgattggagtacataaagagctcagtatcgtcaacccaccatcattgcatccgtgtggacaccccaagacctgcagagctctcctcgtaatactcatcgagatctcgtgggcatgctcacccagtttgagcacacccatttcaatcagcaactcgcagatgttcagacccgcttccaagactcggagtgagcaaacctgtgccggatcccgcttgaaaacattgctaatggccagcaggataatctcgtagtcaatgccgccatcgcgtgttatataaaaggaggagcccggcgcctccgactcatccacgcccgtgtaatcgatgtgggagtccgtgtgggagcgcagcatttgaccacggtaacgggtggtggagctgcccatgccagtgctaccattaccacctccgtttccagtcataccagcaatactgccgccattactcaaggcatccagctgggagtcgatggagccctgtaggaaaattattcggtttttagtcgtacttcattatcatatcttgagtgggaactcattttgcgaaggacaaactttgtagaccaagtcgtaatcataacaatgataatggctcacctgacgcttcatgtaatcgggcgaaggtgtgggcgtgtgctccgtaaccgtaatgatgggattccggggatagaaggccgtggaacgcggacaggtggcctgcgatggccttggggccttgggtggctcaacgtatctgtaaaatcttgtattttgtaggatacgtgcgagaaagcgtgtgtgtggcattagtcaaaaaacggcgtgcggcaagctgtggattcatgggttatggggggggaggggggtttagccaggtaagagcgggggggtaaaaggtgagaaaaaaacaggcttggacaggcgccaaaggtttagcatacaagaggtgctgaaaagggggataaccatcgtgggcttagagcacataaagcatagagtgtggttcttggaaatcgaaatacaaatcatttgtcagttagcttggtagaccgaaactcacccgctatcaagcagacagctggttgttcatcggagaaagtagtacaaggcataggttatagaagatatagcattagcatatagctcgaaagcaaagaatgagtctctgaagagtgtggaatttcgagaatcgtttggaagtgtcacctgtatatggtatatatggtgtatatggcatatgtgttcttggtactggtgtcagaggcccgattgagagtcagtcgtattctttggattttggctagctcggggatttagatttacctgagactgggcatagatttgccctttatcaagttactggctggttcgcgacttatcatcgaggctgaccgagatagtttcttctcacccgtgtccaggctgcgatggtattcctatatgatatgatagaacaatattactatcgatcaatatgaacatgcattacatttagataacattaaactctcaagccaaacaaacaccatttagaatgtaacatttatatggggattataagcgggcgccaggcagaaacacttaagaacattaaacataggtttttgctccgcttactgcatgttgcagtggtgtcttgccattggctgagtttgtgtcgagccctactttttccaaattcttctccgacttcgagaacatctttgtttccacgaaagcccgaagatctgccatcttaacgcgtttcttcttctcactgccgcgtctttccgttgtgcttggcgcactttgaggttcttctaaagatttggataaaagttgaaatcagaatgggtaatggaaccggcagagcctataacacacctgctacacaggctgtcaccgtgggcgatggatcgggtatttcgatgtaatccttaaccacggaactgcctggactatcccgactattgctgccgggtccctggtacagtgaaatctcgatttgcggtatgggcaaggaattcgagcgcttgcgaggttgattcaaggtgatggccgcctcctcaccaatgtcactgagtctgaaatagaaatggcaataaggtccgtttttttagttagtaatttgaagatcctaccgattgtatagatactgcaggctccagaagatgccctcctcctgccaatgggagatgaagaggcagcgcagcacagccacgtccaggaaagtggctgcggatacatccgccttgatactttccgacttatccgagtccgtctccttttcgatggatgcactccgtttctccttcatagatgcacctcgcatcagttcctgctgatcgaactcgaacttggtggagggcactttatccttgtcccgggagttcattgactggcgacttcctcgacgactctgggattgttgctgttgcaacagactggcatcggcctaattgagaagatactttggtggtttcttacggacatagtttaggaactaaccgtaaagaatgagttatccattagttgtggcgccgaaggtaacctaaatatgaccacacgttcatcctccacgctggaggcttcttctggtatggtttcgggaaaggcgaactccttgggcgaagaaacccaggaaccctagatcaaagcaaagttaaaaatcaatcaatttctttagattgggtgcaaacaaacctcctcgtcctgccttccatagtctgagataccgctctgtggcgaatctgccttgggtgacatggcgtccgcactgagtgagtgctttcgggcgggaaaaacgtccgtggaacctttcggagtgggtgcacacagcaagtttcgagccttgggcttaacgggagctgtaaagcatggagctccgggtgctcgattgtcccacattccctgccagagcttaatgccattctccaggcgaaagttttggaaatccgattcctttaggtggtgtataataggtgcaaataggtacacaaagagctgaaagggagtggtattaaataggtatgtctatattaacttggttttaacataccgtaatagttggtactgaaaacaagtactgatcaatggacttcgactttggttccgccgcatctcccaagcccagatcctcgccgccttcatcatcggcacattcctcggcggcgtacagcaggatccactgcatggtgtatagcagcttggtctccacaggaccaatggcctgcatatccttgacgcgattgtagagcagagcggcacaggcgtgcataacatgtggcagagctccttgcaagaggcgccatcggggaatcacacccaagcccttcgtgagaggtggtgacaggccgaactggatgttctgcacaagcactttctcaaaggactacaaagcggagctcatcaatattagactagaaacctatttaatcttgcactcaccttgcaggcttcctttgactcctgaacatcgtaagaatatggtaagaaattgtttaatttataataaaacgtttaaagtagatatggtttaaagctaccaagattacagcaaaataaaggggtcttcagacaaaaaatcaatcttaaacataggcacataaaacatttaacatatacaatataaagggaatcaaattaagcttttaacctcaatattacacatatattcgtaatatgattctggttaaacattgagccaacaagctttggaaaaataagggggttatcgctactacaaacatttataacttacatggtgtcccggtgcatgttgacaaaactacattcagattcagacaaattgcgaaagattttacaatgttaatttgtacagtttgtcattgtagttgtgattttagttgggttgtgtataaagcatactgaatgtactacacacaggcgcaggaaaagtttccaagcctacattaagctaggcaaaaagtgaagcatacttttatgggtgggcaataaaactatgttcttatcggtatgaaacttttcctggtagcctggtgtaaatggaagacaggtctgttgttcagtttgtgaaggaaggtggccgtgttagtagttgttaaagaaaaatataaatcgaatgcataaaagtatataaaacatcaaacatcaaagttaggtctcaaatttagcttccgattttccatgattttggcagagtgaaatcaaaagtagaagacattgaacacaatttctgggcttcaatacgacgaattgcttgcgccaatctgaatgccaatcgttttgggtttcggtatgttacacagtccatccttacaacaaacacgcatagcgaatatacagcacccatttgtgtgggggaaaaatggttcctcacttcttggccatcttagctcttttcgttttctatctttggcaattgacttaaatgctgttggcatttcactggccaaactcaccagacaggtagactcgtgcagcttgcccagcttgggccggataaagggcgctatttgccgccataggaatgtttgcacggacaccggcaagccgaggtcctgcagtccactatcctggtcaaagtcaaagtcatcgttgttgttgttcgccccatggctgttgttgttcgtctgcaggttgttgttgttggtcgtgttgcttgttgctcctcccgttgcggctgtccccgcggcattggtcaccatggtggccagctggaatggcacaaggacacaaatcaaatggcgtgcaacagctggctgagccgagccattcataaaaccaagacgggttggggcattagcatatgtgcaacaggtgtttgcgtgcgcaggcccaacacgctgctcctgttgatttccaatttgtttttcccagcgactaggtcagtgccatcatggcactcccccgctgccgaaaaaacctaccaagatttcggtcctgggacgctgcgcagaacgcagactccgcatcagcggcgagaacgaggcgactgggttatagatacagaactgggtttctggtatacatgctaatttggggcaaaaattttcacagacttatataactcgagctgggattgtggaaaatttcacttttccgcaattaatcgccggtggaacgatcaattgtttggcacttagcacacactcaaatcaaacgtggccaacgattcgcttgattggtgccgcacccagtggaaatggcttcacttcaaccaactgggctgggctccttggacagtcgtcactaattgcagaacctttcatgggctggcgaccgaacagggacactgaagcactttttgtttgatttcaatttgtgtatttttccgtttttgcccttttttctgttgtctaacgagtagttttttttttttttttttagttctgcaagggcttaccttgatttgcgcgttgccagtttcggataacgtttacggctgaagcgttcggatgcaactgagacaagcgtcgttaactgacgagctctgagctccccgtcgttgttatcctctcagccggccgcgtcctccgtttgccatcgtttccaatgccgacagcagcaggccagcagtgcgtatacaggatattttgccgagaaacacacacaaacgcagagagtcgtacaaccacccgcactcagtattaagtatacgcactgaatggacgggaaaaaaggctgctctccgtgtaaggggtgtccttgcacttgttatggcatgccataacacactctcccatcgggacaccctgtttgcgaagcacacttatcaat

SEQ ID NO: 40244 - DNA, 9901 bp, DROSOPHILA
atgaatggctcggctcagccagctgttgcacgccatttgatttgtgtccttgtgccattccagctggccaccatggtgaccaatgccgcggggacagccgcaacgggaggagcaacaagcaacacgaccaacaacaacaacctgcagacgaacaacaacagccatggggcgaacaacaacaacgatgactttgactttgaccaggatagtggactgcaggacctcggcttgccggtgtccgtgcaaacattcctatggcggcaaatagcgccctttatccggcccaagctgggcaagctgcacgagtctacctgtctggagtcaaaggaagcctgcaagtcctttgagaaagtgcttgtgcagaacatccagttcggcctgtcaccacctctcacgaagggcttgggtgtgattccccgatggcgcctcttgcaaggagctctgccacatgttatgcacgcctgtgccgctctgctctacaatcgcgtcaaggatatgcaggccattggtcctgtggagaccaagctgctatacaccatgcagtggatcctgctgtacgccgccgaggaatgtgccgatgatgaaggcggcgaggatctgggcttgggagatgcggcggaaccaaagtcgaagtccattgatcagtacttgttttcagtaccaactattacggtatctctttgtgtacctatttgcacctattatacaccacctaaaggaatcggatttccaaaactttcgcctggagaatggcattaagctctggcagggaatgtgggacaatcgagcacccggagctccatgctttacagctcccgttaagcccaaggctcgaaacttgctgtgtgcacccactccgaaaggttccacggacgtttttcccgcccgaaagcactcactcagtgcggacgccatgtcacccaaggcagattcgccacagagcggtatctcagactatggaaggcaggacgaggagggttcctgggtttcttcgcccaaggagttcgcctttcccgaaaccataccagaagaagcctccagcgtggaggatgaacgtgtggtcatatttaggttaccttcggcgccacaactaatggataactcattctttacggccgatgccagtctgttgcaacagcaacaatcccagagtcgtcgaggaagtcgccagtcaatgaactcccgggacaaggataaagtgccctccaccaagttcgagttcgatcagcaggaactgatgcgaggtgcatctatgaaggagaaacggagtgcatccatcgaaaaggagacggactcggataagtcggaaagtatcaaggcggatgtatccgcagccactttcctggacgtggctgtgctgcgctgcctcttcatctcccattggcaggaggagggcatcttctggagcctgcagtatctatacaatcgactcagtgacattggtgaggaggcggccatcaccttgaatcaacctcgcaagcgctcgaattccttgcccataccgcaaatcgagatttcactgtaccagggacccggcagcaatagtcgggatagtccaggcagttccgtggttaaggattacatcgaaatacccgatccatcgcccacggtgacagcctgtgtagcagaagaacctcaaagtgcgccaagcacaacggaaagacgcggcagtgagaagaagaaacgcgttaagatggcagatcttcgggctttcgtggaaacaaagatgttctcgaagtcggagaagaatttggaaaaagtagggctcgacacaaactcagccaatggcaagacaccactgcaacatgcagaataccatcgcagcctggacacgggtgagaagaaactatctcggtcagcctcgatgataagtcgcgaaccagccagtaacttgataaagggcaaatctatgcccagtctcagatacgttgagccacccaaggccccaaggccatcgcaggccacctgtccgcgttccacggccttctatccccggaatcccatcattacggttacggagcacacgcccacaccttcgcccgattacatgaagcgtcagggctccatcgactcccagctggatgccttgagtaatggcggcagtattgctggtatgactggaaacggaggtggtaatggtagcactggcatgggcagctccaccacccgttaccgtggtcaaatgctgcgctcccacacggactcccacatcgattacacgggcgtggatgagtcggaggcgccgggctcctccttttatataacacgcgatggcggcattgactacgagattatcctgctggccattagcaatgttttcaagcgggatccggcacaggtttgctcactccgagtcttggaagcgggtctgaacatctgcgagttgctgattgaaatgggtgtgctcaaactgggtgagcatgcccacgagatctcgatgagtattacgaggagagctctgcaggtcttggggtgtccacacggatgcaatgatggtgttcgagggccacctgctgactttctgcgcaaccagtgccagaagatcctgtcgagaatgttgcggcaggctggtcaaaggacgaagcgctttatgcaggagatggtgaagacttcaccgctgccggaactcatcgactatttccatgccttcctggccttctgcgtggatcccagctccctgctgtcgccactgagtcagggcggctattcgaccaattttagcggcggcatgagcggcggagccgaggcccaggtggttggagcggtcttcaagccgctggtcagccgctttgtggaggccagcaaggatctgaagggtccggagaacatagccctctacggtgacatccggcagctggtcacctatgtaaagggcgcccatggcggtccgtttcggctggtcgccctcagtggcatcctggccgtcactccgaggccacacaaaaagggtccttcggcgcagaccactcgtgttatcagacacattccgcaggccaatgcaaatcagagtctgcaaaacgacgacaaccgttcccagcgacgtcttctcctgaagaaacgcagcacttcgtccgcctgcgccgtgagcctgctggagacggaggcttgcgaggagcactacaagaccagccagtcgccactgagcaacttccgtcggaggaccactggggtgcgacccacgttgactccgcggcacagcgaacgcgccttgttatccgactccacgtccagctcggaacgcaattcgctgggacggctcagcggcttggtgcgctggttccgcggtacgcccaaggaggcatcgtccattgatctggagatcgggtcactcaacccggagatctcctccacgttcatgaggcacgcctcgctgaagatccagcgcgggcggtcgagcgatggcattgggcggtccattcagcgcgccaagcgacgcgtcgagcggcggctgaaccgtttcggcggcattgtgaagggcaagaagaaggtgggcggcatcgaggagacggcggacttcagtcgccgcagctcctcggacatgtgcgacggtccgcgggagtcggaggtggtcatcctcaaggagcgcaagctggtgcccaccgaaccggtgcgcgtgggcatgcttcggctttcctttctgctggagacctgtgcccccggctcctttcccgatccccagctggtggccgccgttctggatttgccacaagctccactcgtggctagggccaccttcctgcttgagtgcgcccactttgtccatttgtgcaacaagggtcagtggcccgcctggatgaagcagaacgtgggcagctatcgggcctcgggcgcaaacatcaatctcaatcagatgaagcagcaggtgagccaaacgagcgccagacgcacccacatactccaacgggcagccggaaagatgttccaccagtgggcagagatggtgggcgccaggctggaggagattctgtttacggagcgactgcagtacgaagcggtcaatgcgagtctcacggatcccgagaagcagcgcgagttgctgcaacaggacgaggaggaggacttccttgacgaaacatcggtcaatccgcacggcaatgattgcccacattccttaaagctgatcgcctgtgtgctgctcttcgagattacggcatttttgcgggacacctacctgatgctaccaaagacatccaagctgatccatcgcgacaaaccggcgccatgggagaaggtttaccgcgaggccaatcggcgctggtccatggccctcagctccatgggtcactcgcagacttccgcccagagcttgcagtcgatagcagccgggaacgatggtgccggccagtcggagcgaaagatatcgttcgtgctccacgaaccggacaatgagtcggagaatagcagcaacacaacgctgaccaaggagggcgaagaagctcgtcgacccacaacatcggctgtacgaccattcctgctgagacgaggcactgccaccacaactggaggatccttcaagcgccgctcgctgaagcttcgtcgcaacaccaaggatagcaaggacattgaaactgatttcaatatgcaatcacgtcgcaaggtgtcctcgctctccgatcgcagtgacacctcggaacagggcatgatcagtggtggcgaggaatcaccaggaattctcagtgacgatcagcagccggagtcaccaacggactcgaatgaaaacgatgatacggccaagaatatgccgtggctaaaggcaattatcgatcttatgtccagctataactactactgcacccataaaggatattgccatccattttgctataaacggcacatgcgatcctgcactcgcttggtcaaagccaccagaaaggtttatggcgaggagtttggattcaccttcgatgcagaccatccgaatgtggagcccactatcatcacctccagtaagccacatacttctcgagctcgctccactagaaaagtatcggagcagagttccactcagacatctccgtccaagcgaaaggatagcttgtcacgcaaagatcggataagtgacgatcctgatctggaaatggcagagaagttggccaaagcttttcgacaggagaaggaaaagaagatgcaggaggaaccacccatcctgaagtttatccgcattcacatacgtaacttgtttcattttccactggccaccttgctaaagggtgcagttgtgctcaccgaggagatggtcatcgaggccatgcccgccgcttgggaactcctcctagaaactaatcacgatacggccacctcaagtgcggccgtatttttgatgggttcggtaaaggcccagaactttgccttcgacatcatgcagcgggctttgaagcacaaggatccggacataaggattggagccattcagcgctatctggtgttatggaagtgtcgtttccatgtctggcctcgaatggaggagaatgcccacgatgtgaccttcaaggtgccaccgggtggcatcgagttcactctaccgtcgcccaagattggcattgaaagcctgccggtggtggatccaccctggatgccagtccagcagacaaaggacatggacgtaaccctaaaccaagatagacatgtgagtgagaaggccgcggagaccctgggttatcgatccttggtcaccgcaaccaagagtcgcaagatgcaacagacggaggccatccggaatgctctgcgccagcagagggataaacagagggcggagcgccacagtttcctgatcaccatgatacccataagtcaacaggcctcccatgagcccggaatggagaagctggaggatcatgagatcgaggaggaccttgatggcacacgcatgtcctcgcacctgcaccacgcccactccctcttcccctccgttctctgctcatccgtaatgcagatcgttggctgcctggacgatgcggccattggatcggatggcaatgccgtatatgagattgcgtaccaggtgatctgggtttgcttggtggaggagtcagctctgtttttgcgctatgtctttgagcggctgactcgcgatcggcaggatcagatgttcaagctcctgcgacacctcatccgattcgtgccccgtctgccccaacaggcggcatttgcgctctacaactcgattataggatacatcatgttctacgtcagatcatccaatgaattgaagcaagagctcgttggctcagccttatctgtgctgtggatggtggtgcactcggtgcatggaattatgttcaaggatctcaagcagattctgcgaaaggagcagtgcgatgcatccattcttctaacggccaatgtgcccgctgccaaaaagattgttgtgcacggaccagcggatgatgactacaacataccctctcagtttcccgtccaggaggatactcttttctgccagttgctcaaggaggcattggattactatcccatcgatgagaagaacaccagtcactactgtctagtagactacaagagcagtaaaatcctcaatcccaattggtacattcgtgatctgtacttcttcaagagatctcaataccctgaggtgcgtctgatgcttatgcgtccggaggaatccttcctggcactccagaagcaagagcttaccaagaagtttgtggaaatcggaaaggtgcacctgacatgggctattctgaagaacgtggacatggttgtgcagcgggtggtattcctgcacgaggagctgatgaagctgccctccttcccgcgcaaggcactcgaggtggatctggatctgcaccatggtggcgagtacggaaaggtgctgctcgggttggacgtcctgcacaagttcatgtgggtgcgactgatcgcccgcatgttcgaggccatggctgggaatttcgcctactcagcggacatccaactctttctgaacgtcctttccggcgcctccattctgcacgccgaagattcgtgcatcatgcgctatgtgatggccaccttcatcaacgccgcctttaactttaagaacatcttctctacgaacggatactttatgattatgcccacactgctgcaagtctattccctgcatcagactaacaagctcatcaccaccaccattgagtatgcggtaaagcagttctatctgctcaaccggaagccatttatcctgcaaatgtttggttccgtttccgccattctcgatacggatgaggatggcacgtacggagaagcccacaaggtgcagtcgagctgtctgtttaacctgctactcagtctcgaggatccctcgccggatcccctaaacattgcggagctggtcaaggaacccaagccgctcaaggccattgacttttgttaccatgatgaggatgacgacgtcaccgttttggactgcattaccttatgtgtcatggtcgtctcctactccgcagagagtacacgaggataccaaatgctaataattttggaggccattctgccctgttatctgcagcagatccaatcgcccagctatattccgttgcagggaaagtctgagcgagatataatcctccagctggcggtggccattcgcaccatggtgcacaactgtgagggtctggccaagagctacaatggaccctatcgtaacagtccggagcacaagggttcctcgcagcgcaactgcagccgtggacctccctgttcacccggcctggactttgaagaggaaacgcatcccaagtatatgaccgatgctcgcaccaagaacatgatggactctgccgaggattcggaaatgatacgcaccgaataccgaagaccacgagacgtgttgctctccgtggtggccgatttcctcacgaaatccaccgtacgtctagcagaactggccaagaagatgcccagtgatacgaaacctaccgaggttctggacgccaagtgtcacattcgtttggcggacatcgcgcattccctgctaaaggtgtcgccctatgatccggagtccatggcctgtcggggtctgcaacgctatatgcaggcggttttgccgcgggcggagtggtccaacgatacattgcgcaacgcactggtcaccattctacggcgcatcgacaaggtgttcctcaagatctcaaagaagccatcaatcaggaggaatacggactgggaggcggccgccggactgctgaagggcatccacgagacgatcatacggcactcgtacgtgctgcactggcagcagatgaaaacgctcatcagcacggtgcagaatctgatcgtcaacgagcccggcattcccgagggcgtctccagcgcaggagcagcgctcatgtctcagaatccgccggcctttttctgctcggccgtggtgcgtttggtggccctgcaggtggtcagccccgtggactgtttctccctggtccagatatgcggcgggagctccgaatttgccacgcaggaaaaggccgagggctttctaatgcatctgataatgccactgtgtctgaaggtttgctcgggccgcggcgtttccgacgtgggcgagttgaagatgtcggacgtttccttcctgctgactgccgtgttgaatgcgatgagtccgccggcgggtcgtaccgggcaagccgtgtcccagatcaaccgggtgaccggcgacctacgcgccggctcactcaccttcaccggcagtcgggatgccaagcgcccagcccgcatctccgggtccctctaccaggccgccttcttagccctgcgcatcgtgtgcatctgcttcgagagccggctctccaacgagtggccgcgcatcgttcgggtgatgagggatctcggcaggcgcaacgaggctgcgccggatctctggagctttatggagtttgtggtcacccaccgaacgccactctacattgtcctgctgcccttcattctgcacaagatatcgcagccacccattggggatcacgagcgacacatgcagtttatcatccgggaacgattgcgcggaacaccgccgcagggcgggattaagtctaagggagctctgctgctggaactggccagggagctgcgggacctgcgcgacgagctggaggagaaacgctacgtctccacagatcgcgagagttccgagcagaagaagagcgacacaccggcggcaactagtgcggctgaagcccacaagtcgcagcaaagaccttcactcatatctatcttcacaggaaccaccacgggccaggcctcgcactcccacgtctccgccgtgccgatcgactcgcgcagcggatccggcgggatctgcacgcccagcgacacgctgtcgcagcagacgctgcacccgccgcgggagtcgctctcgagcagctccacgggccgggatccgcacacgacgaccagcgagagccagagcggcgaggcggacgcaggatcggcgcccacgctgtcgttgcagcaggctcccttcaaggcccagccacccaagctgcgcttcgtttcgtccgtggagttccggcactcatccggggagacatccaccacaccgctctcgccggagagcccggcggaggatagttccggcgatcatacccgctcacgcctgcagcgatcgaaggccgccagccgaaagacctttagacttaagcgcagtcgcctgacgcccatggaaccacccagcattgtcacctcgcaggaggagcaggccccgcaggcgcaggcaaagaccctgggcgagatttcctgggactccgtttcacagacatcctccacctctggctatcgggacaacaacagcctgcagactggcctgctctcgccggatggatccttgggtgggttgaccctgggccgctcaccctcgcagcactcgctattaatggtcttcgagggacaggacgaggacaccctcatttaa

SEQ ID NO: 40245 - protein, 252 aa, DROSOPHILA
MNGSAQPAVARHLICVLVPFQLATMVTNAAGTAATGGATSNTTNNNNLQTNNNSHGANNNNDDFDFDQDSGLQDLGLPVSVQTFLWRQIAPFIRPKLGKLHESTCLESKEACKSFEKVLVQNIQFGLSPPLTKGLGVIPRWRLLQGALPHVMHACAALLYNRVKDMQAIGPVETKLLYTMQWILLYAAEECADDEGGEDLGLGDAAEPKSKSIDQYLFSVPTITVSLCVPICTYYTPPKGIGFPKLSPGEWH

SEQ ID NO: 40246 - DNA, 2844 bp, DROSOPHILA
gcggggactgtataaaaggggttttgatccgcgaatcagcatacaaacgattaaaatgttgaaattcgcggtacttctttccgttttggcctgcgccttggctggcaccattcccgatggcctgctgccccagttggatggtcgtatcgtcggtggttatgagaccagcatcgacgcccatccctaccaggtgtccttgcagcgctatggatcacacttctgcggtggatccatctactcccacgacattgtgatcaccgccgctcactgcctgcagtcgattgaggccaaggacctgaagattcgtgtgggcagcacctactggcgctccggcggcagtgtccactccgttcgctccttccgcaaccacgagggctacaactcccgcaccatggtcaacgacattgctattattcgcatcgagtccgatctgagcttccgctccagcattcgcgagatccgtattgccgactccaaccctcgtgagggcgccaccgccgtggtttccggctggggcaccaccgagtccggtggcagcaccattcccgatcatctgctggccgttgatctggagatcatcgatgtgtcgcgttgccgctcggatgagttcggatacggaaagaagatcaaggacaccatgctctgcgcctacgccccacacaaggatgcctgccagggtgactccggtggcccacttgtctccggagaccgccttgtcggtgttgtgtcctggggctatggatgcggtgatgtgaggtatcccggtgtctacgccgacgttgcccacttccacgagtggatcgagaggaccgccgaggaggtgtaaagccagacaaacacttgaaataaatcgcaattgaatcagcattgatatctgtttctctatttgggcccaattgcgtcgcaggtgtaaagccctcgaaattgcggctagataagaattgtagccgtgggctgtatataaggttggacgggcggcatgtaagccagcacttgttagcaacgcccatcatgttgaagatcgtgatcctcttgtccgccgtggtctgcgccctgggaggcaccgtccctgagggactcctgcctcagttggatggccgcattgtcggcggctctgctaccaccatcagcagcttcccctggcagatctccctgcagcgcagtggcagccactcctgcggtggatccatctactctgccaacatcattgtgaccgccgctcactgtctgcagtccgtgtccgcttcagtcctgcaggtccgtgctggatccacctactggagctctggtggcgtcgtcgccaaggtttcctctttcaagaaccacgagggatacaacgctaacaccatggtcaacgacatcgctgtcatccgtctgagctcttccctgagcttcagctcaagcatcaaggctattagcctggccacttacaacccagctaacggagcctctgccgccgtttccggttggggtacccagtcgtccggatccagctccatcccctcccagctgcagtacgtgaacgtgaacatcgttagccagagccagtgtgcttcctccacctacggatacggtagccagatccgcaacaccatgatctgcgctgctgccagcggcaaggatgcctgccagggtgactccggtggcccactggtctccggcggagtcctcgtcggtgttgtctcctggggatacggatgcgcttactccaactaccccggtgtctatgccgatgttgctgtcctccgctcttgggtggtgagcactgctaacagcatctaagctggtacccagtaggttggatgtgtcaaaagccttcaataaatatttgccattcagaacatagatgatttgtatttggtctgggtactttaacataagagggtttacaaaatatacagaaagcttttgtatttacttctatgtagtttaagttagtggttaagcctaaagaataaagtagtggaagttgaatgtattacacataccacttattacacctttcgtattaacaatagggaaacagttctcgaggttgcccgcgtcacaggtcttatcttttgtagggttcacgggtattcacataaagtaagataattcaacgcaccttctgtgattttcaccgatttcaatgggctcgagtggctaaaggtaaacatttgtccaggaccaatctaatcaacttcgagtgcatcgcgtggctagggttccaattcatcttccattgataagttgagtgatggtctggacagctgtggcaagattaattagccggaaaaaaatgaatagataagattgcacagatttggacactcgaagttgaacgttttggtgaaccgtgactggtgaaatactggacggtgtgaatagatggtaggaatggattgtcttctgttctttttcttatatttgtgaattaaacgcaacaacaattgcaaagaataaacaatttgccatattttttaaccgataatgctgtttataaaaagttccattatcaattccataataaagttgaaatttgccatttttaagtagaaattttgattggcagagggtcgttcatatagccaccccttattttaacgggtatttccaactcgacgtagcattggtgacgtttgtgctaatttgtgcttttaatgggccattaaaattgtctcttctatgacttaacctactttttgggaattacgtgtcgtagaaatcacctttgccatttcgtaaatgtggtaaaagttatatctttgcatgtgaaattttcagtaaacctcaattgggtgaaggagtgtcttgcctaagactcacatatccacgaaccccaaagtcaagtgagaaaatatg

SEQ ID NO: 40247 - DNA, 844 bp, DROSOPHILA
caacgcccatcatgttgaagatcgtgatcctcttgtccgccgtggtctgcgccctgggaggcaccgtccctgagggactcctgcctcagttggatggccgcattgtcggcggctctgctaccaccatcagcagcttcccctggcagatctccctgcagcgcagtggcagccactcctgcggtggatccatctactctgccaacatcattgtgaccgccgctcactgtctgcagtccgtgtccgcttcagtcctgcaggtccgtgctggatccacctactggagctctggtggcgtcgtcgccaaggtttcctctttcaagaaccacgagggatacaacgctaacaccatggtcaacgacatcgctgtcatccgtctgagctcttccctgagcttcagctcaagcatcaaggctattagcctggccacttacaacccagctaacggagcctctgccgccgtttccggttggggtacccagtcgtccggatccagctccatcccctcccagctgcagtacgtgaacgtgaacatcgttagccagagccagtgtgcttcctccacctacggatacggtagccagatccgcaacaccatgatctgcgctgctgccagcggcaaggatgcctgccagggtgactccggtggcccactggtctccggcggagtcctcgtcggtgttgtctcctggggatacggatgcgcttactccaactaccccggtgtctatgccgatgttgctgtcctccgctcttgggtggtgagcactgctaacagcatctaagctggtacccagtaggttggatgtgtcaaaagccttcaataaatatttgccattcagaacat

SEQ ID NO: 40248 - protein, 256 aa, DROSOPHILA
MLKIVILLSAVVCALGGTVPEGLLPQLDGRIVGGSATTISSFPWQISLQRSGSHSCGGSIYSANIIVTAAHCLQSVSASVLQVRAGSTYWSSGGVVAKVSSFKNHEGYNANTMVNDIAVIRLSSSLSFSSSIKAISLATYNPANGASAAVSGWGTQSSGSSSIPSQLQYVNVNIVSQSQCASSTYGYGSQIRNTMICAAASGKDACQGDSGGPLVSGGVLVGVVSWGYGCAYSNYPGVYADVAVLRSWVVSTANSI

SEQ ID NO: 40249 - DNA, 3886 bp, DROSOPHILA
ttattcgaagattttaaagatccagactcctattgatttcaccaagctggatgtattttccgagcacagtagcagctacgaagacgatgcgtcctggttcaaagaattggagccgaaaccggatcccgatcctatcagccatccaccgagctctagcgattccgttgtcaatcagtttgacaataaaactcagccgagctctcccgcgtgcagtgaagactgtttttggtctgatactgaacctagccactgcaaggtgtctattgaagtgttggaccaagatgaatcgacaaagccgttcgaatctccctccattgaaaagcataaggctgctgaagaatttagtcaatttgtaacaaaagagctagccgtcttgaatgatgatttgctaatcgaagcaaaacgccaaatatacaatatcatatgtgtcttgcagaagaaacagaatgaagtaaataaaaaagcatagtgaccaattaaacgtatcttttttcgtacttgaaattaaaaaaaaaatcaaaggttctaccgagatttgaactcggatcgctggattcaaagtccagagtgctaaccattacaccatagaaccgcgttggcagcctggcgcaaaacaaaacatttactgccgccagataacacgaaacaattatcctattttggacactaaaattttaaataaacatttatccgtgatatttatttttaaagaaaagtttctaagcatcaaatctttatatgaaaaaaaaaaataaaaattaattcgagcaggttctaccgagatttgaactcggatcgctggattcaaagtccagagtgctaaccattacaccatagaaccttgatacgagccacgctgctaaatgacacttttgtgctgcgggcacacttatctttggttctttggtgtgtcaagaagggggttgaagataaggaaacgatagttgattcaaaatagagtgttttaatttggttcaatacgttcagttaagtatttagaacatttttaaaacaagctaaaccttaaacttacattggcattttaagggtatcgaatgagcacagatgtttgttgccaagcaagccggtaaaagtttgtttgatcgatatacacaatattgaattaaaacatcgagctgctcctttatttatttgatattgtaaagccgaaaaatggaaaaggaaaaaaagaaatctcttttggaaagatacaacataccaattcactatttggacttcgcccacgtggaaaagtgcacaaatgctcgcgaaatggagaaaatcgtccaaatcctgcgctccggcgaggaaggacattatccggacttgcaacgctgtgcggaggaaaaactgaaggcactgaaaccggatagcaagctatttcgctatgaggaacagataaagcaaagcactgacctggacaaaaccgaactaaagcccattctggtaggttgtctacttcatttcaaataaatatttatggattaacctgtatttataccttaggattggactgacgccataaaaacaaaggacaatgctctcaatgagctgaagaaagttaagcagaatttgaatcttccatctgtgcgtaaactttcgaaaatcgatttggagaaggaaagtaaaactgaaaaacccaagccagcgccaaaggctacatctccgtccaataccaagaataaggaggctcgaatcaaatccaccgattacagaaaatgggataagtacgatcccgatgaggagatactgcgcatggatttgaacgaggaacgcgaccaggagcaaagagagaaaatcatttccaatcacagtaaatcggttaccacggataagctacagagcgaaagagattctctatatgaacgcctccaagcacagctaaagaacctaagccagctggagaaggagcaatttgctgaaaggtagatatatcttaatgctttattatatgttttatatatttttgttgttgttaaagacatcgactgcgtggcaatgagagcttcaaggcaaaggaatatgaaaatgccattgaggagtacaactgttcaataatatacgatccggagaatgcagtacacgcttacaataatcgcgctgtcgctcgtaagtaatcatattaataataaaactctttatcaatttattgttcgattcattcgcagatctcaagttgaagaaatacttttcggccatatcggactgccaagcctgtctgcagatcgatccaatgaatattaaggcacaccttcgaatggctgaggcccacaatgccgaaggaaaacatcttgaggtaataattttgaatactttcatctttttgaaggctaaacctttccgtttcagtccctaaatgtttacaaaaagctcctcgactttgagccagataatgccattgccaagaaggccgtcgagaagctaacttcaatgctgggtgaggtggctccgtcctctgccacacgtttgataattgaggagatcgatcctccgcaactgaagacttccgaacccaagaaggaggctgagaaaagtgaaccaactgtggtcaagaaacccgaaccagttgtctcggcaaagaagccaccacccattaaagactacgatctagccgagttggtcaagccgaatcgcatggtgaaaagtaacttggtgtcagccgcagaagccttgggaaataagatgcaggccagcaagggaggtgcacctaagaagccacaaagtcctcctatgacaccaaaggaaaccttactgcgtttgccacaggacaaccttaacaatagcaataaacttcttatacaggaaatttagagaactgcatacagtgtctgcagcgtgatgtttttacgattgtttaaaaatatatacatatgtaatgcaaataaataatggaaaaataactgttttggtatgatcttttagccaccaaaaaatgaaatcgcgttaagtggtttgtataatttaattacaatttcttttaatataccgttgaaatatttgtcataaatttcgtttttttacaatataacttgtatatttggttttatcgtgtgctatccgtaattgtattgatgttattttcagcattttgttcttcatcgtattgttttcatttaatttggatataactagacagagaaagattaagtgctgttggatttggtttagagtcgagtgtacggtagcaacactaatcaacacgtacatttaacaaatctttaggaatttcaatacattataatataataatttataaaatggaaatgtagcatttagttttgtttggtattgttgaatctttgcttaatagattagccccatttaaaatatgcaacataacaattaacaatttcataattcttctatattattcgttatttgttttgtgatctcaaaagcgtttatttctgataacctttgaacgtcacactcagtgatactatttttatatattattgatatacatatatatattaaattgtggtaacatatgaacatatgcacgtacaatatgatcggttttaaattatccgatgaggttgtgggcgatatacacagaaataaagctaggaacttaatcagagctaaactagggaatgttgaaacatcattgtatactggagagatgcgcacatataatgtaagaaggtgaaatgagatggaactggtcacatgatcccatttactcgtgggcctgagactcctgctggacgagcttgaagcgccggggtgacttgatggatccctggtgtccgaatagcgccttcagctgtccattgtgcgtaaggaccttgcgaatatagcgcgacacgaggatctgcggacgctgtttgggtgaaaaatcatatgttcaattacattccattgagagggggagttagtcggg
